United States Patent Application Publication US 2011/0182862 A1 - sequence listing, part 10

SEQ ID NO: 13612 - DNA, 3379 bp, Muscodor strobelii
  misc_feature: SGI EST ID NO. CUFF.32752.2
  misc_feature: Variant of the nucleotide sequence at SEQ ID NO 13610
tatgcatcgacttatttggtactcatcattacctggtattcgcaaggatgtagctgtatcgagtaacgtctctacctaggactcttcaaaccacgctcgggatgatgcagcaatgccaatggcttgctcaagccacaacggccgatggttatgagtcgttgggcttctgcgtccaacacaaacgtgggggagtgtgtatttccctgctggcgtaataaaagtacaagagcccaacgtctgtttcctcacctatccacaccgcattgcgatccgccgtttctgtcttcttgatcaacatgtgtttgtataaataatcgcttcttttctcatcttcaggactggaaaggcaagggagtccacacagaatcacaacacctgtctgtgatgcttgagcgtcttggcactcttctctcaactgcatccacccacgttacacaggagtacacgtagctgccacccgtgcccaacgctaggtagatgaacgaacccggatagccaccttcatatctactccttctcgcccactgtcttttaactcgcgtgtttctcccttgagagtttcacttgacttattgtgagtcggctcgaatgtcttcaccatacaccaccccaaggctaatatggcttcgacccgatcagttccaagttcatatcccgaaacagcatcacctctcccgccaatcaatctcactcaccttaataatcgtcgattttctcgtgccataatgtctcaggatatggaccccaacaagcagaacaatgccttctcccggaacggcattaatcctggaacggactcggacttgatcgaggatattttcacgcctgctcgtcctccgcaatacagaacccagaacaatcatttgctctccgctggtcctgacaccgtcccacgaactgtgcgcgagaacggtctgcatatctacttgcatagcaagtatggcgttcgcccttgcagtgacaatgcatctcataccgatagcacccaaactatcacggcagatgctgctgctgcagtcactgcggcggcggtgcttccacggagcctctcccctgtcgagaacttggctcgtgggcctcgaaatcatgtcctatggcacgctacccggagctatgacggcacgcttcagcccttgactgagcttgctatcgcagctctaaaccacagcttcaaagacacctacactggtaatgtcgaccagtgggtcgatggccagtgtccatcgacactagaggagcccataagcattgatctgtcactgctcgaggctcgttccggcgtcacgatacgcacggagagtacgattgactcatcctggactgtcgtatcttcgacttatgacgtcgtaccatctcacatggacgaggaccttcgacgtgcgggtgcagagttcgacgacgtgcctgcttgcatcaattatgacctcatggatgaggactgtgcttgagtctttaaatttctttcttccttcttgtgtgttgtttctattgttctcttatgcttgagctgtcggttcgtgacgtggttggtaatgattttaatgaagttgatgaaaccgcaatgtcattaacgatgtgggctggatcatgatgacgatggtggcgtagtctggtgttggacgctaccattgacgctgatggatctcctttcattatgtctttgggtttcttgaatgtcttcggagttattttgggttcatgtctaggcgttaccacaagacgaaggagtcctgcattggtggtggtatgaattcccgtcacatcatcatctaccacatacacaaaggtagaggaagataacagcaggcggagacagactgcatcctgggaccagtccccttaccaaacccgacactcgtcgggctcggcccgctttatgccaggatggagttgtggctagctggcagcggcacttggcttgccattctcctatttcatgtacatagaaggacgaggaagtactctggtcttggacatgaaatgaaacgagttacgatttcatgttattgatgagatccacccttgatgcttcgatacttcgatgctgaaggtgagatgtgatattagaaatgtaagacgtagtaaaagaaacgatttgaccttgtcggggacgaaaatcgcaacccaaagtgcagtataagctctgcgctgcgtaagagaaatgaatagagcaggcttaccacaccacaatcgcatcacaccatcccacaccacaccaccttcgtcgagtaccatgccaagaccagtgtgtctcacttgtacctgaagccatcaccgtccctccacattttactgtcttactccaaatttccgatcttgcccccacgaagctctgcggggtacggtgaggctaattgtggtcgaggctggagtcgtaggttcagatcctggtgtttactccaaatctcatgtcagactgagaaatttttgactccatgcggctgagcggtgctgcaaggcggtgagttctgctatgagctttgaggcgcaaatagatattggtacagcgcattctgtgaaattagcgcacgacttcttccagcatttgaagatgaccatgacgttatgaagcgacagtttgcactgaactcgtaatgttttttgatgttgactctcgctataagcacccgattgtctgccttgtagccttgtcttgcgaagtatgcagccttggcgaataagccgaataggggtacgagtttcgttcttagacgccagcgcaagtaatacgttatcgagtacggagagaggatcgacccgtcttaaatagagccggtccttgaagcttcacgaaactttcaaactccattgccagcggagattattacagcgttggaacacagtggtttgaaaacattgagatggctcgcctcgaagtacgctatccctgcgcgcatgtggcgctgtagacatcgtctaacatagaattcgatgccgaacctgactccgcggagcagatttcaggtgctgaaagtatacgcgattgtgtgttcgtacacttgcaaaccgacaattcgacatacggacgaagcaaagagcagacctcctggctcctgcacaccttgattctgcgccagcgggttgtgtagccggcaaacaaattgttgtcgcgacttcttaacttgtcaagaatgacgaaatcatactgtctgtatcgctacacggtttggctctacaaggtcagcgaatctccgcaagtgtcaacacacggcgactagaggaaggcgcgtatcgagtagccacattgtatgtctgcatcgcctaggcagctcgatgagtctggagcattgtcctagtggtttgacgatcgggctccgctcgcatatcaacggagtcgattcctgttgcatacatggtaccactctgattttcctgtcag

SEQ ID NO: 13613 - DNA, 2322 bp, Muscodor strobelii
  misc_feature: SGI cDNA ID NO. 564466
  misc_feature: Reduced expression when VOC is produced
  misc_feature: Encodes the peptide sequence at SEQ ID NO 13614
atggctcccatcaagaccagcttgaagcgcaaagcttcaattgtcgaagccacccctgctttgccgccctctgccgacgacgatgacgaatttggaatgctagacggtgtgctctctggcgatgatgattctggcgaggagatcgcttccgacgagcttgacggagaggacgaagaggaatacgaatcagaagctgaggaggaagatgaactagacagtgaggacgaggaagaggacgaagaagacgaggaggacacgctctcgaggaaaacaaccatcacaaatgacacaagtctcaatggcgaggatgacgatgcgcccaactacagggttgacaaggatgcaaacggcaatgttcgctatgtctacgacgagatcgaccctatttacgactccgacgacaccgatgctcaaggtccgaccaacactatcggaaacatcgacctctcgttctacgactcatatcctcacatcggctacgacattaatggcaagaagattcttcgtcctgcgaccggacaggcccttgattcgctcctcgacagtatagaaatccctgagggctggacaggcctcacagacccggacaccgggaaacctctgaatctgagccgagatgaattggagctactcaagcgcgtgcagatgggacaggtcccagaggaaggctacgatccctatccggacaccgttgagtggtttacgggagtggaggagaagttccccttatctgcagcccctgaaccaaaaagacgcttcttgccttccaaacacgagcaaaagcgagtaatgaagctcgtcaaagccattcgcgaaggcagaatattgccctacaagtcaccagaggacaaagagaaagagcaggaggaggaagaggagcatcactatgacatttgggctgacgaaacgccacgcccgccgaatattatgcacatcgctgcgcccaagctggccgctccgggctatgatctctcgtataaccctccaccagaatacctacccacgaaggccgagaagaaagaatgggaggagaccgacccagaggagagggagaaatcatatctccctcagcaatatgactctttacggaaaacacctgcctacgacaatactatcaaagaacgattcgagagatgcttggatttgtacttggcgcctcgtgtacggaagaatcggctcaatattgatcccaactcgctattgcccaacctgcctcgccccgaagaactccgcccataccccactgttgcctctattgaattcgcggggcacgaaggaagggtcagatcggtgtcggttgactcgtcaggtcaatggttggcttcgggtggtgatgatggtacggtccgcgtctggagtctcgttgacgggaggcagcagtggcgcgtcaaattgagcagcgaagatcctatcgatgttgttagttggcgacctggacaagatgcattgattctatctgcagcggtcggtgaagatatttacctgatggtcccatccatcatcaaccccgaactcgaaatggctggccgcaccattctggactcaggcttcggttacgccaacaccgctaaacaggaaacaaccgcgaaaggggcaagaaaagatcctccggcgaaatgggctcgaccgggcggacggttagaggatgagggtgtcttggtaaaggcaacagtacgctcgcccatcaagacgatacactggcacaagagaggcgattacttctgtaccgtgtcgccaacgggccagcgcagcgccgttgctatacacacgttgaagaaacatttaactcagataccattccgcaggttcccaggcggtgcggctcagacagctcagttccacccatcacgcccacttttcttcgtcgcaactcagaggacaatacgctgttacgacttacataaatcagaactggtcaagacagtacaaccaggttgccgatggatctcgtctttcgacattcaccctggtggtgatcacttggtggctggatcttatgatcgtcgtctgctatggcatgatctcgagatgtcaacacggccatacaagacgttgcgattccacgatcaagcaattagggcagtaaagtgccacccaggctcttatccactattcgcagactgtagcgatgatggtacattgtcgattttccatgccaaagttgtcaatgatctgatggagggtccgacaatcacaccagtcaagatgttgtcaggccacaaggttgtgagcaggctaggcgtcacggatatagcttggcacccacaccacccatggattataagtgctggggccgatggaaaatgtagactgtggacgtaa

SEQ ID NO: 13614 - protein, 773 aa, Muscodor strobelii
  misc_feature: SGI Peptide ID NO. 564466
  misc_feature (415)..(453): Pfam Id: PF00400 Pfam Desc: WD domain, G-beta repeat
  misc_feature (679)..(718): Pfam Id: PF00400 Pfam Desc: WD domain, G-beta repeat
  misc_feature (735)..(773): Pfam Id: PF00400 Pfam Desc: WD domain, G-beta repeat
  misc_feature (152)..(414): Pfam Id: PF08145 Pfam Desc: BOP1NT (NUC169) domain
  misc_feature (747)..(773): Pfam Id: PF00400 Pfam Desc: WD domain, G-beta repeat
  misc_feature (1)..(773): NCBI GI: 46140177 Blast Desc: FG11603.1 [Gibberella zeae PH-1]
  misc_feature (1)..(773): NCBI GI: 154318415 Blast Desc: BC1G_03375 [Botryotinia fuckeliana B05.10] gi|229485392|sp|A6RRD4.1|ERB1_BOTFB RecName: Full=Ribosome biogenesis protein erb1; AltName: Full=Eukaryotic ribosome 1
  misc_feature (25)..(772): NCBI GI: 116181932 Blast Desc: conserved [Chaetomium globosum CBS 148.51] gi|121932786|sp|Q2HDW0.1|ERB1_CHAGB RecName: Full=Ribosome biogenesis protein ERB1; AltName: Full=Eukaryotic ribosome 1 CBS
  misc_feature (102)..(772): NCBI GI: 85113278 Blast Desc: eukaryotic ribosome biogenesis protein 1 [Neurospora crassa OR74A] gi|74696691|sp|Q7SEM3.1|ERB1_NEUCR RecName: Full=Ribosome biogenesis protein erb-1; AltName: Full=Eukaryotic
  misc_feature (1)..(772): NCBI GI: 39959156 Blast Desc: MGG_09313 [Magnaporthe grisea 70-15] gi|229485394|sp|A4R0Q1.1|ERB1_MAGGR RecName: Full=Ribosome biogenesis protein ERB1; AltName: Full=Eukaryotic ribosome 1
  misc_feature (32)..(772): NCBI GI: 171687377 Blast Desc: protein product [Podospora anserina] gi|229485396|sp|B2AY28.1|ERB1_PODAN RecName: Full=Ribosome biogenesis protein ERB1; AltName: Full=Eukaryotic ribosome 1
  misc_feature (6)..(773): NCBI GI: 121925424 Blast Desc: protein product [Podospora anserina] gi|229485396|sp|B2AY28.1|ERB1_PODAN RecName: Full=Ribosome biogenesis protein ERB1; AltName: Full=Eukaryotic ribosome 1
  misc_feature (10)..(773): NCBI GI: 189188994 Blast Desc: ribosome biogenesis protein BOP1 [Pyrenophora tritici-repentis Pt-1C-BFP] gi|229485397|sp|B2VR76.1|ERB1_PYRTR RecName: Full=Ribosome biogenesis protein @(ERB1); AltName: 1
  misc_feature (82)..(772): NCBI GI: 121702143 Blast Desc: ribosome biogenesis protein Erb1, [Aspergillus clavatus NRRL 1] gi|229485389|sp|A1CQI9.1|ERB1_ASPCL RecName: Full=Ribosome biogenesis protein erb1; AltName: Full=Eukaryotic 1
  misc_feature (1)..(772): NCBI GI: 238485041 Blast Desc: ribosome biogenesis protein Erb1, [Aspergillus flavus NRRL3357] gi|220701809|gb|EED58147.1| ribosome biogenesis protein Erb1, [Aspergillus flavus NRRL3357]
  misc_feature: Useful for introducing or modulating the production of volatile compounds
MAPIKTSLKRKASIVEATPALPPSADDDDEFGMLDGVLSGDDDSGEEIASDELDGEDEEEYESEAEEEDELDSEDEEEDEEDEEDTLSRKTTITNDTSLNGEDDDAPNYRVDKDANGNVRYVYDEIDPIYDSDDTDAQGPTNTIGNIDLSFYDSYPHIGYDINGKKILRPATGQALDSLLDSIEIPEGWTGLTDPDTGKPLNLSRDELELLKRVQMGQVPEEGYDPYPDTVEWFTGVEEKFPLSAAPEPKRRFLPSKHEQKRVMKLVKAIREGRILPYKSPEDKEKEQEEEEEHHYDIWADETPRPPNIMHIAAPKLAAPGYDLSYNPPPEYLPTKAEKKEWEETDPEEREKSYLPQQYDSLRKTPAYDNTIKERFERCLDLYLAPRVRKNRLNIDPNSLLPNLPRPEELRPYPTVASIEFAGHEGRVRSVSVDSSGQWLASGGDDGTVRVWSLVDGRQQWRVKLSSEDPIDVVSWRPGQDALILSAAVGEDIYLMVPSIINPELEMAGRTILDSGFGYANTAKQETTAKGARKDPPAKWARPGGRLEDEGVLVKATVRSPIKTIHWHKRGDYFCTVSPTGQRSAVAIHTLKKHLTQIPFRRFPGGAAQTAQFHPSRPLFFVATQRTIRCYDLHKSELVKTVQPGCRWISSFDIHPGGDHLVAGSYDRRLLWHDLEMSTRPYKTLRFHDQAIRAVKCHPGSYPLFADCSDDGTLSIFHAKVVNDLMEGPTITPVKMLSGHKVVSRLGVTDIAWHPHHPWIISAGADGKCRLWT

SEQ ID NO: 13615 - DNA, 2788 bp, Muscodor strobelii
  misc_feature: SGI EST ID NO. CUFF.32956.1
  misc_feature: Variant of the nucleotide sequence at SEQ ID NO 13613
aaaagttgcacggctaaaccacagcctcaacctagccaaccattcggccaagagccaccatcaacaccaatttcaaggcacagtgatggctcccatcaagaccagcttgaagcgcaaagcttcaattgtcgaagccacccctgctttgccgccctctgccgacgacgatgacgaatttggaatgctagacggtgtgctctctggcgatgatgattctggcgaggagatcgcttccgacgagcttgacggagaggacgaagaggaatacgaatcagaagctgaggaggaagatgaactagacagtgaggacgaggaagaggacgaagaagacgaggaggacacgctctcgaggaaaacaaccatcacaaatgacacaagtctcaatggcgaggatgacgatgcgcccaactacagggttgacaaggatgcaaacggcaatgttcgctatgtctacgacgagatcgaccctatttacgactccgacgacaccgatgctcaaggtccgaccaacactatcggaaacatcgacctctcgttctacgactcatatcctcacatcggctacgacattaatggcaagaagattcttcgtcctgcgaccggacaggcccttgattcgctcctcgacagtatagaaatccctgagggctggacaggcctcacagacccggacaccgggaaacctctgaatctgagccgagatgaattggagctactcaagcgcgtgcagatgggacaggtcccagaggaaggctacgatccctatccggacaccgttgagtggtttacgggagtggaggagaagttccccttatctgcagcccctgaaccaaaaagacgcttcttgccttccaaacacgagcaaaagcgagtaatgaagctcgtcaaagccattcgcgaaggcagaatattgccctacaagtcaccagaggacaaagagaaagagcaggaggaggaagaggagcatcactatgacatttgggctgacgaaacgccacgcccgccgaatattatgcacatcgctgcgcccaagctggccgctccgggctatgatctctcgtataaccctccaccagaatacctacccacgaaggccgagaagaaagaatgggaggagaccgacccagaggagagggagaaatcatatctccctcagcaatatgactctttacggaaaacacctgcctacgacaatactatcaaagaacgattcgagagatgcttggatttgtacttggcgcctcgtgtacggaagaatcggctcaatattgatcccaactcgctattgcccaacctgcctcgccccgaagaactccgcccataccccactgttgcctctattgaattcgcggggcacgaaggaagggtcagatcggtgtcggttgactcgtcaggtcaatggttggcttcgggtggtgatgatggtacggtccgcgtctggagtctcgttgacgggaggcagcagtggcgcgtcaaattgagcagcgaagatcctatcgatgttgttagttggcgacctggacaagatgcattgattctatctgcagcggtcggtgaagatatttacctgatggtcccatccatcatcaaccccgaactcgaaatggctggccgcaccattctggactcaggcttcggttacgccaacaccgctaaacaggaaacaaccgcgaaaggggcaagaaaagatcctccggcgaaatgggctcgaccgggcggacggttagaggatgagggtgtcttggtaaaggcaacagtacgctcgcccatcaagacgatacactggcacaagagaggcgattacttctgtaccgtgtcgccaacgggccagcgcagcgccgttgctatacacacgttgaagaaacatttaactcagataccattccgcaggttcccaggcggtgcggctcagacagctcagttccacccatcacgcccacttttcttcgtcgcaactcagaggacaatacgctgttacgacttacataaatcagaactggtcaagacagtacaaccaggttgccgatggatctcgtctttcgacattcaccctggtggtgatcacttggtggctggatcttatgatcgtcgtctgctatggcatgatctcgagatgtcaacacggccatacaagacgttgcgattccacgatcaagcaattagggcagtaaagtgccacccaggctcttatccactattcgcagactgtagcgatgatggtacattgtcgattttccatgccaaagttgtcaatgatctgatggagggtccgacaatcacaccagtcaagatgttgtcaggccacaaggttgtgagcaggctaggcgtcacggatatagcttggcacccacaccacccatggattataagtgctggggccgatggaaaatgtagactgtggacgtaataagctttgtaggcgtataagttctgtatataaatagaagggagaccaataagtatcgcctcgccttgttttatgtggcatgacgacgtttagaagaagcaaaagtgagcatttcaaatagcattggaggtaccccgagtatttcgtgatcccaatcctttttcatgatcatgctatactacctggtcacctacctagtaataagcactgtttccgatagtcctgcgatatcttccggcaagatgacgtgtcattcaaatccaatagaagcagaaaacctgcggaagccctccaaacagacggtgaagtaagggtcgagtacccacaaaattcgtttccgcatgtgggttgctgaggaccttggttggcgatgggcatagc

SEQ ID NO: 13616 - DNA, 792 bp, Muscodor strobelii
  misc_feature: SGI cDNA ID NO. 564467
  misc_feature: Encodes the peptide sequence at SEQ ID NO 13617
atgactgataccgccccagaacccccgccaatctcatatcccttcatagagactgagtttgtgcagcctgggctctcgcccgcacctgcgcagatggcgtctgaaggtgagcccatggctgacggcgaggaacacatagccgaagcggaggaggaggagcaggagacgacaccaccagcacctgcaccagcatctacaccaacccccaccaccaaagccaccaagtctcccaagtcgcaccctcaccaagtcccacaggttgatgctgccacacgcgccgccctcaaagcagtgaagcgcttctgtgtagatgagaaactatctcataccaatcaccagatcttcagacatttcggcgtcaccgatagaaccggctatcgcattctcaaagaagccgaacggactgagcccagggaagagacccgcggtcgtcccaaggctctttctgatgaacaggtcgaccacttagacagattcctcggtgagggcttcgagcctcgcatgatgccctggaaggatctctgtgacgccgcgggcatcatcataccggatgggaagaaggcgccctgtccacagtcggttcaaaaatcactgggccgtcgaggttggaagaagtgcggtatctgtcacaagatctggagaaatcacgagttcatacagcccgacactcctcagaagtctgaccagaatggcaagaaccccaatcctctcgctcgcaagccgacgttctgcccggaatgtatcagggatcgtgtacatccgcctgcagttgtcccgccagtagcccgatag

SEQ ID NO: 13617 - protein, 263 aa, Muscodor strobelii
  misc_feature: SGI Peptide ID NO. 564467
  misc_feature (87)..(213): NCBI GI: 116198635 Blast Desc: CHGG_07473 [Chaetomium globosum CBS 148.51] gi|88178752|gb|EAQ86220.1| CHGG_07473 [Chaetomium globosum CBS 148.51]
  misc_feature (73)..(213): NCBI GI: 46122807 Blast Desc: FG05781.1 [Gibberella zeae PH-1]
  misc_feature (88)..(213): NCBI GI: 256726628 Blast Desc: [Nectria haematococca mpVI 77-13-4]
MTDTAPEPPPISYPFIETEFVQPGLSPAPAQMASEGEPMADGEEHIAEAEEEEQETTPPAPAPASTPTPTTKATKSPKSHPHQVPQVDAATRAALKAVKRFCVDEKLSHTNHQIFRHFGVTDRTGYRILKEAERTEPREETRGRPKALSDEQVDHLDRFLGEGFEPRMMPWKDLCDAAGIIIPDGKKAPCPQSVQKSLGRRGWKKCGICHKIWRNHEFIQPDTPQKSDQNGKNPNPLARKPTFCPECIRDRVHPPAVVPPVAR

SEQ ID NO: 13618 - DNA, 1167 bp, Muscodor strobelii
  misc_feature: SGI cDNA ID NO. 564468
  misc_feature: Elevated expression when VOC is produced
  misc_feature: Encodes the peptide sequence at SEQ ID NO 13619
atggaagcaccatttccaccagatgaaagccgtgcaacttcgctggaagcgttattatggaccgagttcggggtggctacaatcttcatcatcctccgactagtgactcggcagcagaagcgtagtcttggtcttgacgatggcttgatgacaggctcatgggtgttttacctcgcaaccgcgattgccatccaattctcggcgcaggccagtggtgggatgcggcatatctggtatctcacattgccagaaatctcttaccaacttgaaatcaccaatgtcaccttgtacatcagtatcgtgtgcacggccttaggcaagattgccatcggcgtgacgattctccgcatcgtgagcagtgcgtcggcaagcgagaggtgggtggtatgggtcgtcatcctgatcacagtcgtcagctccgtcgtcgatatcttcctaagcctcttccaatgtggtccaaaccccatcgccatctgggatttgactctgcacgctacagctaagtgtgttgacccaatagccatacagcattacacgaccttcaccgccgtctggcaggctttcactgattttgccttctctgtcttgcctattttcatcgtctggaggctacgtatggccacgcggcggaagattatccttactatcggtcttggtctgacgctactcacggccggcgttgccgcagctaagagcacgtatatagcgaaacaatcgacggatgcttcatccgatattacctgggatcttttcgaagtctacgcactgctcagcaccgaagctttgctgatcatcatgtgtggctctgtaccttcgatttacccgatgtggttccatttaattcaacgaaagcgcacaagctatatatctcacgagtccacctaccgcagacatgcgtacaaactatcacaaccagactcggcgaagagccccaatcgctggtggcagtacagccgatcagccacagatcctagtaccgaattgtcttgtgatgtcgagatcgcgatgttgacaggggctccgctccaaccccaggctgttgcagccgccgtctcgaggaggtccaattcggttcacgatgatttatgtcatggaaagatccacgtggtgaaagaagtcgagttatcacatgctccgaacgttaggagctatagtttgccgaactga

SEQ ID NO: 13619 - protein, 388 aa, Muscodor strobelii
  misc_feature: SGI Peptide ID NO. 564468
  misc_feature (7)..(309): NCBI GI: 116201117 Blast Desc: CHGG_08443 [Chaetomium globosum CBS 148.51] gi|88176961|gb|EAQ84429.1| CHGG_08443 [Chaetomium globosum CBS 148.51]
  misc_feature (4)..(309): NCBI GI: 145228449 Blast Desc: An01g00890 [Aspergillus niger] gi|134054622|emb|CAK43467.1| protein product [Aspergillus niger]
  misc_feature (15)..(310): NCBI GI: 159124175 Blast Desc: conserved [Aspergillus fumigatus A1163]
  misc_feature (8)..(327): NCBI GI: 154321179 Blast Desc: [Botryotinia fuckeliana B05.10] gi|150852002|gb|EDN27194.1| [Botryotinia fuckeliana B05.10]
  misc_feature (2)..(298): NCBI GI: 154320884 Blast Desc: [Botryotinia fuckeliana B05.10] gi|150853603|gb|EDN28795.1| [Botryotinia fuckeliana B05.10]
  misc_feature (6)..(287): NCBI GI: 240110851 Blast Desc: CPC735_037130 [Coccidioides posadasii C735 delta SOWgp]
  misc_feature (6)..(325): NCBI GI: 225557238 Blast Desc: integral membrane protein [Ajellomyces capsulatus G186AR]
  misc_feature (2)..(284): NCBI GI: 226287054 Blast Desc: integral membrane protein [Paracoccidioides brasiliensis Pb18]
  misc_feature (15)..(287): NCBI GI: 67903968 Blast Desc: AN8971.2 [Aspergillus nidulans FGSC A4] gi|40744610|gb|EAA63766.1| AN8971.2 [Aspergillus nidulans FGSC A4] gi|259486580|tpe|CBF84542.1| TPA: integral membrane protein
  misc_feature (9)..(276): NCBI GI: 67538988 Blast Desc: AN5664.2 [Aspergillus nidulans FGSC A4] gi|40743567|gb|EAA62757.1| AN5664.2 [Aspergillus nidulans FGSC A4] gi|259484863|tpe|CBF81448.1| TPA: conserved [Aspergillus FGSC
  misc_feature: Useful for introducing or modulating the production of volatile compounds
MEAPFPPDESRATSLEALLWTEFGVATIFIILRLVTRQQKRSLGLDDGLMTGSWVFYLATAIAIQFSAQASGGMRHIWYLTLPEISYQLEITNVTLYISIVCTALGKIAIGVTILRIVSSASASERWVVWVVILITVVSSVVDIFLSLFQCGPNPIAIWDLTLHATAKCVDPIAIQHYTTFTAVWQAFTDFAFSVLPIFIVWRLRMATRRKIILTIGLGLTLLTAGVAAAKSTYIAKQSTDASSDITWDLFEVYALLSTEALLIIMCGSVPSIYPMWFHLIQRKRTSYISHESTYRRHAYKLSQPDSAKSPNRWWQYSRSATDPSTELSCDVEIAMLTGAPLQPQAVAAAVSRRSNSVHDDLCHGKIHVVKEVELSHAPNVRSYSLPN

SEQ ID NO: 13620 - DNA, 2900 bp, Muscodor strobelii
  misc_feature: SGI EST ID NO. CUFF.32575.1
  misc_feature: Variant of the nucleotide sequence at SEQ ID NO 13618
ctcggatttcgtcaggttcaaactggggatcacagtcctctccgagcacctacttcgctcacaagttacatacagagctcaattatatgcagagcattcatacaataggtgccgagaccgtgccccttgacgaaatcgctaaaattggtcgatggtaccatattggagcttcttttccccggtgtacatgataagtcttgtctcaagcagtattacgcgggaaatgggaaacgctcacaacaatattgatgcaggctccgtgtatttcatcgactgatcttgagtcttaagtactaagcatggccagcttcactcacgcaatcgattacgacgtgaaccctatgggccctactatataggaaacttcgaagaaacactctcaataatagggaagatggcccccacgttcgctgggtatctccaactgactggaatcgtgtgtatgggttgttatgcgtgtccatacaaatgcttactgtaccagatgctaccccaagatcgaacattttgattcaatggcgcgacacgtcaataaaggcacgtgagattgggacctcgctctattacgtgccgacgatctccaagataaagttgtgggggaatgcccggaagagtgatccgtcacgtcggccatcactgccttatctcctgcaaagacgcactggccctgtcaatccggaaggtgggttgactgcatggacggcagcagatagcaatgcgcccatcgctacctgagtcgaattcgcgaattccagaaagtcttctcgggcggtatctatgacacaactgtcatcgtccgcatatgtcaaattcagaaactcgttatgtttatcgccgaacttcttaaatatgaccctccaccatcagcgctgttgtagaaagtcatgatatttgactgaacctcaaatgtctgtcgaaaagaagcacgattgcacgtcagagtgaaccgataccaatggaagcaccatttccaccagatgaaagccgtgcaacttcgctggaagcgttattatggaccgagttcggggtggctacaatcttcatcatcctccgactagtgactcggcagcagaagcgtagtcttggtcttgacgatggcttgatgacaggctcatgggtgttttacctcgcaaccgcgattgccatccaattctcggcgcaggccagtggtgggatgcggcatatctggtatctcacattgccagaaatctcttaccaacttgaaatcaccaatgtcaccttgtacatcagtatcgtgtgcacggccttaggcaagattgccatcggcgtgacgattctccgcatcgtgagcagtgcgtcggcaagcgagaggtgggtggtatgggtcgtcatcctgatcacagtcgtcagctccgtcgtcgatatcttcctaagcctcttccaatgtggtccaaaccccatcgccatctgggatttgactctgcacgctacagctaagtgtgttgacccaatagccatacagcattacacgaccttcaccgccgtctggcaggctttcactgattttgccttctctgtcttgcctattttcatcgtctggaggctacgtatggccacgcggcggaagattatccttactatcggtcttggtctgacgctactcacggccggcgttgccgcagctaagagcacgtatatagcgaaacaatcgacggatgcttcatccgatattacctgggatcttttcgaagtctacgcactgctcagcaccgaagctttgctgatcatcatgtgtggctctgtaccttcgatttacccgatgtggttccatttaattcaacgaaagcgcacaagctatatatctcacgagtccacctaccgcagacatgcgtacaaactatcacaaccagactcggcgaagagccccaatcgctggtggcagtacagccgatcagccacagatcctagtaccgaattgtcttgtgatgtcgagatcgcgatgttgacaggggctccgctccaaccccaggctgttgcagccgccgtctcgaggaggtccaattcggttcacgatgatttatgtcatggaaagatccacgtggtgaaagaagtcgagttatcacatgctccgaacgttaggagctatagtttgccgaactgatcacacatctttcttcgtgctttcatgatgcggcacgagcactagtatgactattggtagaacacccggctacttgcctacatagaggtagtgtccaggctgcgtttgcaacagcagcttctgcaatgaaattccattttctcaaagcattgtgatcatggtaccatatagaaagctgcatgtgtctggtatacatttcattctatatagcaccgggaccgttttggctcgcaagaccgtgcttttgtactttagtatacctacgcgtgtgataatcattgtgctggtcattctataagccccggctcgaaagatgttcgcgaccatttaacgctccccagttaagtctaaaccccgcagtttcatcatcattacaccctctgcagaccccgaaattatcatagaaatcatgatcatagaatcaacaagccctggacattgtgatcagaaagctctgggcgctacacttcagctgcgccccaaaattgtctaaagcacagcgccacatggcacagccccgtacacaaccccgtcctctgttcgtccgcatgatcatgccgccattcttcacttagagcccgatcaggttgcgaggggaatgtagtgcaatactgtgcttcaattcctcatcaccccggttttttaattataagaaacagttcttggttattgagagattacgcggttctcatggaggtaggcctcacgtttggtagtgtcggcgacatcattgccatctgtcaactggcaatccaactagggaaaattataggtgttg

SEQ ID NO: 13621 - DNA, 1746 bp, Muscodor strobelii
  misc_feature: SGI cDNA ID NO. 564469
  misc_feature: Encodes the peptide sequence at SEQ ID NO 13622
atggcgtccgtattcagcatcgtcgtcgccgtctgcgccatgtttgccgaggtgttcctcttctggtacaagaaactcctcggacgatggagaaccaggagcttggtcgatgaatggctcgagacgttacacaatgctgaggtctttgaggattgggaacacgctgccctgcagctcgacaatctcaaagagttgaatttctggcgcaacgatccatcctcacattcctacgactggaccttgatcagcgaccgcctcaactccatcctcgccgctcgcgatgagaacgacctgcagtctctcgtcgacctcgtgcgttctggcttggtgcggaatctgggaaacatatcgtccccacgactttacaacagatcttttgccggaaccaaatatctgatcgaagagtacatagcgcaagttgcgggcgcggttaaggatattaatgcccagagtgtgactccgttgcaggacaaatacactcataactacactctttcgacacagcgcaagctcgacttcctgcacgatgctcgacaagcatttgggagaagcacactcgtgcttcaaggcggtgccatctttggattatgtcacgtcggcgtagtgaaagccctgttcttgcgaggtcttttaccacgcatcatcacgggtaccgcaactggcgcactgattgcaagccttgtagccattcataccgaagacgagctccccggtgtcctcaaaggggacggcattgatttgtcggcctttgaaaaacatgaacagcaagtgcatcagaagcaaaattggtctattgtaggaagtagatgggagactctcatccgcagacttctccgcttctggcgcgagggttattttctcgatgtcaaggttctcgaggagtgtgtcaaggcgaatctgggcgatctgacttttgaagaagcttacaatagaagtaaacgggtcttgaatattacagtggctacggcggcgcaagatggtataccgacgcttctgaactatattaccgccccgaacgttgtgatatggacagcagcggtagcatcgaacgcatcgacgccctcgctctatggaagcaagcagacaacaatcctctgtaaagacgtcgatggcaacatcgtaccctgggcattagcaaacacgattcgaccgtggactcacgcctccagcaaggatcagaaatcaccactgacacgaattacgcagttgttcaacgtcaatcactttattgtcagtcaggcacgaccttatctcatcccattcctcgaatccgatatgcacggaccttcactcttcacagcgcggcacaagcgtgcgcagatcacaagtaacttgtttaggattgtcggcttagaattgcgacatcggctcagacaacttgatacacttggtctacttccagcgggcatccgtagattcctagttgacgaggaggtccccggcgcgagtatgatgctagtgcccacagtcaacgcatccgattttgtgaggctactagaaacacctacaagagagacactagacaactggatactccgcggcgaacgtagcgtctggcccgctgtctgtgcactgaagataaggtgcatgattgaatacgatatcgagacggcgtatcaacgcgcgcgcagcctaaaagccggaggcttgaggaggaaagctagtacggcggcagcacctgcgcttatggatcttaaagctacaggtcttgtgcgtaatgatacgaatagcacggcggcgggttag

SEQ ID NO: 13622 - protein, 581 aa, Muscodor strobelii
  misc_feature: SGI Peptide ID NO. 564469
  misc_feature (186)..(380): Pfam Id: PF01734 Pfam Desc: Patatin-like phospholipase
  misc_feature (186)..(349): Pfam Id: PF01734 Pfam Desc: Patatin-like phospholipase
  misc_feature (30)..(581): NCBI GI: 46107274 Blast Desc: FG00520.1 [Gibberella zeae PH-1]
  misc_feature (6)..(557): NCBI GI: 156053051 Blast Desc: SS1G_06693 [Sclerotinia sclerotiorum 1980] gi|154704471|gb|EDO04210.1| SS1G_06693 [Sclerotinia sclerotiorum 1980]
  misc_feature (6)..(557): NCBI GI: 154318379 Blast Desc: BC1G_03357 [Botryotinia fuckeliana B05.10] gi|150842880|gb|EDN18073.1| BC1G_03357 [Botryotinia fuckeliana B05.10]
  misc_feature (11)..(529): NCBI GI: 261355999 Blast Desc: lipase [Verticillium albo-atrum VaMs.102]
  misc_feature (164)..(566): NCBI GI: 171687367 Blast Desc: protein product [Podospora anserina] gi|170943645|emb|CAP69297.1| protein product [Podospora anserina]
  misc_feature (4)..(560): NCBI GI: 121702161 Blast Desc: Patatin-like serine hydrolase, [Aspergillus clavatus NRRL 1] gi|119397488|gb|EAW07919.1| Patatin-like serine hydrolase, [Aspergillus clavatus NRRL 1]
  misc_feature (24)..(559): NCBI GI: 119496161 Blast Desc: Patatin-like serine hydrolase, [Neosartorya fischeri NRRL 181] gi|119413016|gb|EAW22957.1| Patatin-like serine hydrolase, [Neosartorya fischeri NRRL 181]
  misc_feature (9)..(543): NCBI GI: 169768076 Blast Desc: [Aspergillus oryzae RIB40] gi|238485025|ref|XP_002373751.1| Patatin-like serine hydrolase, [Aspergillus flavus NRRL3357] gi|83766364|dbj|BAE56507.1| protein
  misc_feature (34)..(561): NCBI GI: 116181938 Blast Desc: CHGG_01597 [Chaetomium globosum CBS 148.51] gi|88185894|gb|EAQ93362.1| CHGG_01597 [Chaetomium globosum CBS 148.51]
  misc_feature (24)..(559): NCBI GI: 159131034 Blast Desc: Patatin-like serine hydrolase, [Aspergillus fumigatus A1163]
  misc_feature (21)..(551): SWISSPROT Homolog: EC 3.1.1.3 Triacylglycerol lipase
MASVFSIVVAVCAMFAEVFLFWYKKLLGRWRTRSLVDEWLETLHNAEVFEDWEHAALQLDNLKELNFWRNDPSSHSYDWTLISDRLNSILAARDENDLQSLVDLVRSGLVRNLGNISSPRLYNRSFAGTKYLIEEYIAQVAGAVKDINAQSVTPLQDKYTHNYTLSTQRKLDFLHDARQAFGRSTLVLQGGAIFGLCHVGVVKALFLRGLLPRIITGTATGALIASLVAIHTEDELPGVLKGDGIDLSAFEKHEQQVHQKQNWSIVGSRWETLIRRLLRFWREGYFLDVKVLEECVKANLGDLTFEEAYNRSKRVLNITVATAAQDGIPTLLNYITAPNVVIWTAAVASNASTPSLYGSKQTTILCKDVDGNIVPWALANTIRPWTHASSKDQKSPLTRITQLFNVNHFIVSQARPYLIPFLESDMHGPSLFTARHKRAQITSNLFRIVGLELRHRLRQLDTLGLLPAGIRRFLVDEEVPGASMMLVPTVNASDFVRLLETPTRETLDNWILRGERSVWPAVCALKIRCMIEYDIETAYQRARSLKAGGLRRKASTAAAPALMDLKATGLVRNDTNSTAAG

SEQ ID NO: 13623 - DNA, 3235 bp, Muscodor strobelii
  misc_feature: SGI EST ID NO. CUFF.32645.1
  misc_feature: Variant of the nucleotide sequence at SEQ ID NO 13621
cagctcccaacggcatctttcccatcctccaaagctcacctcagcttcccaaccgaacgcgccgtggctgtctccgggtccgttcctaccatcaattgatagctctttccatcttccatcaaagctgctacgtcattcgatcgaatctgttgaacttacgctcttatggattgaaatatatgtctacaatcaaactgtcttgagagtatgtcagcttcttgaatgcattcgcaagtggcatgagatgcgtgacatggtagtatcttaatggtgggagttatcctccctacctaacatcatatcgtcacccaagcctctcttgcttggtgcttgggggagatcgttcctactaggcaacgatggcgtccgtattcagcatcgtcgtcgccgtctgcgccatgtttgccgaggtgttcctcttctggtacaagaaactcctcggacgatggagaaccaggagcttggtcgatgaatggctcgagacgttacacaatgctgaggtctttgaggattgggaacacgctgccctgcagctcgacaatctcaaagagttgaatttctggcgcaacgatccatcctcacattcctacgactggaccttgatcagcgaccgcctcaactccatcctcgccgctcgcgatgagaacgacctgcagtctctcgtcgacctcgtgcgttctggcttggtgcggaatctgggaaacatatcgtccccacgactttacaacagatcttttgccggaaccaaatatctgatcgaagagtacatagcgcaagttgcgggcgcggttaaggatattaatgcccagagtgtgactccgttgcaggacaaatacactcataactacactctttcgacacagcgcaagctcgacttcctgcacgatgctcgacaagcatttgggagaagcacactcgtgcttcaaggcggtgccatctttggattatgtcacgtcggcgtagtgaaagccctgttcttgcgaggtcttttaccacgcatcatcacgggtaccgcaactggcgcactgattgcaagccttgtagccattcataccgaagacgagctccccggtgtcctcaaaggggacggcattgatttgtcggcctttgaaaaacatgaacagcaagtgcatcagaagcaaaattggtctattgtaggaagtagatgggagactctcatccgcagacttctccgcttctggcgcgagggttattttctcgatgtcaaggttctcgaggagtgtgtcaaggcgaatctgggcgatctgacttttgaagaagcttacaatagaagtaaacgggtcttgaatattacagtggctacggcggcgcaagatggtataccgacgcttctgaactatattaccgccccgaacgttgtgatatggacagcagcggtagcatcgaacgcatcgacgccctcgctctatggaagcaagcagacaacaatcctctgtaaagacgtcgatggcaacatcgtaccctgggcattagcaaacacgattcgaccgtggactcacgcctccagcaaggatcagaaatcaccactgacacgaattacgcagttgttcaacgtcaatcactttattgtcagtcaggcacgaccttatctcatcccattcctcgaatccgatatgcacggaccttcactcttcacagcgcggcacaagcgtgcgcagatcacaagtaacttgtttaggattgtcggcttagaattgcgacatcggctcagacaacttgatacacttggtctacttccagcgggcatccgtagattcctagttgacgaggaggtccccggcgcgagtatgatgctagtgcccacagtcaacgcatccgattttgtgaggctactagaaacacctacaagagagacactagacaactggatactccgcggcgaacgtagcgtctggcccgctgtctgtgcactgaagataaggtgcatgattgaatacgatatcgagacggcgtatcaacgcgcgcgcagcctaaaagccggaggcttgaggaggaaagctagtacggcggcagcacctgcgcttatggatcttaaagctacaggtcttgtgcgtaatgatacgaatagcacggcggcgggttagaggaatgcaagacgtgctagtctgagggaagagttggggaggagatatattaagaggaagaggttggcgcttattgacgaggagagtgacgacgatactgaggtggaggtggcagagacgagacgtgcaagtgttccgtattctggagggtattaagatgggcaccttccgggcgtccgtgtacttgtttgacgtgccgagatggtgatttgggatcttatggtggcgtttggggtctcgtcgtactgtgcatctagttacggatgaattgtgggggggtagatgggtcggtgcataaatggggtctgttttcgatgggggaaaacaaaaattggctactgtgaatacgtagtcgtatgtaaattgcagaatagatgtacactttacacgttttgaagatacacaaccagcgctgggtattgtctttcaacttccgaaatcgactcttcataccgatggtcgcacaatctagacctggttgctatttctctcgtcatccgcatttctagcatataagattccgacttcgcgactgcttccagactgattgcaaaccgccaatacggccttacaacaacatttgcatcagaacatccagtgacgtcaaatatggacgacgatctgcgaaccaggctcggcaagtctcaaatagaggatagaggccaatcccgtaaccctttccccgctgaggcctggattgctgcattcacggacctcgccaacggaactcgtccgccagagccacaagcattggtagtgatcgatactgctagttccattgactgccccaagaagctacagaacttgataaactcaccatctgttcctaaagtgatcgaaacgaacgaagcatatgagttcccgccctctaccggtagagctgttcgggtatctccgatctcgttgcgagaaatgcagatacttgaggagcgcaccgaatcgaagacaatgttggtctggaggacacattggcagacacaagagccttcgatacgaatcgcgtacatcatcacatctgtgaaggtaatgaatgatatatcggaggaagttgaagaaaagtagtgccatgtccaagctaggtagaatttaagcaggcggagagaaaaaaatactcccatttttgatcctgc

SEQ ID NO: 13624 - DNA, 1890 bp, Muscodor strobelii
  misc_feature: SGI cDNA ID NO. 564470
  misc_feature: Encodes the peptide sequence at SEQ ID NO 13625
atgccgtcggagatatcggggcttggtgctggctggtctctttcacatgccactgccactgctagtgacgcacgcgtgccgtcgcgggacccgccgttggaaaccgaagagctctatttcggtgtcatgcgccagctcccaacggcatctttcccatcctccaaagctcacctcagcttcccaaccgaacgcgccgtggctgtctccggacaaaagaaactcctcggacgatggagaaccaggagcttggtcgatgaatggctcgagacgttacacaatgctgaggtctttgaggattgggaacacgctgccctgcagctcgacaatctcaaagagttgaatttctggcgcaacgatccatcctcacattcctacgactggaccttgatcagcgaccgcctcaactccatcctcgccgctcgcgatgagaacgacctgcagtctctcgtcgacctcgtgcgttctggcttggtgcggaatctgggaaacatatcgtccccacgactttacaacagatcttttgccggaaccaaatatctgatcgaagagtacatagcgcaagttgcgggcgcggttaaggatattaatgcccagagtgtgactccgttgcaggacaaatacactcataactacactctttcgacacagcgcaagctcgacttcctgcacgatgctcgacaagcatttgggagaagcacactcgtgcttcaaggcggtgccatctttggattatgtcacgtcggcgtagtgaaagccctgttcttgcgaggtcttttaccacgcatcatcacgggtaccgcaactggcgcactgattgcaagccttgtagccattcataccgaagacgagctccccggtgtcctcaaaggggacggcattgatttgtcggcctttgaaaaacatgaacagcaagtgcatcagaagcaaaattggtctattgtaggaagtagatgggagactctcatccgcagacttctccgcttctggcgcgagggttattttctcgatgtcaaggttctcgaggagtgtgtcaaggcgaatctgggcgatctgacttttgaagaagcttacaatagaagtaaacgggtcttgaatattacagtggctacggcggcgcaagatggtataccgacgcttctgaactatattaccgccccgaacgttgtgatatggacagcagcggtagcatcgaacgcatcgacgccctcgctctatggaagcaagcagacaacaatcctctgtaaagacgtcgatggcaacatcgtaccctgggcattagcaaacacgattcgaccgtggactcacgcctccagcaaggatcagaaatcaccactgacacgaattacgcagttgttcaacgtcaatcactttattgtcagtcaggcacgaccttatctcatcccattcctcgaatccgatatgcacggaccttcactcttcacagcgcggcacaagcgtgcgcagatcacaagtaacttgtttaggattgtcggcttagaattgcgacatcggctcagacaacttgatacacttggtctacttccagcgggcatccgtagattcctagttgacgaggaggtccccggcgcgagtatgatgctagtgcccacagtcaacgcatccgattttgtgaggctactagaaacacctacaagagagacactagacaactggatactccgcggcgaacgtagcgtctggcccgctgtctgtgcactgaagataaggtgcatgattgaatacgatatcgagacggcgtatcaacgcgcgcgcagcctaaaagccggaggcttgaggaggaaagctagtacggcggcagcacctgcgcttatggatcttaaagctacaggtcttgtgcgtaatgatacgaatagcacggcggcgggttag

SEQ ID NO: 13625 - protein, 629 aa, Muscodor strobelii
  misc_feature: SGI Peptide ID NO. 564470
  misc_feature (234)..(428): Pfam Id: PF01734 Pfam Desc: Patatin-like phospholipase
  misc_feature (234)..(397): Pfam Id: PF01734 Pfam Desc: Patatin-like phospholipase
  misc_feature (78)..(629): NCBI GI: 46107274 Blast Desc: FG00520.1 [Gibberella zeae PH-1]
  misc_feature (71)..(605): NCBI GI: 156053051 Blast Desc: SS1G_06693 [Sclerotinia sclerotiorum 1980] gi|154704471|gb|EDO04210.1| SS1G_06693 [Sclerotinia sclerotiorum 1980]
  misc_feature (71)..(605): NCBI GI: 154318379 Blast Desc: BC1G_03357 [Botryotinia fuckeliana B05.10] gi|150842880|gb|EDN18073.1| BC1G_03357 [Botryotinia fuckeliana B05.10]
  misc_feature (71)..(577): NCBI GI: 261355999 Blast Desc: lipase [Verticillium albo-atrum VaMs.102]
  misc_feature (212)..(614): NCBI GI: 171687367 Blast Desc: protein product [Podospora anserina] gi|170943645|emb|CAP69297.1| protein product [Podospora anserina]
  misc_feature (72)..(607): NCBI GI: 119496161 Blast Desc: Patatin-like serine hydrolase, [Neosartorya fischeri NRRL 181] gi|119413016|gb|EAW22957.1| Patatin-like serine hydrolase, [Neosartorya fischeri NRRL 181]
  misc_feature (87)..(609): NCBI GI: 116181938 Blast Desc: CHGG_01597 [Chaetomium globosum CBS 148.51] gi|88185894|gb|EAQ93362.1| CHGG_01597 [Chaetomium globosum CBS 148.51]
  misc_feature (72)..(607): NCBI GI: 159131034 Blast Desc: Patatin-like serine hydrolase, [Aspergillus fumigatus A1163]
  misc_feature (72)..(607): NCBI GI: 70995024 Blast Desc: Patatin-like serine hydrolase [Aspergillus fumigatus Af293] gi|66849913|gb|EAL90240.1| Patatin-like serine hydrolase, [Aspergillus fumigatus Af293]
  misc_feature (72)..(620): NCBI GI: 145239067 Blast Desc: An08g00620 [Aspergillus niger] gi|134076683|emb|CAK45214.1| protein product [Aspergillus niger]
  misc_feature (74)..(599): SWISSPROT Homolog: EC 3.1.1.3 Triacylglycerol lipase
MPSEISGLGAGWSLSHATATASDARVPSRDPPLETEELYFGVMRQLPTASFPSSKAHLSFPTERAVAVSGQKKLLGRWRTRSLVDEWLETLHNAEVFEDWEHAALQLDNLKELNFWRNDPSSHSYDWTLISDRLNSILAARDENDLQSLVDLVRSGLVRNLGNISSPRLYNRSFAGTKYLIEEYIAQVAGAVKDINAQSVTPLQDKYTHNYTLSTQRKLDFLHDARQAFGRSTLVLQGGAIFGLCHVGVVKALFLRGLLPRIITGTATGALIASLVAIHTEDELPGVLKGDGIDLSAFEKHEQQVHQKQNWSIVGSRWETLIRRLLRFWREGYFLDVKVLEECVKANLGDLTFEEAYNRSKRVLNITVATAAQDGIPTLLNYITAPNVVIWTAAVASNASTPSLYGSKQTTILCKDVDGNIVPWALANTIRPWTHASSKDQKSPLTRITQLFNVNHFIVSQARPYLIPFLESDMHGPSLFTARHKRAQITSNLFRIVGLELRHRLRQLDTLGLLPAGIRRFLVDEEVPGASMMLVPTVNASDFVRLLETPTRETLDNWILRGERSVWPAVCALKIRCMIEYDIETAYQRARSLKAGGLRRKASTAAAPALMDLKATGLVRNDTNSTAAG

SEQ ID NO: 13626 - DNA, 3235 bp, Muscodor strobelii; identical to SEQ ID NO: 13623
  misc_feature: SGI EST ID NO. CUFF.32645.1
  misc_feature: Variant of the nucleotide sequence at SEQ ID NO 13624

SEQ ID NO: 13627 - DNA, 1047 bp, Muscodor strobelii
  misc_feature: SGI cDNA ID NO. 564472
  misc_feature: Encodes the peptide sequence at SEQ ID NO 13628
atgtctaacctattctccggcataaacgctcggttccgaggaacctccacacgagctccgggacagaacagaagtccatctaacacaagccagcctggatctcccaacgatgttccccaggcttcatctcagagcagccaactgcctcccagctcggctcccaagataccgccgttgcccagctcaccttccttggctcagaatattggtatggatgagcctaatggcagcgcagcctccggcgaggaggtcctgaactcataccacctgccccggcctcttccactgtggctgaatgccgcatacgcaaagcacattgtcaagggcaacttcatgacattgagtgcaaggcccaagactgtagagcaagctgagtggatcgctcatcaagttgttgagcattaccgaaacctttggaactttgtccgtgtcatccatgaaaaggacgaggatggtactactatctgcaactcctcgacctgtccccggatgtctgctggcatgaatcactccttcacttggctcaacgctagacgggagcctgtcgagcttcccgcgtatgagtacatcaccttaatgcagcgctggatttcgggcaagatcgacgacacgaccatcttcccctgcgactccaatggagtatccttcgcgcacaacccttccgtcaccacaacccctctctcgcagcttacgagcccgacggatcgagactgggtaggaaagcgcagcggcttccctgagaacttcgttgaagtctgtcagaccatcttccgtcagatgttccgagtgtattctcacctctactgggctcacttcatcgaacccttctaccatctcaatctcgagaagcaactgaacagctgcttcagtcactttgtcctcacagcctgtgctttggatatgctaaagccgcaagagctcgagcccatgcagcctcttattgatctttgggccgccaatggcacctttcctcctggttccaaggcctacgactacgccaatcaccaagttggcgagcgcttgctccagatggccggcagcgcctag

SEQ ID NO: 13628 - protein, 348 aa, Muscodor strobelii
  misc_feature: SGI Peptide ID NO. 564472
  misc_feature (100)..(311): Pfam Id: PF03637 Pfam Desc: Mob1/phocein family
  misc_feature (245)..(311): Pfam Id: PF03637 Pfam Desc: Mob1/phocein family
  misc_feature (105)..(208): Pfam Id: PF03637 Pfam Desc: Mob1/phocein family
  misc_feature (9)..(345): NCBI GI: 46107270 Blast Desc: FG00518.1 [Gibberella zeae PH-1]
  misc_feature (53)..(346): NCBI GI: 256734528 Blast Desc: [Nectria haematococca mpVI 77-13-4]
  misc_feature (8)..(346): NCBI GI: 261355997 Blast Desc: maintenance of ploidy protein mob2 [Verticillium albo-atrum VaMs.102]
  misc_feature (55)..(348): NCBI GI: 85111385 Blast Desc: NCU07460 [Neurospora crassa OR74A] gi|28925660|gb|EAA34675.1| [Neurospora crassa OR74A]
  misc_feature (1)..(348): NCBI GI: 116180794 Blast Desc: CHGG_01025 [Chaetomium globosum CBS 148.51] gi|88185322|gb|EAQ92790.1| CHGG_01025 [Chaetomium globosum CBS 148.51]
  misc_feature (1)..(346): NCBI GI: 156053047 Blast Desc: SS1G_06691 [Sclerotinia sclerotiorum 1980] gi|154704469|gb|EDO04208.1| SS1G_06691 [Sclerotinia sclerotiorum 1980]
  misc_feature (1)..(346): NCBI GI: 154318383 Blast Desc: BC1G_03359 [Botryotinia fuckeliana B05.10] gi|150842882|gb|EDN18075.1| BC1G_03359 [Botryotinia fuckeliana B05.10]
  misc_feature (1)..(346): NCBI GI: 171687389 Blast Desc: protein product [Podospora anserina] gi|170943656|emb|CAP69308.1| protein product [Podospora anserina]
  misc_feature (1)..(346): NCBI GI: 85113249 Blast Desc: NCU03314 [Neurospora crassa OR74A] gi|28926275|gb|EAA35255.1| conserved [Neurospora crassa OR74A]
  misc_feature (1)..(348): NCBI GI: 171687417 Blast Desc: protein product [Podospora anserina] gi|170943670|emb|CAP69322.1| protein product [Podospora anserina]
MSNLFSGINARFRGTSTRAPGQNRSPSNTSQPGSPNDVPQASSQSSQLPPSSAPKIPPLPSSPSLAQNIGMDEPNGSAASGEEVLNSYHLPRPLPLWLNAAYAKHIVKGNFMTLSARPKTVEQAEWIAHQVVEHYRNLWNFVRVIHEKDEDGTTICNSSTCPRMSAGMNHSFTWLNARREPVELPAYEYITLMQRWISGKIDDTTIFPCDSNGVSFAHNPSVTTTPLSQLTSPTDRDWVGKRSGFPENFVEVCQTIFRQMFRVYSHLYWAHFIEPFYHLNLEKQLNSCFSHFVLTACALDMLKPQELEPMQPLIDLWAANGTFPPGSKAYDYANHQVGERLLQMAGSA

SEQ ID NO: 13629 - DNA, 1859 bp, Muscodor strobelii
  misc_feature: SGI EST ID NO. CUFF.32649.0
  misc_feature: Variant of the nucleotide sequence at SEQ ID NO 13627
ggctgctcaagtggaggggacctcagtcagtgcagcactgacgatcattgggcaagagacaacctcgaaacctcaggttgttgccacgagaaggcacatccctttgcccctttccaacaaaacatcgccgttcaacacacaatccccttgcacaccacactcccctttgtcgccgaaccatctggactcaccaggcggcacggcgattcacaaccggaacctctcatcctcctatttgacgtctttgctgccatcgccgagactcgtcttgccgttgcctgcccgatcctcgcctgaccccgcgggtcctacactccatcatgtctaacctattctccggcataaacgctcggttccgaggaacctccacacgagctccgggacagaacagaagtccatctaacacaagccagcctggatctcccaacgatgttccccaggcttcatctcagagcagccaactgcctcccagctcggctcccaagataccgccgttgcccagctcaccttccttggctcagaatattggtatggatgagcctaatggcagcgcagcctccggcgaggaggtcctgaactcataccacctgccccggcctcttccactgtggctgaatgccgcatacgcaaagcacattgtcaagggcaacttcatgacattgagtgcaaggcccaagactgtagagcaagctgagtggatcgctcatcaaggtttgtccttcatttgcaatatgcctttctcccagccatctgaccgtatcaagttgttgagcattaccgaaacctttggaactttgtccgtgtcatccatgaaaaggacgaggatggtactactatctgcaactcctcgacctgtccccggatgtctgctggcatgaatcactccttcacttggctcaacgctagacgggagcctgtcgagcttcccgcgtatgagtacatcaccttaatgcagcgctggatttcgggcaagatcgacgacacgaccatcttcccctgcgactccaatggagtatccttcgcgcacaacccttccgtcaccacaacccctctctcgcagcttacgagcccgacggatcgagactgggtaggaaagcgcagcggcttccctgagaacttcgttgaagtctgtcagaccatcttccgtcagatgttccgagtgtattctcacctctactgggctcacttcatcgaacccttctaccatctcaatctcgagaagcaactgaacagctgcttcagtcactttgtcctcacagcctgtgctttggatatgctaaagccgcaagagctcgagcccatgcagcctcttattgatctttgggccgccaatggcacctttcctcctggttccaaggcctacgactacgccaatcaccaagttggcgagcgcttgctccagatggccggcagcgcctagagctagggaagttcatgtcattacgtttgcaccaactgctgtcgaggataccaaagagtccaaatgagcagcacgtggaaagaggaaagaggccggtgttgtgttcacggcgtcagattcacataaatgatcatatagcgcgcaaagcatcagagcatgaactggagaggaaacgttcgtatgaaacgacgttcgcacctcatttggcattggcatacatacgaaaagagagagcttggctttctagaaatgaacgtttgcgtcattttgcctcgtagatagcatgagagcaagtagcatggcattgtcgcgttaggcgggccaacccaatacagagcatttgtctgtcatacgcgcggctgttttcgagtatggagatgtgaatacgtcaaagcataaaaagggtacatagtgagcaaacgaccaccatagagtgaga

SEQ ID NO: 13630 - DNA, 420 bp, Muscodor strobelii
  misc_feature: SGI cDNA ID NO. 564473
  misc_feature: Encodes the peptide sequence at SEQ ID NO 13631
atgttcggcgggccgctacatgtgcgtagccctatcatgcatagctcggcgacagaagtcgaaattcttcgcttcaccatccgcgcccagcttgggtcaggtgccacgactctcctgtcgttcgcagcgatgggcgcgatcccgaagccgcccgccggccacttcaatgtcctctacttcgcaagtgcaagttccttcgccaacagagaacacgacgtgctccccgctccgctcgcgatcaataagctgttcgatgtcctggaggagaagtaccccgggatgacggataaggtgctcgcttcttgcttggtgactgttaatctgaactatgttgaggcgaagacgagcgatggcgaagagcctgtcgtgcttcgtgagggtgatgaggttgggattattcctcctgtcagctccggctga

SEQ ID NO: 13631 - protein, 139 aa, Muscodor strobelii
  misc_feature: SGI Peptide ID NO. 564473
  misc_feature (57)..(139): Pfam Id: PF02597 Pfam Desc: ThiS family
  misc_feature (48)..(139): NCBI GI: 46108760 Blast Desc: FG01262.1 [Gibberella zeae PH-1]
  misc_feature (42)..(139): NCBI GI: 256735062 Blast Desc: [Nectria haematococca mpVI 77-13-4]
  misc_feature (44)..(139): NCBI GI: 39964901 Blast Desc: MGG_09893 [Magnaporthe grisea 70-15] gi|145013209|gb|EDJ97850.1| MGG_09893 [Magnaporthe grisea 70-15]
  misc_feature (44)..(139): NCBI GI: 261356428 Blast Desc: molybdopterin synthase small subunit CnxG [Verticillium albo-atrum VaMs.102]
  misc_feature (48)..(139): NCBI GI: 164424896 Blast Desc: NCU08375 [Neurospora crassa OR74A] gi|157070707|gb|EAA36042.2| NCU08375 [Neurospora crassa OR74A]
  misc_feature (49)..(139): NCBI GI: 189209199 Blast Desc: molybdopterin synthase small subunit CnxG [Pyrenophora tritici-repentis Pt-1C-BFP] gi|226707486|sp|B2WKU1.1|MOC2A_PYRTR RecName: Full=Molybdenum cofactor synthesis protein 2A; AltName:
  misc_feature (46)..(139): NCBI GI: 169595704 Blast Desc: SNOG_00596 [Phaeosphaeria nodorum SN15] gi|111070971|gb|EAT92091.1| SNOG_00596 [Phaeosphaeria nodorum SN15]
  misc_feature (44)..(139): NCBI GI: 171695158 Blast Desc: protein product [Podospora anserina] gi|170947821|emb|CAP59984.1| protein product [Podospora anserina]
  misc_feature (49)..(139): NCBI GI: 238505667 Blast Desc: molybdopterin synthase small subunit CnxG [Aspergillus flavus NRRL3357] gi|220690161|gb|EED46511.1| molybdopterin synthase small subunit CnxG [Aspergillus flavus NRRL3357]
  misc_feature (46)..(139): NCBI GI: 226707550 Blast Desc: molybdopterin synthase small subunit CnxG [Aspergillus flavus NRRL3357] gi|220690161|gb|EED46511.1| molybdopterin synthase small subunit CnxG [Aspergillus flavus NRRL3357]
MFGGPLHVRSPIMHSSATEVEILRFTIRAQLGSGATTLLSFAAMGAIPKPPAGHFNVLYFASASSFANREHDVLPAPLAINKLFDVLEEKYPGMTDKVLASCLVTVNLNYVEAKTSDGEEPVVLREGDEVGIIPPVSSG

SEQ ID NO: 13632 - DNA, 624 bp, Muscodor strobelii
  misc_feature: SGI EST ID NO. CUFF.32614.0
  misc_feature: Variant of the nucleotide sequence at SEQ ID NO 13630
ggggttgttcgtctcaggagctcgagccacactatccattcatacgaccccacatcgtaccagaatgcacactgcattttcttcaaccagcttgcagtcaaaactttgcatccttcttcccgcacagctcggcgacagaagtcgaaattcttcgcttcaccatccgcgcccagcttgggtcaggtgccacgactctcctgtcgttcgcagcgatgggcgcgatcccgaagccgcccgccggccacttcaatgtcctctacttcgcaagtgcaagttccttcgccaacagagaacacgacgtgctccccgctccgctcgcgatcaataagctgttcgatgtcctggaggagaagtaccccgggatgacggataaggtgctcgcttcttgcttggtgactgttaatctgaactatgttgaggcgaagacgagcgatggcgaagagcctgtcgtgcttcgtgagggtgatgaggttgggattattcctcctgtcagctccggctgaatgtgctgcgaaggcactcccgcaaatgaacataatgatagaagtacataacaatcacacatacctaattggaacctaataatgcaatgtccagctgcttcgcacaatctccgaatctgac

SEQ ID NO: 13633 - DNA, 1893 bp, Muscodor strobelii
  misc_feature: SGI cDNA ID NO. 564474
  misc_feature: Elevated expression when VOC is produced
  misc_feature: Encodes the peptide sequence at SEQ ID NO 13634
atgggtgctatacgtgctgcctttacccttctcctgtccctagcgccatttcccctggcctgcgagggatgcttcggtcctacgaaccatgtccaacatgttcgtcatgttaagcgtatgcagcctgatgcgttgaatgccacatcgggaccaacaagagctctagaatggggacaactcaacttcatgcacacgaccgacacccacggttggcttgaaggccatctgaaggaacctaactatggcggtgattttggggatttcgttactttttcgacgcattttaagcatcaagccggcaatatgggtgttgatctgttgattgtcgatacgggtgatttgcatgacggcgcaggtttgagcgatgcaacgtccccggacgcggagctctccctcaagatctttgatgatatcgactatgacttgttggcaatcggaaatcacgagctttatttggccgacgtagcttaccagacgctgaatgagatatcagtgtattggggagagaaatatctgacctccaatgtccaaatcgccaaccaagacacaggagaatggcaatatattggcaagacacatagatatttcaccactgagcatggtcttcggattatggcctttggtgtgctttttgatttcacgggcaacacaaatgttactaaggtcattccggcgaaaactatggtaacacagtcttggttcctagaggccatcaactcatgtgatcccattgacgtgttcgttctcattgggcacaaccctgtccgtgatagcagctttcagattgttttcgatgctattcgtgctatccatcgcgacacaccaatccagattctcggaggccacagccacattcgtgacttcactgtttatgatgagagcagcgtagctattgagtcaggacgctattgtgagacgctaggttgggtatccatgtctggtttcgaccagaaaaatagcggctatcatggcatattcccaaatcccgctggtgtaccgaatccaacgcgcaaggcaacggtgaattccacctccccatttgttttctcgcgacgctacttagactggaaccggaaaacattcgcctatcacgctgagacttggtatgatcatacctttgactacgataatggaaaggcgacgacagcgcagatcaccaagtatagggaacaactcaatctcaaggaactctatggctgtgtgccgcaggactattgcatgacatgcgctccatttaatagttccaagaacatctttccactgttgtcggtagccttagccgagactgtcattgaagatgatcgcaaggataaggcccgctatggcccctttacttatgacgatagcttcatcgtttcgccgtttgaagatgccttcttgtatattcccgatgtacctttcgacaaggccagcgggcttctcgacgcgctcaacaacgcgggcgccagtggaaagcgttcgttgggatatatgcctatcgagcgagatatctgtgtcgacccgattgtcgagccacgcagtgagatcaagcgtcatcagggcattgttggcataactagacgccaagtggtcgacttggagcctgggtacactacgacagatgatttcggaaccgatggcgacgacaccgtgcactctgccatcccgcactattcgattcccgacttcttccagggcgcagctggtttcgacgaaaatggccaagctgatgtcgtcgatgtgattttcgtggatttcatcgagagtgacgttcttgccatccttggctcgacgtataccgaccaggtgaagtattacattagcgaagacttcacgacgcgtgactatctgcctctgttcgtcaagcaatcagagatttttcaagctggtctccccaactgcgccactgattaa

SEQ ID NO: 13634 - protein, 630 aa, Muscodor strobelii
  misc_feature: SGI Peptide ID NO. 564474
  misc_feature (60)..(286): Pfam Id: PF00149 Pfam Desc: Calcineurin-like phosphoesterase
  misc_feature (40)..(627): NCBI GI: 169599603 Blast Desc: SNOG_02625 [Phaeosphaeria nodorum SN15] gi|160705278|gb|EAT89356.2| SNOG_02625 [Phaeosphaeria nodorum SN15]
  misc_feature (51)..(627): NCBI GI: 189191968 Blast Desc: ser/Thr protein phosphatase family [Pyrenophora tritici-repentis Pt-1C-BFP] gi|187973929|gb|EDU41428.1| ser/Thr protein phosphatase family [Pyrenophora tritici-repentis
  misc_feature (9)..(627): NCBI GI: 240108545 Blast Desc: calcineurin-like phosphoesterase, [Coccidioides posadasii C735 delta SOWgp]
  misc_feature (40)..(629): NCBI GI: 238844044 Blast Desc: ser/Thr protein phosphatase [Microsporum canis CBS 113480]
  misc_feature (40)..(627): NCBI GI: 119186513 Blast Desc: CIMG_03304 [Coccidioides immitis RS]
  misc_feature (10)..(627): NCBI GI: 225677531 Blast Desc: conserved [Paracoccidioides brasiliensis Pb03]
  misc_feature (14)..(627): NCBI GI: 226278868 Blast Desc: ser/Thr protein phosphatase family protein [Paracoccidioides brasiliensis Pb01]
  misc_feature (10)..(627): NCBI GI: 226295338 Blast Desc: ser/Thr protein phosphatase family [Paracoccidioides brasiliensis Pb18]
  misc_feature (20)..(627): NCBI GI: 261189889 Blast Desc: ser/Thr protein phosphatase [Ajellomyces dermatitidis SLH14081] gi|239591591|gb|EEQ74172.1| ser/Thr protein phosphatase [Ajellomyces dermatitidis SLH14081]
  misc_feature (20)..(627): NCBI GI: 239612881 Blast Desc: ser/Thr protein phosphatase [Ajellomyces dermatitidis ER-3]
  misc_feature: Useful for introducing or modulating the production of volatile compounds
MGAIRAAFTLLLSLAPFPLACEGCFGPTNHVQHVRHVKRMQPDALNATSGPTRALEWGQLNFMHTTDTHGWLEGHLKEPNYGGDFGDFVTFSTHFKHQAGNMGVDLLIVDTGDLHDGAGLSDATSPDAELSLKIFDDIDYDLLAIGNHELYLADVAYQTLNEISVYWGEKYLTSNVQIANQDTGEWQYIGKTHRYFTTEHGLRIMAFGVLFDFTGNTNVTKVIPAKTMVTQSWFLEAINSCDPIDVFVLIGHNPVRDSSFQIVFDAIRAIHRDTPIQILGGHSHIRDFTVYDESSVAIESGRYCETLGWVSMSGFDQKNSGYHGIFPNPAGVPNPTRKATVNSTSPFVFSRRYLDWNRKTFAYHAETWYDHTFDYDNGKATTAQITKYREQLNLKELYGCVPQDYCMTCAPFNSSKNIFPLLSVALAETVIEDDRKDKARYGPFTYDDSFIVSPFEDAFLYIPDVPFDKASGLLDALNNAGASGKRSLGYMPIERDICVDPIVEPRSEIKRHQGIVGITRRQVVDLEPGYTTTDDFGTDGDDTVHSAIPHYSIPDFFQGAAGFDENGQADVVDVIFVDFIESDVLAILGSTYTDQVKYYISEDFTTRDYLPLFVKQSEIFQAGLPNCATD

SEQ ID NO: 13635 - DNA, 1555 bp, Muscodor strobelii
  misc_feature: SGI EST ID NO. CUFF.32635.0
  misc_feature: Variant of the nucleotide sequence at SEQ ID NO 13633
caggatcgtgcgttactgtcagggactatcactgacctgcagcgaaaattccacagaaacatgttcgcattctagacagacccagctcgcgcttggcagcacgtgtgtcgcggtggtctctctagattggtagttagaaaaacatatttgacgctttgaatctctgttcctaccctctgggccgtcatagtccatcttcgactctgcccgtgacggagacatcctgcgacgacaatcgcgatgggtgctatacgtgctgcctttacccttctcctgtccctagcgccatttcccctggcctgcgagggatgcttcggtcctacgaaccatgtccaacatgttcgtcatgttaagcgtatgcagcctgatgcgttgaatgccacatcgggaccaacaagagctctagaatggggacaactcaacttcatgcacacgaccgacacccacggttggcttgaaggccatctgaaggaacctaactatggcggtgattttggggatttcgttactttttcgacgcattttaagcatcaagccggcaatatgggtgttgatctgttgattgtcgatacgggtgatttgcatgacggcgcaggtttgagcgatgcaacgtccccggacgcggagctctccctcaagatctttgatgatatcgactatgacttgttggcaatcggaaatcacgagctttatttggccgacgtagcttaccagacgctgaatgagatatcagtgtattggggagagaaatatctgacctccaatgtccaaatcgccaaccaagacacaggagaatggcaatatattggcaagacacatagatatttcaccactgagcatggtcttcggattatggcctttggtgtgctttttgatttcacgggcaacacaaatgttactaaggtcattccggcgaaaactatggtaacacagtcttggttcctagaggccatcaactcatgtgatcccattgacgtgttcgttctcattgggcacaaccctgtccgtgatagcagctttcagattgttttcgatgctattcgtgctatccatcgcgacacaccaatccagattctcggaggccacagccacattcgtgacttcactgtttatgatgagagcagcgtagctattgagtcaggacgctattgtgagacgctaggttgggtatccatgtctggtttcgaccagaaaaatagcggctatcatggcatattcccaaatcccgctggtgtaccgaatccaacgcgcaaggcaacggtgaattccacctccccatttgttttctcgcgacgctacttagactggaaccggaaaacattcgcctatcacgctgagacttggtatgatcatacctttgactacgataatggaaaggcgacgacagcgcagatcaccaagtatagggaacaactcaatctcaaggaactctatggctgtgtgccgcaggactattgcatgacatgcgctccatttaatagttccaagaacatctttccactgttgtcggtagccttagccgagactgtcattgaagatgatcgcaaggataagg

SEQ ID NO: 13636 - DNA, 303 bp, Muscodor strobelii
  misc_feature: SGI cDNA ID NO. 564475
  misc_feature: Encodes the peptide sequence at SEQ ID NO 13637
atgaataaagacgggtgctacacatacatacacatgcagcggccacgggacgcggacctcttcgaggacttctgcaaggacaagctcccagacgacgagatctatgtcccgccacataaccagccgatcaacccagaagacgaggacgatgtcgtgccggaccagcatgccgccttcggtatacagaaagcgacgcagcgaagcaaggagcccgcttggaaggatctggatctggctgcgctcatgaagaaaggtccaaccccgggcaaactaagcatttctcacaagactttgccaagataa

SEQ ID NO: 13637 - protein, 100 aa, Muscodor strobelii
  misc_feature: SGI Peptide ID NO. 564475
  misc_feature (3)..(100): Pfam Id: PF05839 Pfam Desc: Apc13p protein
  misc_feature (3)..(86): Pfam Id: PF05839 Pfam Desc: Apc13p protein
  misc_feature (1)..(100): NCBI GI: 256731131 Blast Desc: NECHADRAFT_85069 [Nectria haematococca mpVI 77-13-4]
  misc_feature (1)..(100): NCBI GI: 46123019 Blast Desc: FG05887.1 [Gibberella zeae PH-1]
  misc_feature (1)..(100): NCBI GI: 156059142 Blast Desc: SS1G_03583 [Sclerotinia sclerotiorum 1980] gi|154701370|gb|EDO01109.1| SS1G_03583 [Sclerotinia sclerotiorum 1980]
  misc_feature (2)..(86): NCBI GI: 39974289 Blast Desc: MGG_00709 [Magnaporthe grisea 70-15] gi|145018357|gb|EDK02636.1| MGG_00709 [Magnaporthe grisea 70-15]
  misc_feature (1)..(86): NCBI GI: 154304228 Blast Desc: BC1G_08384 [Botryotinia fuckeliana B05.10] gi|150854186|gb|EDN29378.1| BC1G_08384 [Botryotinia fuckeliana B05.10]
  misc_feature (2)..(89): NCBI GI: 116198821 Blast Desc: CHGG_07566 [Chaetomium globosum CBS 148.51] gi|88178845|gb|EAQ86313.1| CHGG_07566 [Chaetomium globosum CBS 148.51]
  misc_feature (1)..(90): NCBI GI: 171692939 Blast Desc: protein product [Podospora anserina] gi|170946418|emb|CAP73219.1| protein product [Podospora anserina]
  misc_feature (1)..(84): NCBI GI: 18375946 Blast Desc: [Neurospora crassa]
  misc_feature (1)..(84): NCBI GI: 164423247 Blast Desc: NCU08873 [Neurospora crassa OR74A] gi|157070008|gb|EAA31430.2| conserved [Neurospora crassa OR74A]
  misc_feature (1)..(70): NCBI GI: 261358001 Blast Desc: conserved [Verticillium albo-atrum VaMs.102]
MNKDGCYTYIHMQRPRDADLFEDFCKDKLPDDEIYVPPHNQPINPEDEDDVVPDQHAAFGIQKATQRSKEPAWKDLDLAALMKKGPTPGKLSISHKTLPR

SEQ ID NO: 13638 - DNA, 1709 bp, Muscodor strobelii
  misc_feature: SGI EST ID NO. CUFF.32690.0
  misc_feature: Variant of the nucleotide sequence at SEQ ID NO 13636
gctctttccagtgggcggcttcaactaagctacatgtacctaccttaggtaccccacacaacacctccctgcacctctgttgacacatgaaaggcgcccatattcaagtaggaagagcctcataatctcacgtacatcacaccgcgcaggtcttcataactcatctcgagaggaagcatttgcctctcgtcattacatgcatatacacgatgaataaagacgggtgctacacatacatacacatgcagcggccacgggacgcggacctcttcgaggacttctgcaaggacaagctcccagacgacgagatctatgtcccgccacataaccagccgatcaacccagaagacgaggacgatgtcgtgccggaccagcatgccgccttcggtatacagaaagcgacgcagcgaagcaaggagcccgcttggaaggatctggatctggctgcgctcatgaagaaaggtccaaccccgggcaaactaagcatttctcacaagactttgccaagataacgggcgtcttgtgtcgacgtatttggcaggttcagatgaactgggtgaagcgggcgtatcggatgagcgtgagtgagatgggttaggcttctgtacaagaaaccaggctgagagttgcgtcgtgtaaataaagcggccttgagcattacgctgcctcttgtctattttgacacaagttacgtgatcttttcacgggctagcaaaccgagatatcccacccgcccctgcccaacgccgtgctatgcagtgccgtagacagtaaacaatccgattccattgctccaaacgccattcaagctgtaataccttgttccgtcgactatcccttacccaagaagccttcccgttccatcacctcgggcgcaaacttgactagaaacaccgtcctgccgggccacatttcgccctcctcctgcttgccgacactatgagctgtgacccgggccgggaaggccgaaccatcacagacaccctcaatgatgccggcgacataggcagcgcagttcagctggctcatgtccctggggacggagatgtagcgattgacgaggggctcgttgtcgatgatcatgtactcgtctgtcttggtcgggtcggatgacttctccagcccgtcggcggcctggccgaagagatgctgccagacattgatcttgatgaagtgcagcagtgtgatgatgttgaggggccgcgcctgggagcgggcaggctcgcggtagaggaggaggtcgaggagtttgagaccgatggggtggccctggacgttgagtctggtggaagcgcagggttagctcgtagctcggcgtgcatgctggtgccaggccggacgcacctcttctccaggtcctggatgctctcgatcttcttggaggcgtagctcaccatctcggagaagagataggcgaagctggcgccgctgagttcggccgtcttggagcggttcaagggcctgtggtatatcgtcttgccgctcgtcgggtaccgcagtgcagactgctccttgccgccgcgcgacccctgcagattcgacattgtctgctcccccggcaccgagacagttgtgaacgtggacgcttggtttgcgacagtattgactgaaaatctgtcgcgcggtcgtgcttgatctgggatttgtgacggtggtgtacctacttggctgggggttcggagttgtgcacatgcatggatgcaattgag

SEQ ID NO: 13639 - DNA, 651 bp, Muscodor strobelii
  misc_feature: SGI cDNA ID NO. 564476
  misc_feature: Encodes the peptide sequence at SEQ ID NO 13640
atgtcgaatctgcaggggtcgcgcggcggcaaggagcagtctgcactgcggtacccgacgagcggcaagacgatataccacaggcccttgaaccgctccaagacggccgaactcagcggcgccagcttcgcctatctcttctccgagatggtgagctacgcctccaagaagatcgagagcatccaggacctggagaagagactcaacgtccagggccaccccatcggtctcaaactcctcgacctcctcctctaccgcgagcctgcccgctcccaggcgcggcccctcaacatcatcacactgctgcacttcatcaagatcaatgtctggcagcatctcttcggccaggccgccgacgggctggagaagtcatccgacccgaccaagacagacgagtacatgatcatcgacaacgagcccctcgtcaatcgctacatctccgtccccagggacatgagccagctgaactgcgctgcctatgtcgccggcatcattgagggtgtctgtgatggttcggccttcccggcccgggtcacagctcatagtgtcggcaagcaggaggagggcgaaatgtggcccggcaggacggtgtttctagtcaagtttgcgcccgaggtgatggaacgggaaggcttcttgggtaagggatag

SEQ ID NO: 13640 - protein, 216 aa, Muscodor strobelii
  misc_feature: SGI Peptide ID NO. 564476
  misc_feature (42)..(205): Pfam Id: PF04051 Pfam Desc: Transport protein particle (TRAPP) component, Bet3
  misc_feature (1)..(215): NCBI GI: 39974291 Blast Desc: MGG_00708 [Magnaporthe grisea 70-15] gi|145018358|gb|EDK02637.1| MGG_00708 [Magnaporthe grisea 70-15]
  misc_feature (13)..(215): NCBI GI: 156059144 Blast Desc: SS1G_03584 [Sclerotinia sclerotiorum 1980] gi|154701371|gb|EDO01110.1| SS1G_03584 [Sclerotinia sclerotiorum 1980]
  misc_feature (11)..(215): NCBI GI: 116198819 Blast Desc: conserved [Chaetomium globosum CBS 148.51] gi|88178844|gb|EAQ86312.1| conserved [Chaetomium globosum CBS 148.51]
  misc_feature (14)..(214): NCBI GI: 171692937 Blast Desc: protein product [Podospora anserina] gi|170946417|emb|CAP73218.1| protein product [Podospora anserina]
  misc_feature (1)..(215): NCBI GI: 256731532 Blast Desc: [Nectria haematococca mpVI 77-13-4]
  misc_feature (13)..(215): NCBI GI: 154304226 Blast Desc: BC1G_08383 [Botryotinia fuckeliana B05.10] gi|150854185|gb|EDN29377.1| BC1G_08383 [Botryotinia fuckeliana B05.10]
  misc_feature (16)..(214): NCBI GI: 164423249 Blast Desc: NCU08874 [Neurospora crassa OR74A] gi|157070009|gb|EAA31431.2| NCU08874 [Neurospora crassa OR74A]
  misc_feature (1)..(215): NCBI GI: 46123021 Blast Desc: FG05888.1 [Gibberella zeae PH-1]
  misc_feature (16)..(214): NCBI GI: 18375945 Blast Desc: related to SPP30 protein [Neurospora crassa]
  misc_feature (16)..(216): NCBI GI: 169614125 Blast Desc: SNOG_10198 [Phaeosphaeria nodorum SN15] gi|160707281|gb|EAT82533.2| SNOG_10198 [Phaeosphaeria nodorum SN15]
MSNLQGSRGGKEQSALRYPTSGKTIYHRPLNRSKTAELSGASFAYLFSEMVSYASKKIESIQDLEKRLNVQGHPIGLKLLDLLLYREPARSQARPLNIITLLHFIKINVWQHLFGQAADGLEKSSDPTKTDEYMIIDNEPLVNRYISVPRDMSQLNCAAYVAGIIEGVCDGSAFPARVTAHSVGKQEEGEMWPGRTVFLVKFAPEVMEREGFLGKG

SEQ ID NO: 13641 - DNA, 1643 bp, Muscodor strobelii
  misc_feature: SGI EST ID NO. CUFF.32691.1
  misc_feature: Variant of the nucleotide sequence at SEQ ID NO 13639
ctcaattgcatccatgcatgtgcacaactccgaacccccagccaagtaggtacaccaccgtcacaaatcccagatcaagcacgaccgcgcgacagattttcagtcaatactgtcgcaaaccaagcgtccacgttcacaactgtctcggtgccgggggagcagacaatgtcgaatctgcaggggtcgcgcggcggcaaggagcagtctgcactgcggtacccgacgagcggcaagacgatataccacaggcccttgaaccgctccaagacggccgaactcagcggcgccagcttcgcctatctcttctccgagatggtgagctacgcctccaagaagatcgagagcatccaggacctggagaagagactcaacgtccagggccaccccatcggtctcaaactcctcgacctcctcctctaccgcgagcctgcccgctcccaggcgcggcccctcaacatcatcacactgctgcacttcatcaagatcaatgtctggcagcatctcttcggccaggccgccgacgggctggagaagtcatccgacccgaccaagacagacgagtacatgatcatcgacaacgagcccctcgtcaatcgctacatctccgtccccagggacatgagccagctgaactgcgctgcctatgtcgccggcatcattgagggtgtctgtgatggttcggccttcccggcccgggtcacagctcatagtgtcggcaagcaggaggagggcgaaatgtggcccggcaggacggtgtttctagtcaagtttgcgcccgaggtgatggaacgggaaggcttcttgggtaagggatagtcgacggaacaaggtattacagcttgaatggcgtttggagcaatggaatcggattgtttactgtctacggcactgcatagcacggcgttgggcaggggcgggtgggatatctcggtttgctagcccgtgaaaagatcacgtaacttgtgtcaaaatagacaagaggcagcgtaatgctcaaggccgctttatttacacgacgcaactctcagcctggtttcttgtacagaagcctaacccatctcactcacgctcatccgatacgcccgcttcacccagttcatctgaacctgccaaatacgtcgacacaagacgcccgttatcttggcaaagtcttgtgagaaatgcttagtttgcccggggttggacctttcttcatgagcgcagccagatccagatccttccaagcgggctccttgcttcgctgcgtcgctttctgtataccgaaggcggcatgctggtccggcacgacatcgtcctcgtcttctgggttgatcggctggttatgtggcgggacatagatctcgtcgtctgggagcttgtccttgcagaagtcctcgaagaggtccgcgtcccgtggccgctgcatgtgtatgtatgtgtagcacccgtctttattctacagaccattagctctatcagcgccattacgagaagtattcgaccgcggcctcgaatccaattaccatcgtgtatatgcatgtaatgacgagaggcaaatgcttcctctcgagatgagttatgaagacctgcgcggtgtgatgtacgtgagattatgaggctcttcctacttgaatatgggcgcctttcatgtgtcaacagaggtg

SEQ ID NO: 13642 - DNA, 1002 bp, Muscodor strobelii
  misc_feature: SGI cDNA ID NO. 564477
  misc_feature: Encodes the peptide sequence at SEQ ID NO 13643
atggccactgccggcacagtcacgccgcctactggtttatcagttctcgacgagaaagcgagaagtggcccgctccaggtgccgctcgatagaccccttcccacgagtagatctgtggcaaacccgtctctcacttcagatcagcaggccaaatatgacgctttgttggccagcgtgaaaacctggacagatgtcccggctcgagacaagagtgggcctctcaccgacactgagaagatctttctaacccgcgagtgcctcttgagatatctccgggccaccaagtgggagaagaatgaggcagagaagcgtctgttagagactcttgtctggcggagggagtacggcgttgacgagctcacccccgagcacatcagtcccgagaacgagacgggcaagcaggtcatagcaggctacgacaaccagggacggccatgccattatctgaatcccggtcgccaaaacaccgaggtcacccctcgtcaggtgcagcacatggtgttcatgctggagcgcgtcatagatatcatcccagccgaacaggagaaggtgtgcctgctcatcgatttcaagagccgtggcaccaagaaaaccaacacggcccccgggctcggacagggccgcgaggtgctaaacatcctccagacccactatcccgagaggttaggtcgggctctcatcattaacgtgccatgggttgtctggggcttcttcaaactgatcaccccctttattgaccctgtcaccaaggagaaactcaagttcaatgaggacatgacacaatatgttccgcgagaacagctcctgtcagagtatccaggtggcgaggtgaaattcgactacgatcactctgtctactggccggcattgcagaagctgtgcggcgagcgacgggccgcgcggtttgagaggtgggaagccggaggcaggcagattggagaactagaagactacctaaaaggacacgcaactcaaggcgtagcaccgccaacagcgtcctag

SEQ ID NO: 13643 - protein, 333 aa, Muscodor strobelii
  misc_feature: SGI Peptide ID NO. 564477
  misc_feature (133)..(303): Pfam Id: PF00650 Pfam Desc: CRAL/TRIO domain
  misc_feature (43)..(120): Pfam Id: PF03765 Pfam Desc: CRAL/TRIO, N-terminus
  misc_feature (73)..(120): Pfam Id: PF03765 Pfam Desc: CRAL/TRIO, N-terminus
  misc_feature (25)..(333): NCBI GI: 85102427 Blast Desc: NCU03596 [Neurospora crassa OR74A] gi|18376382|emb|CAD21271.1| related to PDR16 protein [Neurospora crassa] gi|28922867|gb|EAA32087.1| NCU03596 [Neurospora crassa
  misc_feature (4)..(323): NCBI GI: 116198851 Blast Desc: CHGG_07581 [Chaetomium globosum CBS 148.51] gi|88178860|gb|EAQ86328.1| CHGG_07581 [Chaetomium globosum CBS 148.51]
  misc_feature (25)..(331): NCBI GI: 171692983 Blast Desc: protein product [Podospora anserina] gi|170946440|emb|CAP73241.1| protein product [Podospora anserina]
  misc_feature (7)..(330): NCBI GI: 39974293 Blast Desc: MGG_00707 [Magnaporthe grisea 70-15] gi|145018359|gb|EDK02638.1| MGG_00707 [Magnaporthe grisea 70-15]
  misc_feature (3)..(321): NCBI GI: 156059148 Blast Desc: SS1G_03586 [Sclerotinia sclerotiorum 1980] gi|154701373|gb|EDO01112.1| SS1G_03586 [Sclerotinia sclerotiorum 1980]
  misc_feature (4)..(321): NCBI GI: 154304224 Blast Desc: BC1G_08382 [Botryotinia fuckeliana B05.10] gi|150854184|gb|EDN29376.1| BC1G_08382 [Botryotinia fuckeliana B05.10]
  misc_feature (22)..(321): NCBI GI: 46123025 Blast Desc: FG05890.1 [Gibberella zeae PH-1]
  misc_feature (9)..(320): NCBI GI: 70997199 Blast Desc: CRAL/TRIO domain protein [Aspergillus fumigatus Af293] gi|66850989|gb|EAL91315.1| CRAL/TRIO domain protein [Aspergillus fumigatus Af293] gi|159126922|gb|EDP52038.1| CRAL/TRIO domain
  misc_feature (13)..(333): NCBI GI: 238842585 Blast Desc: CRAL/TRIO domain-containing protein [Microsporum canis CBS 113480]
  misc_feature (10)..(328): NCBI GI: 119478576 Blast Desc: CRAL/TRIO domain protein [Neosartorya fischeri NRRL 181] gi|119407544|gb|EAW17493.1| CRAL/TRIO domain protein [Neosartorya fischeri NRRL 181]
  misc_feature (32)..(280): SWISSPROT Homolog: EC 3.1.3.48 Protein-tyrosine-phosphatase
MATAGTVTPPTGLSVLDEKARSGPLQVPLDRPLPTSRSVANPSLTSDQQAKYDALLASVKTWTDVPARDKSGPLTDTEKIFLTRECLLRYLRATKWEKNEAEKRLLETLVWRREYGVDELTPEHISPENETGKQVIAGYDNQGRPCHYLNPGRQNTEVTPRQVQHMVFMLERVIDIIPAEQEKVCLLIDFKSRGTKKTNTAPGLGQGREVLNILQTHYPERLGRALIINVPWVVWGFFKLITPFIDPVTKEKLKFNEDMTQYVPREQLLSEYPGGEVKFDYDHSVYWPALQKLCGERRAARFERWEAGGRQIGELEDYLKGHATQGVAPPTAS

SEQ ID NO: 13644 - DNA, 7136 bp, Muscodor strobelii
  misc_feature: SGI EST ID NO. CUFF.33190.1
  misc_feature: Variant of the nucleotide sequence at SEQ ID NO 13642
tttcagtgattcaggttgaatctctggccggtagccctgcacaactcgactccaagatacaaccagatagacgaaggcttcttcagcatctctggaactcggtcacctgtctaagctgttggcacccaaggcacacggtagagccgcacactgataatggctaaaggcgcgatatccaaaaagacaaaagccccgtctctacattctagagctgcgcgacgggcgacatcccccagcatagacacagacaagtctctgaaggaagttcgcctacctccagagtcggtcgaccaccgcccctcggtgctggctctccaccatggcgcaggcgtctccaagaagcagaagaagggccgcggcttgagcagcaaggcgcgcaagcgacaagaacgcgcccaggatcgtgcggtggagattatggagcgcacggagaagaagatcaaccggagcaagggtcagtcgcgaaagatccaagcaaggcagaaggagtgggagcaaatcaatcagaaggccgctgccaatgctggtgcaggaaaagatgcggatgatggggatcaggccgttgaggggtccgagtttgatgatgagatgggcgaggcagcagatgatggcctggctggcaagcaagacgagaacacagttggcgagcagcctactacgatggaccaagaccacgatggagacgagatcttgtgatggcttgtcacaagagaattccgattctgcatgaggatatccacatactttttcttagtcaccaggcgtcgggcgttggggtccaaaagagtattccaactttcgggggtatatcgatgactatgtctctatctacctcgagtattcaacggttcaccgaaaacatgaaccctaggcctcgcagttcctaatcctgcttgttctcattcctcactaccttatatacataactcagagagtcctgcccaccaccagtgaccaaaataaaaatccaaaaatactactttatgagtgccaagttaggcaagtggggtcgaagctgtctagctaacctagctaagataagataaagttgcaaccggctcaacgggttgcagcacctagctcagaaggagtggacgtgctcagcgcgtcgattgagtggctcaaggaacttcagttaattaatcatctgctgtttcaagcttgttacttcactacgcacacctcgcatccacgccttcaaatccatgtaaatgattcgatctgcggcctgtgcatcttccgcgccatcaccgactgcagcgttcgccttctgacttctaagtcccacatccgcgccgacaacatgccgccacccaagcgcatgacggcgaacccagcccggccagctcgccacagggcaggcaaacataccggcgcatcatccgattccgattccgattccggttcagaagccagcgaatctggacagcgtgccgaacgcacggtcgcacccccacccaaagtcccaagcgccggtaaaatagtgagcgatctctccaaagtcaacctcgccgagcgtcgcctccagggccaagaagcagaagaccgacgacaagccgcagagaaggcggccaagttggctgccgaagagggcttcgtcaccgaggaaagtgaagacggagagagcgagggaagcgacgaagagagcgaagaggagagttccgaggacgaggcgcctagacgcttactactcaagcctaaatttattcccaaacacctgcgccataagagcgggaatgaaccaccggcagatgatcaagacgatggacaagcagccgaagaggaagaagagcgacgaaagaaggccatggacgaaatcgttgaggaacaactgcgcaaggacgccgccgctcgcgccgccggcaagaaacactgggacgacttgatagacgaggaagaggatgtcgacaccgaagatgacgtagacccagaagcggagtatgctgcctggaagctacgagagctgaagcgcataaagcgcgagcgcgaagctattgagaaacgagagaaggaaagagaagaggtggagagacggcgcaacttgacagaagaggagagaaaggccgaggacgaagcacacctcgcgcagcagaaggaagagaaggatggcaaaggcaaagcgggttttatgcagaaatacttccaccgcggtgcattttttcaggatgatgaggtcgcggagcaacttgcgagacgcgatgtaatgggcgccagatttcaggacgaggtcaaaaatcgggagctactgcccaaagccctgcagatgcgtgacatgacaaagctggggaagaagggcgcgtcgaaatatagggacctgaagtccgaggacacgggacgctggggcgactttagagacactaggtttggtcgcgaggggcgtgatttcgatcacaccaatgttgatgatcggtataagtccgatcgattcagagagaggtctgggcctggcggagcaaatgccgtgccgctcggggaacggaagggcgttcctggcgctcccgaagggccgagaaacaccggccgtgacggggacagggagtcggaccggagagagcggagtcgtgaccgagagagctatcgacctcgtcgcgatgatgggtatggcagccgaaggaaccgctcgagatctcgatctccaaggcatttcagagacgatcagagtcggaggaaacgagactcgtcactagacggaaggcgacaagacagcgagaagagacgaagggtagattcaagataggcaggttaccagcaacaccaatgtctagtgcgtagtatcagatcgcacactggatgagaatttcatcttagctaaaatggtcatagcacgaacacatgggattgtatgcataagtactatttcatatcctcgtaatttccaccctcgccctctcataaatattatggcccaccacagtatcgctacttacaccatctgtcgacttgggcggatacagcgtcatacgggcatacgttcccgcacctcttcgcttggagagatagccggggttgattaccaacacgctttccacaacctaagaagatctgttagctcgcgggctgcaaccatattcccagttcaagataggtactcactctagcaaatggcgggagcgcgctaggcacgacgatgacatcagggcggatgttgaccatctcgccgagcttcagatagctcgtgtccaatccagcaccggtaggaatctcgtccgccgtgccggccttgggtagcttagatcgatcgagtggcggatgcatgggaaagtaatgacgctgttcaatgagatagcgtgagatcctcgacatgaggtttggctgctccggcttgccgcctactaactcgccatggcgaagctgccaaaggatgtcctgggacgacaaacccagctgcatttcatttatggatagagtcattggattgccaacgatttttgcactcttaggtagcccgagctcctttttaggaaagggttcttgcggccaagagacgtgtttgtcgagcatgtcgcgtacggaagggacaagaaggatggtgatggtagggttcgctgcgacaagtcgattgagagccggagaaatcatgtacttgaaaacggtagacatagtggcctggtctggttcggccatcgcctcttcaggaagatcaaagtcaccagtagcaatcaatggatggtcagcgtcaatgaaaggcccgttcaatacgatgacgtcggtatagctatcggccgcttgactgcagatagcgtggagcggttcgaagtcgagattgtcgtcagcagagtaaggaccagaggcgaacaggatgttcagcggcgtcggatcgtcatccgaatccatggcgtcgggtccgcctcgaagtctatctcggtgcgcctctatggctgccacactggatcctgcgctgggcagtaggggcatgtccacaacttctcggacgacaaactcgctgccggacgagttgatgcccctgaaggccacgatctgccctgggaagaactgatagcgtccgttgagcttgtccagcttcagtgggattctgcggccgtttcccatgcgccgggaggtctctaggacgagtgacgcggcattgagcctgccctcgggcgaatctgaagcgatgcggccaaccgccactatctctgtcgtgctctggcttgcggcgctgccgaactcgtcgtcgtcgatccgatgatggtccctcaggagaatcataaactcgtctatccggtcgtcgaggatctcagacgcctctgtcagcttcatggccatagtcttgtagcccagcttcttctggtcggagctggccttgagaacaatacgcgcctcggagaagggggcgaccgggggcgcgggggccttgaggtgctcattgagaacttctataagctcgcccgggtgttgacggtcgttgaaggaggtcacgctgtacagacatcatctcactttagtgcctcgtgcccggcgacaaaggggtggggacgtacgggaccgcgtgcaaagagtccagctgctgttctacgccgttgggacttctgtagtccggcgagcttgcgggatgcgagctcttggttctcgacacggagggcgtctcgagaggatttctcttcttgacggcgcttctgttcagcttgcctccggtgcctggcgtagtgggcaccatgccatccagcctgttgggggcgttagcgaccacacgacacgatacgggttgttggcaacgcacatgcccatgacgtcgccggtggacttgacggcggcacgaggggtggcgacgggccggcgttccgtcttgatgtgtgcgtggtgggagcggttggagcgctcgagggtgtcgagcaggtcctgcttcagggcggccaaggtgtcgaccgtcggcttcatgtcgtccctgtccatcttgatgcagtaggactcccacttgaagaagaggtcctggacggacagcgagtgcaggcgcatgatggactgcagctggacgacgacattgtggtcgaggggcgcgtccgccgtcgcaaatctttcgttcagttcctgcacctccgcttctgcctcggccatgtcgggtgtctgttcgggtgtctgttcgtgtgtctgtgtcgcacgtgtgtgtttgcgagggcacagcctactaagtagtagagagagaggtagccagcgactgtgtcctgagatacggcgtgcgcaatcgacttagacggagtttcaaagttggcaacgatcagttactattttggagtctcaaattccctagacgtttctcagatcattttcatttcgagccttggtgcgccagctaaaacatgaggggtggtttcccttcagacgcgatcaagaaatcggcttcggcgcgtcgtggggagcgcgtaaagtggtacggactattctacacccccactcacactgcaacctacagggccccaattgcgttcgacgggtcgaccccccagcatcgccctagacccggcagcatggagttcaattgcacgcctgttatttttagcccctggtgcgagtacgaatactacctaaggtacctgtattgtagcaaacccggcactcgtgggccatatgcctcccgccgcctttcgaattctggaaagtcggtgaatgccgtcttgtcgacctcaaattcaatcgaccgctgtggcttgtcattgcgagtacttggaagagtagttccatttcgagaccgatccttcaacctagcgtcttgctctgctgtgactaagctctcaccacccttgcgtcaacttgaatatcccttatcatccgtctctttgcgccgggctacacatcgggctcctgccttctgccccagcaatcgatgcccagattgttttgcttgtgatctctagacaagttgaccctatcttgctccgtagcctttcataatggccactgccggcacagtcacgccgcctactggtttatcagttctcgacgagaaagcgagaagtggcccgctccaggtgccgctcgatagaccccttcccacgagtagatctgtggcaaacccgtctctcacttcagatcagcaggccaaatatgacgctttgttggccagcgtgaaaacctggacagatgtcccggctcgagacaagagtgggcctctcaccgacactgagaagatctttctaacccgcgagtgcctcttgagatatctccgggccaccaagtgggagaagaatgaggcagagaagcgtctgttagagactcttgtctggcggagggagtacggcgttgacgagctcacccccgagcacatcagtcccgagaacgagacgggcaagcaggtcatagcaggctacgacaaccagggacggccatgccattatctgaatcccggtcgccaaaacaccgaggtcacccctcgtcaggtgcagcacatggtgttcatgctggagcgcgtcatagatatcatcccagccgaacaggagaaggtgtgcctgctcatcgatttcaagagccgtggcaccaagaaaaccaacacggcccccgggctcggacagggccgcgaggtgctaaacatcctccagacccactatcccgagaggttaggtcgggctctcatcattaacgtgccatgggttgtctggggcttcttcaaactgatcaccccctttattgaccctgtcaccaaggagaaactcaagttcaatgaggacatgacacaatatgttccgcgagaacagctcctgtcagagtatccaggtggcgaggtgaaattcgactacgatcactctgtctactggccggcattgcagaagctgtgcggcgagcgacgggccgcgcggtttgagaggtgggaagccggaggcaggcagattggagaactagaagactacctaaaaggacacgcaactcaaggcgtagcaccgccaacagcgtcctagccgaattgcaccatatacatatagacatagacgaagcagatgggaattgtccatgcaggaatttgagctaagcggcagccttggcagttattagaggcgcatcagcacacggttctgtaacattcatttcgttggcgcaatacatgtagctaggctggttcttttctcttggagtcatcgagcctgacgttttgcccctattgccatgtgtcgatgagtttcatgtgttaagtctttgaatcggac

SEQ ID NO: 13645 - DNA, 2022 bp, Muscodor strobelii
  misc_feature: SGI cDNA ID NO. 564478
  misc_feature: Encodes the peptide sequence at SEQ ID NO 13646
atggccgaggcagaagcggaggtgcaggaactgaacgaaagatttgcgacggcggacgcgcccctcgaccacaatgtcgtcgtccagctgcagtccatcatgcgcctgcactcgctgtccgtccaggacctcttcttcaagtgggagtcctactgcatcaagatggacagggacgacatgaagccgacggtcgacaccttggccgccctgaagcaggacctgctcgacaccctcgagcgctccaaccgctcccaccacgcacacatcaagacggaacgccggcccgtcgccacccctcgtgccgccgtcaagtccaccggcgacgtcatgggcatgctggatggcatggtgcccactacgccaggcaccggaggcaagctgaacagaagcgccgtcaagaagagaaatcctctcgagacgccctccgtgtcgagaaccaagagctcgcatcccgcaagctcgccggactacagaagtcccaacggcgtagaacagcagctggactctttgcacgcggtccccgtgacctccttcaacgaccgtcaacacccgggcgagcttatagaagttctcaatgagcacctcaaggcccccgcgcccccggtcgcccccttctccgaggcgcgtattgttctcaaggccagctccgaccagaagaagctgggctacaagactatggccatgaagctgacagaggcgtctgagatcctcgacgaccggatagacgagtttatgattctcctgagggaccatcatcggatcgacgacgacgagttcggcagcgccgcaagccagagcacgacagagatagtggcggttggccgcatcgcttcagattcgcccgagggcaggctcaatgccgcgtcactcgtcctagagacctcccggcgcatgggaaacggccgcagaatcccactgaagctggacaagctcaacggacgctatcagttcttcccagggcagatcgtggccttcaggggcatcaactcgtccggcagcgagtttgtcgtccgagaagttgtggacatgcccctactgcccagcgcaggatccagtgtggcagccatagaggcgcaccgagatagacttcgaggcggacccgacgccatggattcggatgacgatccgacgccgctgaacatcctgttcgcctctggtccttactctgctgacgacaatctcgacttcgaaccgctccacgctatctgcagtcaagcggccgatagctataccgacgtcatcgtattgaacgggcctttcattgacgctgaccatccattgattgctactggtgactttgatcttcctgaagaggcgatggccgaaccagaccaggccactatgtctaccgttttcaagtacatgatttctccggctctcaatcgacttgtcgcagcgaaccctaccatcaccatccttcttgtcccttccgtacgcgacatgctcgacaaacacgtctcttggccgcaagaaccctttcctaaaaaggagctcgggctacctaagagtgcaaaaatcgttggcaatccaatgactctatccataaatgaaatgcagctgggtttgtcgtcccaggacatcctttggcagcttcgccatggcgagttagtaggcggcaagccggagcagccaaacctcatgtcgaggatctcacgctatctcattgaacagcgtcattactttcccatgcatccgccactcgatcgatctaagctacccaaggccggcacggcggacgagattcctaccggtgctggattggacacgagctatctgaagctcggcgagatggtcaacatccgccctgatgtcatcgtcgtgcctagcgcgctcccgccatttgctagagttgtggaaagcgtgttggtaatcaaccccggctatctctccaagcgaagaggtgcgggaacgtatgcccgtatgacgctgtatccgcccaagtcgacagatggtgtaagtagcgatactgtggtgggccataatatttatgagagggcgagggtggaaattacgaggatatga

SEQ ID NO: 13646 - protein, 673 aa, Muscodor strobelii
  misc_feature: SGI Peptide ID NO. 564478
  misc_feature (381)..(616): Pfam Id: PF04042 Pfam Desc: DNA polymerase alpha/epsilon subunit B
  misc_feature (18)..(265): Pfam Id: PF08418 Pfam Desc: DNA polymerase alpha subunit B N-terminal
  misc_feature (217)..(261): Pfam Id: PF08418 Pfam Desc: DNA polymerase alpha subunit B N-terminal
  misc_feature (18)..(80): Pfam Id: PF08418 Pfam Desc: DNA polymerase alpha subunit B N-terminal
  misc_feature (4)..(673): NCBI GI: 39974295 Blast Desc: MGG_00706 [Magnaporthe grisea 70-15] gi|145018360|gb|EDK02639.1| MGG_00706 [Magnaporthe grisea 70-15]
  misc_feature (4)..(673): NCBI GI: 46125287 Blast Desc: FG07021.1 [Gibberella zeae PH-1]
  misc_feature (4)..(673): NCBI GI: 18376383 Blast Desc: related to POL12 (DNA-directed DNA polymerase alpha) [Neurospora crassa]
  misc_feature (10)..(673): NCBI GI: 256731404 Blast Desc: [Nectria haematococca mpVI 77-13-4]
  misc_feature (4)..(673): NCBI GI: 116198853 Blast Desc: CHGG_07582 [Chaetomium globosum CBS 148.51] gi|88178861|gb|EAQ86329.1| CHGG_07582 [Chaetomium globosum CBS 148.51]
  misc_feature (9)..(673): NCBI GI: 156059150 Blast Desc: SS1G_03587 [Sclerotinia sclerotiorum 1980] gi|154701374|gb|EDO01113.1| SS1G_03587 [Sclerotinia sclerotiorum 1980]
  misc_feature (1)..(668): NCBI GI: 154304222 Blast Desc: BC1G_08381 [Botryotinia fuckeliana B05.10] gi|150854183|gb|EDN29375.1| BC1G_08381 [Botryotinia fuckeliana B05.10]
  misc_feature (4)..(618): NCBI GI: 164426754 Blast Desc: NCU03597 [Neurospora crassa OR74A] gi|157071464|gb|EAA32088.2| NCU03597 [Neurospora crassa OR74A]
  misc_feature (1)..(616): NCBI GI: 171692981 Blast Desc: protein product [Podospora anserina] gi|170946439|emb|CAP73240.1| protein product [Podospora anserina]
  misc_feature (10)..(673): NCBI GI: 261358974 Blast Desc: DNA polymerase subunit alpha B [Verticillium albo-atrum VaMs.102]
MAEAEAEVQELNERFATADAPLDHNVVVQLQSIMRLHSLSVQDLFFKWESYCIKMDRDDMKPTVDTLAALKQDLLDTLERSNRSHHAHIKTERRPVATPRAAVKSTGDVMGMLDGMVPTTPGTGGKLNRSAVKKRNPLETPSVSRTKSSHPASSPDYRSPNGVEQQLDSLHAVPVTSFNDRQHPGELIEVLNEHLKAPAPPVAPFSEARIVLKASSDQKKLGYKTMAMKLTEASEILDDRIDEFMILLRDHHRIDDDEFGSAASQSTTEIVAVGRIASDSPEGRLNAASLVLETSRRMGNGRRIPLKLDKLNGRYQFFPGQIVAFRGINSSGSEFVVREVVDMPLLPSAGSSVAAIEAHRDRLRGGPDAMDSDDDPTPLNILFASGPYSADDNLDFEPLHAICSQAADSYTDVIVLNGPFIDADHPLIATGDFDLPEEAMAEPDQATMSTVFKYMISPALNRLVAANPTITILLVPSVRDMLDKHVSWPQEPFPKKELGLPKSAKIVGNPMTLSINEMQLGLSSQDILWQLRHGELVGGKPEQPNLMSRISRYLIEQRHYFPMHPPLDRSKLPKAGTADEIPTGAGLDTSYLKLGEMVNIRPDVIVVPSALPPFARVVESVLVINPGYLSKRRGAGTYARMTLYPPKSTDGVSSDTVVGHNIYERARVEITRI

SEQ ID NO: 13647 - DNA, 7155 bp, Muscodor strobelii
  misc_feature: SGI EST ID NO. CUFF.33189.0
  misc_feature: Variant of the nucleotide sequence at SEQ ID NO 13645
gtccgattcaaagacttaacacatgaaactcatcgacacatggcaataggggcaaaacgtcaggctcgatgactccaagagaaaagaaccagcctagctacatgtattgcgccaacgaaatgaatgttacagaaccgtgtgctgatgcgcctctaataactgccaaggctgccgcttagctcaaattcctgcatggacaattcccatctgcttcgtctatgtctatatgtatatggtgcaattcggctaggacgctgttggcggtgctacgccttgagttgcgtgtccttttaggtagtcttctagttctccaatctgcctgcctccggcttcccacctctcaaaccgcgcggcccgtcgctcgccgcacagcttctgcaatgccggccagtagacagagtgatcgtagtcgaatttcacctcgccacctggatactctgacaggagctgttctcgcggaacatattgtgtcatgtcctcattgaacttgagtttctccttggtgacagggtcaataaagggggtgatcagtttgaagaagccccagacaacccatggcactgccgtagtctatcagcgagacaagccctcaaacacgaagccatgttatatcttaccgttaatgatgagagcccgacctaacctctcgggatagtgggtctggaggatgtttagcacctcgcggccctgtccgagcccgggggccgtgttggttttcttggtgccacggctcttgaaatcgatgagcaggcacaccttctcctgttcggctgggatgatatctatgacgcgctccagcatgaacaccatgtgctgcacctgacgaggggtgacctcggtgttttggcgaccgggattcagataatggcatggccgtccctggttgtcgtagcctgctatgacctgcttgcccgtctcgttctcgggactgatgtgctcgggggtgagctcgtcaacgccgtactccctccgccagacaagagtctctaacagacgcttctctgcctcattcttctcccacttggtggcccggagatatctcaagaggcactcgcgggttagaaagatcttctcagtgtcggtgagaggcccactcttgtctcgagccgggacatctgtccaggttttcacgctggccaacaaagcgtcatatttggcctgctgatctgaagtgagagacgggtttgccacagatctactcgtgggaaggggtctatcgagcggcacctggagcgggccacttctcgctttctcgtcgagaactgataaaccagtaggcggcgtgactgtgccggcagtggccattatgaaaggctacggagcaagatagggtcaacttgtctagagatcacaagcaaaacaatctgggcatcgattgctggggcagaaggcaggagcccgatgtgtagcccggcgcaaagagacggatgataagggatattcaagttgacgcaagggtggtgagagcttagtcacagcagagcaagacgctaggttgaaggatcggtctcgaaatggaactactcttccaagctattttctgactgttagagcaaaggctagagcaatcgcttgaggagaagacgagaggcttactactcgcaatgacaagccacagcggtcgattgaatttgaggtcgacaagacggcattcaccgactttccagaattcgaaaggcggcgggaggcatatggcccacgagtgccgggtttgctacaatacaggtaccttaggtagtattcgtactcgcaccaggggctaaaaataacaggcgtgcaattgaactccatgctgccgggtctagggcgatgctggggggtcgacccgtcgaacgcaattggggccctgtaggttgcagtgtgagtgggggtgtagaatagtccgtaccactttacgcgctccccacgacgcgccgaagccgatttcttgatcgcgtctgaagggaaaccacccctcatgttttagctggcgcaccaaggctcgaaatgaaaatgatctgagaaacgtctagggaatttgagactccaaaatagtaactgatcgttgccaactttgaaactccgtctaagtcgattgcgcacgccgtatctcaggacacagtcgctggctacctctctctctactacttagtaggctgtgccctcgcaaacacacacgtgcgacacagacacacgaacagacacccgaacagacacccgacatggccgaggcagaagcggaggtgcaggaactgaacgaaagatttgcgacggcggacgcgcccctcgaccacaatgtcgtcgtccagctgcagtccatcatgcgcctgcactcgctgtccgtccaggacctcttcttcaagtgggagtcctactgcatcaagatggacagggacgacatgaagccgacggtcgacaccttggccgccctgaagcaggacctgctcgacaccctcgagcgctccaaccgctcccaccacgcacacatcaagacggaacgccggcccgtcgccacccctcgtgccgccgtcaagtccaccggcgacgtcatgggcatgctggatggcatggtgcccactacgccaggcaccggaggcaagctgaacagaagcgccgtcaagaagagaaatcctctcgagacgccctccgtgtcgagaaccaagagctcgcatcccgcaagctcgccggactacagaagtcccaacggcgtagaacagcagctggactctttgcacgcggtccccgtgacctccttcaacgaccgtcaacacccgggcgagcttatagaagttctcaatgagcacctcaaggcccccgcgcccccggtcgcccccttctccgaggcgcgtattgttctcaaggccagctccgaccagaagaagctgggctacaagactatggccatgaagctgacagaggcgtctgagatcctcgacgaccggatagacgagtttatgattctcctgagggaccatcatcggatcgacgacgacgagttcggcagcgccgcaagccagagcacgacagagatagtggcggttggccgcatcgcttcagattcgcccgagggcaggctcaatgccgcgtcactcgtcctagagacctcccggcgcatgggaaacggccgcagaatcccactgaagctggacaagctcaacggacgctatcagttcttcccagggcagatcgtggccttcaggggcatcaactcgtccggcagcgagtttgtcgtccgagaagttgtggacatgcccctactgcccagcgcaggatccagtgtggcagccatagaggcgcaccgagatagacttcgaggcggacccgacgccatggattcggatgacgatccgacgccgctgaacatcctgttcgcctctggtccttactctgctgacgacaatctcgacttcgaaccgctccacgctatctgcagtcaagcggccgatagctataccgacgtcatcgtattgaacgggcctttcattgacgctgaccatccattgattgctactggtgactttgatcttcctgaagaggcgatggccgaaccagaccaggccactatgtctaccgttttcaagtacatgatttctccggctctcaatcgacttgtcgcagcgaaccctaccatcaccatccttcttgtcccttccgtacgcgacatgctcgacaaacacgtctcttggccgcaagaaccctttcctaaaaaggagctcgggctacctaagagtgcaaaaatcgttggcaatccaatgactctatccataaatgaaatgcagctgggtttgtcgtcccaggacatcctttggcagcttcgccatggcgagttagtaggcggcaagccggagcagccaaacctcatgtcgaggatctcacgctatctcattgaacagcgtcattactttcccatgcatccgccactcgatcgatctaagctacccaaggccggcacggcggacgagattcctaccggtgctggattggacacgagctatctgaagctcggcgagatggtcaacatccgccctgatgtcatcgtcgtgcctagcgcgctcccgccatttgctagagttgtggaaagcgtgttggtaatcaaccccggctatctctccaagcgaagaggtgcgggaacgtatgcccgtatgacgctgtatccgcccaagtcgacagatggtgtaagtagcgatactgtggtgggccataatatttatgagagggcgagggtggaaattacgaggatatgaaatagtacttatgcatacaatcccatgtgttcgtgctatgaccattttagctaagatgaaattctcatccagtgtgcgatctgatactacgcactagacattggtgttgctggtaacctgcctatcttgaatctacccttcgtctcttctcgctgtcttgtcgccttccgtctagtgacgagtctcgtttcctccgactctgatcgtctctgaaatgccttggagatcgagatctcgagcggttccttcggctgccatacccatcatcgcgacgaggtcgatagctctctcggtcacgactccgctctctccggtccgactccctgtccccgtcacggccggtgtttctcggcccttcgggagcgccaggaacgcccttccgttccccgagcggcacggcatttgctccgccaggcccagacctctctctgaatcgatcggacttataccgatcatcaacattggtgtgatcgaaatcacgcccctcgcgaccaaacctagtgtctctaaagtcgccccagcgtcccgtgtcctcggacttcaggtccctatatttcgacgcgcccttcttccccagctttgtcatgtcacgcatctgcagggctttgggcagtagctcccgatttttgacctcgtcctgaaatctggcgcccattacatcgcgtctcgcaagttgctccgcgacctcatcatcctgaaaaaatgcaccgcggtggaagtatttctgcataaaacccgctttgcctttgccatccttctcttccttctgctgcgcgaggtgtgcttcgtcctcggcctttctctcctcttctgtcaagttgcgccgtctctccacctcttctctttccttctctcgtttctcaatagcttcgcgctcgcgctttatgcgcttcagctctcgtagcttccaggcagcatactccgcttctgggtctacgtcatcttcggtgtcgacatcctcttcctcgtctatcaagtcgtcccagtgtttcttgccggcggcgcgagcggcggcgtccttgcgcagttgttcctcaacgatttcgtccatggccttctttcgtcgctcttcttcctcttcggctgcttgtccatcgtcttgatcatctgccggtggttcattcccgctcttatggcgcaggtgtttgggaataaatttaggcttgagtagtaagcgtctaggcgcctcgtcctcggaactctcctcttcgctctcttcgtcgcttccctcgctctctccgtcttcactttcctcggtgacgaagccctcttcggcagccaacttggccgccttctctgcggcttgtcgtcggtcttctgcttcttggccctggaggcgacgctcggcgaggttgactttggagagatcgctcactattttaccggcgcttgggactttgggtgggggtgcgaccgtgcgttcggcacgctgtccagattcgctggcttctgaaccggaatcggaatcggaatcggatgatgcgccggtatgtttgcctgccctgtggcgagctggccgggctgggttcgccgtcatgcgcttgggtggcggcatgttgtcggcgcggatgtgggacttagaagtcagaaggcgaacgctgcagtcggtgatggcgcggaagatgcacaggccgcagatcgaatcatttacatggatttgaaggcgtggatgcgaggtgtgcgtagtgaagtaacaagcttgaaacagcagatgattaattaactgaagttccttgagccactcaatcgacgcgctgagcacgtccactccttctgagctaggtgctgcaacccgttgagccggttgcaactttatcttatcttagctaggttagctagacagcttcgaccccacttgcctaacttggcactcataaagtagtatttttggatttttattttggtcactggtggtgggcaggactctctgagttatgtatataaggtagtgaggaatgagaacaagcaggattaggaactgcgaggcctagggttcatgttttcggtgaaccgttgaatactcgaggtagatagagacatagtcatcgatatacccccgaaagttggaatactcttttggaccccaacgcccgacgcctggtgactaagaaaaagtatgtggatatcctcatgcagaatcggaattctcttgtgacaagccatcacaagatctcgtctccatcgtggtcttggtccatcgtagtaggctgctcgccaactgtgttctcgtcttgcttgccagccaggccatcatctgctgcctcgcccatctcatcatcaaactcggacccctcaacggcctgatccccatcatccgcatcttttcctgcaccagcattggcagcggccttctgattgatttgctcccactccttctgccttgcttggatctttcgcgactgacccttgctccggttgatcttcttctccgtgcgctccataatctccaccgcacgatcctgggcgcgttcttgtcgcttgcgcgccttgctgctcaagccgcggcccttcttctgcttcttggagacgcctgcgccatggtggagagccagcaccgaggggcggtggtcgaccgactctggaggtaggcgaacttccttcagagacttgtctgtgtctatgctgggggatgtcgcccgtcgcgcagctctagaatgtagagacggggctggtcgcggtaggcaatatccattagatatgtccgtgtacgattagccgtataaagaaagtagagagcctcaccttttgtctttttggatatcgcgcctttagccattatcagtgtgcggctctaccgtgtgccttgggtgccaacagcttagacaggtgaccgagttccagagatgctgaagaagccttcgtctatctggttgtatcttggagtcgagttgtgcagggctaccggccagagattcaacctgaatcactgaaa

SEQ ID NO: 13648 - DNA, 1434 bp, Muscodor strobelii
  misc_feature: SGI cDNA ID NO. 564479
  misc_feature: Encodes the peptide sequence at SEQ ID NO 13649
atgccgccacccaagcgcatgacggcgaacccagcccggccagctcgccacagggcaggcaaacataccggcgcatcatccgattccgattccgattccggttcagaagccagcgaatctggacagcgtgccgaacgcacggtcgcacccccacccaaagtcccaagcgccggtaaaatagtgagcgatctctccaaagtcaacctcgccgagcgtcgcctccagggccaagaagcagaagaccgacgacaagccgcagagaaggcggccaagttggctgccgaagagggcttcgtcaccgaggaaagtgaagacggagagagcgagggaagcgacgaagagagcgaagaggagagttccgaggacgaggcgcctagacgcttactactcaagcctaaatttattcccaaacacctgcgccataagagcgggaatgaaccaccggcagatgatcaagacgatggacaagcagccgaagaggaagaagagcgacgaaagaaggccatggacgaaatcgttgaggaacaactgcgcaaggacgccgccgctcgcgccgccggcaagaaacactgggacgacttgatagacgaggaagaggatgtcgacaccgaagatgacgtagacccagaagcggagtatgctgcctggaagctacgagagctgaagcgcataaagcgcgagcgcgaagctattgagaaacgagagaaggaaagagaagaggtggagagacggcgcaacttgacagaagaggagagaaaggccgaggacgaagcacacctcgcgcagcagaaggaagagaaggatggcaaaggcaaagcgggttttatgcagaaatacttccaccgcggtgcattttttcaggatgatgaggtcgcggagcaacttgcgagacgcgatgtaatgggcgccagatttcaggacgaggtcaaaaatcgggagctactgcccaaagccctgcagatgcgtgacatgacaaagctggggaagaagggcgcgtcgaaatatagggacctgaagtccgaggacacgggacgctggggcgactttagagacactaggtttggtcgcgaggggcgtgatttcgatcacaccaatgttgatgatcggtataagtccgatcgattcagagagaggtctgggcctggcggagcaaatgccgtgccgctcggggaacggaagggcgttcctggcgctcccgaagggccgagaaacaccggccgtgacggggacagggagtcggaccggagagagcggagtcgtgaccgagagagctatcgacctcgtcgcgatgatgggtatggcagccgaaggaaccgctcgagatctcgatctccaaggcatttcagagacgatcagagtcggaggaaacgagactcgtcactagacggaaggcgacaagacagcgagaagagacgaagggtagattcaagatag

SEQ ID NO: 13649 - protein, 477 aa, Muscodor strobelii
  misc_feature: SGI Peptide ID NO. 564479
  misc_feature (87)..(393): Pfam Id: PF06991 Pfam Desc: Micro-fibrillar-associated protein 1 C-terminus
  misc_feature (87)..(290): Pfam Id: PF06991 Pfam Desc: Micro-fibrillar-associated protein 1 C-terminus
  misc_feature (1)..(396): NCBI GI: 164426756 Blast Desc: NCU03598 [Neurospora crassa OR74A] gi|18376384|emb|CAD21273.1| related to microfibril-associated protein [Neurospora crassa] gi|157071465|gb|EAA32089.2| conserved
  misc_feature (1)..(396): NCBI GI: 116198855 Blast Desc: CHGG_07583 [Chaetomium globosum CBS 148.51] gi|88178862|gb|EAQ86330.1| CHGG_07583 [Chaetomium globosum CBS 148.51]
  misc_feature (3)..(390): NCBI GI: 256731017 Blast Desc: NECHADRAFT_84829 [Nectria haematococca mpVI 77-13-4]
  misc_feature (3)..(390): NCBI GI: 46125289 Blast Desc: FG07022.1 [Gibberella zeae PH-1]
  misc_feature (5)..(391): NCBI GI: 156059178 Blast Desc: SS1G_03601 [Sclerotinia sclerotiorum 1980] gi|154701388|gb|EDO01127.1| SS1G_03601 [Sclerotinia sclerotiorum 1980]
  misc_feature (1)..(389): NCBI GI: 261189649 Blast Desc: microfibrillar-associated protein MfaP1 [Ajellomyces dermatitidis SLH14081] gi|239591471|gb|EEQ74052.1| microfibrillar-associated protein MfaP1 [Ajellomyces dermatitidis
  misc_feature (1)..(389): NCBI GI: 239612998 Blast Desc: microfibrillar-associated protein MfaP1 [Ajellomyces dermatitidis ER-3]
  misc_feature (1)..(347): NCBI GI: 225677510 Blast Desc: conserved [Paracoccidioides brasiliensis Pb03]
  misc_feature (1)..(347): NCBI GI: 226295366 Blast Desc: microfibril-associated protein [Paracoccidioides brasiliensis Pb18]
  misc_feature (1)..(347): NCBI GI: 226284922 Blast Desc: microfibril-associated protein [Paracoccidioides brasiliensis Pb01]
MPPPKRMTANPARPARHRAGKHTGASSDSDSDSGSEASESGQRAERTVAPPPKVPSAGKIVSDLSKVNLAERRLQGQEAEDRRQAAEKAAKLAAEEGFVTEESEDGESEGSDEESEEESSEDEAPRRLLLKPKFIPKHLRHKSGNEPPADDQDDGQAAEEEEERRKKAMDEIVEEQLRKDAAARAAGKKHWDDLIDEEEDVDTEDDVDPEAEYAAWKLRELKRIKREREAIEKREKEREEVERRRNLTEEERKAEDEAHLAQQKEEKDGKGKAGFMQKYFHRGAFFQDDEVAEQLARRDVMGARFQDEVKNRELLPKALQMRDMTKLGKKGASKYRDLKSEDTGRWGDFRDTRFGREGRDFDHTNVDDRYKSDRFRERSGPGGANAVPLGERKGVPGAPEGPRNTGRDGDRESDRRERSRDRESYRPRRDDGYGSRRNRSRSRSPRHFRDDQSRRKRDSSLDGRRQDSEKRRRVDSR

SEQ ID NO: 13650 - DNA, 7136 bp, Muscodor strobelii; identical to SEQ ID NO: 13644
  misc_feature: SGI EST ID NO. CUFF.33190.1
  misc_feature: Variant of the nucleotide sequence at SEQ ID NO 13648

SEQ ID NO: 13651 - DNA, 540 bp, Muscodor strobelii
  misc_feature: SGI cDNA ID NO. 564480
  misc_feature: Encodes the peptide sequence at SEQ ID NO 13652
atggctaaaggcgcgatatccaaaaagacaaaagccccgtctctacattctagagctgcgcgacgggcgacatcccccagcatagacacagacaagtctctgaaggaagttcgcctacctccagagtcggtcgaccaccgcccctcggtgctggctctccaccatggcgcaggcgtctccaagaagcagaagaagggccgcggcttgagcagcaaggcgcgcaagcgacaagaacgcgcccaggatcgtgcggtggagattatggagcgcacggagaagaagatcaaccggagcaagggtcagtcgcgaaagatccaagcaaggcagaaggagtgggagcaaatcaatcagaaggccgctgccaatgctggtgcaggaaaagatgcggatgatggggatcaggccgttgaggggtccgagtttgatgatgagatgggcgaggcagcagatgatggcctggctggcaagcaagacgagaacacagttggcgagcagcctactacgatggaccaagaccacgatggagacgagatcttgtga

SEQ ID NO: 13652 - protein, 179 aa, Muscodor strobelii
  misc_feature: SGI Peptide ID NO. 564480
  misc_feature (1)..(154): NCBI GI: 116199327 Blast Desc: CHGG_07819 [Chaetomium globosum CBS 148.51] gi|88179098|gb|EAQ86566.1| CHGG_07819 [Chaetomium globosum CBS 148.51]
  misc_feature (11)..(179): NCBI GI: 39944042 Blast Desc: MGG_04032 [Magnaporthe grisea 70-15] gi|145014756|gb|EDJ99324.1| MGG_04032 [Magnaporthe grisea 70-15]
  misc_feature (9)..(179): NCBI GI: 256728025 Blast Desc: NECHADRAFT_83411 [Nectria haematococca mpVI 77-13-4]
  misc_feature (1)..(124): NCBI GI: 85075935 Blast Desc: NCU01458 [Neurospora crassa OR74A] gi|28916868|gb|EAA26610.1| [Neurospora crassa OR74A] gi|28950325|emb|CAD70950.1| [Neurospora crassa]
  misc_feature (9)..(116): NCBI GI: 46130880 Blast Desc: FG08995.1 [Gibberella zeae PH-1]
  misc_feature (14)..(119): NCBI GI: 154304208 Blast Desc: BC1G_08374 [Botryotinia fuckeliana B05.10] gi|150854176|gb|EDN29368.1| BC1G_08374 [Botryotinia fuckeliana B05.10]
  misc_feature (1)..(119): NCBI GI: 156059176 Blast Desc: SS1G_03600 [Sclerotinia sclerotiorum 1980] gi|154701387|gb|EDO01126.1| SS1G_03600 [Sclerotinia sclerotiorum 1980]
  misc_feature (13)..(116): NCBI GI: 171692711 Blast Desc: protein product [Podospora anserina] gi|170946304|emb|CAP73105.1| protein product [Podospora anserina]
  misc_feature (9)..(132): NCBI GI: 145249596 Blast Desc: An14g05140 [Aspergillus niger] gi|134081820|emb|CAK42075.1| protein product [Aspergillus niger]
  misc_feature (1)..(177): NCBI GI: 226295391 Blast Desc: conserved [Paracoccidioides brasiliensis Pb18]
MAKGAISKKTKAPSLHSRAARRATSPSIDTDKSLKEVRLPPESVDHRPSVLALHHGAGVSKKQKKGRGLSSKARKRQERAQDRAVEIMERTEKKINRSKGQSRKIQARQKEWEQINQKAAANAGAGKDADDGDQAVEGSEFDDEMGEAADDGLAGKQDENTVGEQPTTMDQDHDGDEIL

SEQ ID NO: 13653 - DNA, 7136 bp, Muscodor strobelii; identical to SEQ ID NO: 13644
  misc_feature: SGI EST ID NO. CUFF.33190.1
  misc_feature: Variant of the nucleotide sequence at SEQ ID NO 13651

SEQ ID NO: 13654 - DNA, 2130 bp, Muscodor strobelii
  misc_feature: SGI cDNA ID NO. 564481
  misc_feature: Encodes the peptide sequence at SEQ ID NO 13655
atgcactcccaggacttgccaggcaagccggagctgtacgccgcctcgagcctctccgcctatgactctctctggcatcgtctgcctcaaccgagcatccttctcccactgcttctcctcgtcctgaccgcgctctaccagtcgctccactcctctgcgcccttctccaatgcgcgacaccccggccagcttgtctgggacctcatcatcgccatcacgcccgccgcgttcctctaccttctcgacggctggctgcaccctccgctgttccccctcgccgactctatgcgcccggcccggcccgcgacctacgtggccaagagcgacctgctgcgccgcatcctcggcatggacgacccgagcagcttgatgagcaccgtcgcccatgctggtaggaagagcatctcttcgctgtcgagcagcccgtttgcaaagcgatccaccgaccagcctgccggcctcggaaactacgacaactcatgcttccagaacagcatcctccaagggctttcttccctgcggcccttgcccgcgtacctggccatcgcccacgaccaaaccgagtccgccagtggcaggccagagcccagctccgccgtgactctccgagacctgttatccaagcttaccggccccgaacacaacggggccacgctctggacgcctccaaagctgaagtcgctcgacacatggcaacagcaagacgcacaagagtactattccaagatagtagaagagattgacaaggaagtcacaaaagccgcccagtccctgcaccactcctcgggcttggagctcggcggtcccgaagatgacaccgtggagagccagcacagcgatgacagcggatactcctccttgtccgctatttctcggtccgtcgcggacagcaagatcccaagaaacccgctggaaggcctcgtggctcaacgggttgcctgtgtccaatgcggccactccgagggtctgtcgatgattcctttcaactgcattaccttgagtcttggcctcaaccaaggagcacacgatctctacgaacgactcgattcttatacagagctggaggcgattcagggcgtcgaatgcgccaaatgcacgttgttgaaggtgcagaagctactgggcatcattgtcgagagaggccaggctgtgggctcctccgaagcctctttgcaggaacctctggcgcggctagaagcggtaggcagtgccttggaggaagacgacttcggggaggagacactgcttgaatcgtgcaaaatatccaagcaacatcgagtgagctcgacgaaaacgaagcaaatggtgatcgcccgccccccgcagagtctagctgttcacatcaacaggtctgtgttcgatgagagaacgggcgacatgttcaagaatcctgcggccatgcgctttcctgaaactctcgatcttggtccatggtgccttgggagtgcagggctcggcggcgacgacagcccttccgacacggcgattgacgcagcagaacagtggagttcgaacccaacacgctctatggtatcgggagctctcaagccgtcaaaaattctgggccctctttatgagctacgggctgtcattacacaccaaggtcgtcatgagaacggacactacgtttgttatcggcgacacccgcggcgatcaactagtgatcgactcgagaaggaagaaagtgactctcatcatgatgccgaaaccgacgtcacatgcgaaagtgatttgggggaggaatctacgtggtggcgactgagcgatgagagtgtctgggagactaatgaggaaacggttctagcgcagggtggtgtcttcatgctgttctacgattgtgtggatcataattctgttctcaatcttccgagtgaggttgataactctagaacttttgatgggacatcaaatgcagccccggccgaccgaacacccggcatatacaaaagttgcaactcaaatgacgatgacgagcacgcctcccaagccgttgaggcatcgtgcctagcggttccaaagacgacaaccaacgaaagtggcccaatcactgccatttcatctctgtttcccgagctgagacacgacgaatacgtcgaccccatcatccctctgcgacgacctaactcgtga

SEQ ID NO: 13655 - protein, 709 aa, Muscodor strobelii
  misc_feature: SGI Peptide ID NO. 564481
  misc_feature (149)..(611): Pfam Id: PF00443 Pfam Desc: Ubiquitin carboxyl-terminal hydrolase
  misc_feature (22)..(620): NCBI GI: 256731037 Blast Desc: NECHADRAFT_21972 [Nectria haematococca mpVI 77-13-4]
  misc_feature (19)..(620): NCBI GI: 116199329 Blast Desc: CHGG_07820 [Chaetomium globosum CBS 148.51] gi|88179099|gb|EAQ86567.1| CHGG_07820 [Chaetomium globosum CBS 148.51]
  misc_feature (25)..(645): NCBI GI: 46123459 Blast Desc: FG06107.1 [Gibberella zeae PH-1]
  misc_feature (33)..(620): NCBI GI: 171692709 Blast Desc: protein product [Podospora anserina] gi|170946303|emb|CAP73104.1| protein product [Podospora anserina]
  misc_feature (2)..(615): NCBI GI: 85075930 Blast Desc: NCU01457 [Neurospora crassa OR74A] gi|28916867|gb|EAA26609.1| [Neurospora crassa OR74A] gi|28950326|emb|CAD70951.1| related to ubiquitin-specific UBP1
  misc_feature (63)..(620): NCBI GI: 145607157 Blast Desc: MGG_04031 [Magnaporthe grisea 70-15] gi|145014755|gb|EDJ99323.1| MGG_04031 [Magnaporthe grisea 70-15]
  misc_feature (21)..(667): NCBI GI: 238500133 Blast Desc: ubiquitin C-terminal hydrolase, [Aspergillus flavus NRRL3357] gi|220693054|gb|EED49400.1| ubiquitin C-terminal hydrolase, [Aspergillus flavus NRRL3357]
  misc_feature (21)..(667): NCBI GI: 169779479 Blast Desc: [Aspergillus oryzae RIB40] gi|83772943|dbj|BAE63071.1| protein product [Aspergillus oryzae]
  misc_feature (110)..(495): NCBI GI: 261358976 Blast Desc: conserved [Verticillium albo-atrum VaMs.102]
  misc_feature (19)..(615): NCBI GI: 145249598 Blast Desc: An14g05150 [Aspergillus niger] gi|134081821|emb|CAK42076.1| protein product [Aspergillus niger]
MHSQDLPGKPELYAASSLSAYDSLWHRLPQPSILLPLLLLVLTALYQSLHSSAPFSNARHPGQLVWDLIIAITPAAFLYLLDGWLHPPLFPLADSMRPARPATYVAKSDLLRRILGMDDPSSLMSTVAHAGRKSISSLSSSPFAKRSTDQPAGLGNYDNSCFQNSILQGLSSLRPLPAYLAIAHDQTESASGRPEPSSAVTLRDLLSKLTGPEHNGATLWTPPKLKSLDTWQQQDAQEYYSKIVEEIDKEVTKAAQSLHHSSGLELGGPEDDTVESQHSDDSGYSSLSAISRSVADSKIPRNPLEGLVAQRVACVQCGHSEGLSMIPFNCITLSLGLNQGAHDLYERLDSYTELEAIQGVECAKCTLLKVQKLLGIIVERGQAVGSSEASLQEPLARLEAVGSALEEDDFGEETLLESCKISKQHRVSSTKTKQMVIARPPQSLAVHINRSVFDERTGDMFKNPAAMRFPETLDLGPWCLGSAGLGGDDSPSDTAIDAAEQWSSNPTRSMVSGALKPSKILGPLYELRAVITHQGRHENGHYVCYRRHPRRSTSDRLEKEESDSHHDAETDVTCESDLGEESTWWRLSDESVWETNEETVLAQGGVFMLFYDCVDHNSVLNLPSEVDNSRTFDGTSNAAPADRTPGIYKSCNSNDDDEHASQAVEASCLAVPKTTTNESGPITAISSLFPELRHDEYVDPIIPLRRPNS

SEQ ID NO: 13656 - DNA, 3232 bp, Muscodor strobelii
  misc_feature: SGI EST ID NO. CUFF.33193.0
  misc_feature: Variant of the nucleotide sequence at SEQ ID NO 13654
caatgacacccatgcatgcatgcatgagatgtgataagccgggaaacgctttggactttgaagacatcttggtcactccccttactcatccgtggcagctgtcgcacccacgagtgcctgcagctcgtcgatctttgtcttggtatcagcttcgcgctcctgagtccttgcatctcaccctccgacttgaaatgccttaagtaggacatacttagagactcctcagcgctgcacgcccgcctcccacctcccacctcccacgtccccattcgaggcttcggttcgcctgtcgcatcagtgtgattcaacttctgtacaccctttcacgagcggcgccgtcatggctttccatgtgtactgtcccttgaacgacttcttctgcctgttgttgtccaaccctctgtgccagtagccgacgataaacacacagagagtacaggccatcgctctgttccgccgaccccgaccccgaccgcttcataaaggaccacctcccacctcccactctgactatcatatgcatgcagcctcatcctcatactcgtcctcgccgtcccatcttcttggccgtcccatctttggcctcgctgctgctgctgctgctgctgctactgctactgctgctactgccggcgaccacttcccgcatacacacatgaacgatgcactcccaggacttgccaggcaagccggagctgtacgccgcctcgagcctctccgcctatgactctctctggcatcgtctgcctcaaccgagcatccttctcccactgcttctcctcgtcctgaccgcgctctaccagtcgctccactcctctgcgcccttctccaatgcgcgacaccccggccagcttgtctgggacctcatcatcgccatcacgcccgccgcgttcctctaccttctcgacggctggctgcaccctccgctgttccccctcgccgactctatgcgcccggcccggcccgcgacctacgtggccaagagcgacctgctgcgccgcatcctcggcatggacgacccgagcagcttgatgagcaccgtcgcccatgctggtaggaagagcatctcttcgctgtcgagcagcccgtttgcaaagcgatccaccgaccagcctgccggcctcggaaactacgacaactcatgcttccagaacagcatcctccaagggctttcttccctgcggcccttgcccgcgtacctggccatcgcccacgaccaaaccgagtccgccagtggcaggccagagcccagctccgccgtgactctccgagacctgttatccaagcttaccggccccgaacacaacggggccacgctctggacgcctccaaagctgaagtcgctcgacacatggcaacagcaagacgcacaagagtactattccaagatagtagaagagattgacaaggaagtcacaaaagccgcccagtccctgcaccactcctcgggcttggagctcggcggtcccgaagatgacaccgtggagagccagcacagcgatgacagcggatactcctccttgtccgctatttctcggtccgtcgcggacagcaagatcccaagaaacccgctggaaggcctcgtggctcaacgggttgcctgtgtccaatgcggccactccgagggtctgtcgatgattcctttcaactgcattaccttgagtcttggcctcaaccaaggagcacacgatctctacgaacgactcgattcttatacagagctggaggcgattcagggcgtcgaatgcgccaaatgcacgttgttgaaggtgcagaagctactgggcatcattgtcgagagaggccaggctgtgggctcctccgaagcctctttgcaggaacctctggcgcggctagaagcggtaggcagtgccttggaggaagacgacttcggggaggagacactgcttgaatcgtgcaaaatatccaagcaacatcgagtgagctcgacgaaaacgaagcaaatggtgatcgcccgccccccgcagagtctagctgttcacatcaacaggtctgtgttcgatgagagaacgggcgacatgttcaagaatcctgcggccatgcgctttcctgaaactctcgatcttggtccatggtgccttgggagtgcagggctcggcggcgacgacagcccttccgacacggcgattgacgcagcagaacagtggagttcgaacccaacacgctctatggtatcgggagctctcaagccgtcaaaaattctgggccctctttatgagctacgggctgtcattacacaccaaggtcgtcatgagaacggacactacgtttgttatcggcgacacccgcggcgatcaactagtgatcgactcgagaaggaagaaagtgactctcatcatgatgccgaaaccgacgtcacatgcgaaagtgatttgggggaggaatctacgtggtggcgactgagcgatgagagtgtctgggagactaatgaggaaacggttctagcgcagggtggtgtcttcatgctgttctacgattgtgtggatcataattctgttctcaatcttccgagtgaggttgataactctagaacttttgatgggacatcaaatgcagccccggccgaccgaacacccggcatatacaaaagttgcaactcaaatgacgatgacgagcacgcctcccaagccgttgaggcatcgtgcctagcggttccaaagacgacaaccaacgaaagtggcccaatcactgccatttcatctctgtttcccgagctgagacacgacgaatacgtcgaccccatcatccctctgcgacgacctaactcgtgaagggaaacacagtattaaacaatcaaagaatggttccgaagacatacgagagcgaagacatacaaaaacggtagatacttgctttttctctgcatagccacggcgttaggatctgccattggttcacagatgaacagccactgactgatgcattttatactggatttccagtaggcatttagaaacgagcagaataagcagttatttgactagtaaaagctgcagattagtaaaactaggtagtgatatgcatagacgtgactatgatgtattttctgaaactatatgtgtttacatagacatatatgtgtagagaaatgaaatgagataaggttcgccggccaagcgagcaagttgttgtcagcagcgtagtgtcccacaaatcttctttccctgttgtgagacgctcggaagtgctcgcgtcgtcggataagctaaac

SEQ ID NO: 13657 - DNA, 1659 bp, Muscodor strobelii
  misc_feature: SGI cDNA ID NO. 564482
  misc_feature: Encodes the peptide sequence at SEQ ID NO 13658
atggcaggcttccgggccgttgaagatcggccaacgccaaaagaggacactccatttccaccgactacgatctactaccagcaagagatactgacgtttgactacgtagcactgaatagctttggttacgattcggccttcgtgggaactactattgcacggaaaagcttcacggacgacttccacatcacgagtgcgacgaaaaacagtgtctcgagtaacatcacttctgcgttccaagcggctgcatttttcggttcaattttttgttacctggtgaccgagaaggttggtagaaaatgggcactccaaatcaatgttttgatcttcatcctgggagcgatcttgatgacggtagccccgaatcagctttcttatatatacgcgggtcgggcgctcaccggtttgggctgcggtgccatcacggcaacagtccccagttatatcgctgagctctccatatcgtccatccgcggaatactcacaggattgttcgaagtcgcgtatcaagttggatctgtcattggcttctggatcaactatggtatcaatgagaacctcgacgtgaaagcatcgatcagctggcggctacccatgggtttccaactcgtgcccgcggtgccgctattcatcttcggactgtttctgcacgagagcccgttatggctcatgcgcaaaggaaaacttgagcaagcctgcaagacactggaagacctgcgacatctacccagagaacatgaatatattcaggaagagctccaacagatccagaggagactggatgaagaggccgcggtcgcctctcaatacggcacgggcgcgtgggctttctttcgtgggggcctctccgagttaatgcagccgggaatgcgaaaccgagtcttgcttgtcttttgggctttcactttgacacagctgtcaggtgcggcagctataaactattactcgccaactctttttggctcgttagggattgaggatgtgacattgtacactggtatttatggcctgctcaaggccatcgcctccataatatactatgctttccttatcgatctggtcggtcgtcgacgacccgtccttgtgtcttcgatcacctgctccctctgtctctggttcgtcggcagttatgtcaaggtcgccaacccggcggccaaactcgcggctggactcacgctagatgcgtcaacagtagcgggtggtaaagcagccatcgcttttgtcaacatctattcagtcgcgtggtcttttgggttaaacggtgtcccctgggtcgtgtcggcagagatctttcccggtgccttgcggacaatcaccgggacgtgggcttcactagtccaatggctgttccaatttgtcatcaccaaagccctcccctatattttctcttcgtttggctatggaacctggttcttctttgcatctttcatgctcatcgccacggcatgggcgttcttcttcctgcctgagaccaaaggtcttaccattgaccaaatggaccacatctttggctacaaggagaccaaatcctttacgattccgcgcacagctgtcacgaagaggctcatcgaaaccatgcagatcgaaagacaggacgctaaattgtcaaagactgatacccagattcactctacggttgccgaacacgaggtggtttag

SEQ ID NO: 13658 - protein, 552 aa, Muscodor strobelii
  misc_feature: SGI Peptide ID NO. 564482
  misc_feature (36)..(455): Pfam Id: PF07690 Pfam Desc: Major Facilitator Superfamily
  misc_feature (30)..(503): Pfam Id: PF00083 Pfam Desc: Sugar (and other) transporter
  misc_feature (41)..(503): Pfam Id: PF00083 Pfam Desc: Sugar (and other) transporter
  misc_feature (1)..(505): NCBI GI: 242820350 Blast Desc: MFS quinate transporter QutD [Talaromyces stipitatus ATCC 10500] gi|218713957|gb|EED13381.1| MFS quinate transporter QutD [Talaromyces stipitatus ATCC 10500]
  misc_feature (1)..(510): NCBI GI: 46110365 Blast Desc: FG02064.1 [Gibberella zeae PH-1]
  misc_feature (1)..(510): NCBI GI: 256728590 Blast Desc: [Nectria haematococca mpVI 77-13-4]
  misc_feature (1)..(539): NCBI GI: 261361018 Blast Desc: quinate permease [Verticillium albo-atrum VaMs.102]
  misc_feature (1)..(505): NCBI GI: 149209505 Blast Desc: MGCH7_ch7g236 [Magnaporthe grisea 70-15] gi|86196191|gb|EAQ70829.1| MGCH7_ch7g236 [Magnaporthe grisea 70-15]
  misc_feature (4)..(507): NCBI GI: 67540568 Blast Desc: AN6454.2 [Aspergillus nidulans FGSC A4] gi|40739286|gb|EAA58476.1| AN6454.2 [Aspergillus nidulans FGSC A4] gi|259479317|tpe|CBF69440.1| TPA: conserved [Aspergillus FGSC
  misc_feature (1)..(413): NCBI GI: 115384464 Blast Desc: conserved [Aspergillus terreus NIH2624] gi|114196471|gb|EAU38171.1| conserved [Aspergillus terreus NIH2624]
  misc_feature (4)..(536): NCBI GI: 134107740 Blast Desc: CNBB0550 [Cryptococcus neoformans var. neoformans B-3501A] gi|50260173|gb|EAL22834.1| CNBB0550 [Cryptococcus neoformans var. neoformans B-3501A]
  misc_feature (4)..(536): NCBI GI: 58264224 Blast Desc: hexose transport-related protein [Cryptococcus neoformans var. neoformans JEC21] gi|57223918|gb|AAW41961.1| hexose transport-related protein, [Cryptococcus neoformans var.
  misc_feature (3)..(504): NCBI GI: 58267696 Blast Desc: hexose transport-related protein [Cryptococcus neoformans var. neoformans JEC21] gi|134112087|ref|XP_775579.1| CNBE2930 [Cryptococcus neoformans var. neoformans B-3501A] var.
MAGFRAVEDRPTPKEDTPFPPTTIYYQQEILTFDYVALNSFGYDSAFVGTTIARKSFTDDFHITSATKNSVSSNITSAFQAAAFFGSIFCYLVTEKVGRKWALQINVLIFILGAILMTVAPNQLSYIYAGRALTGLGCGAITATVPSYIAELSISSIRGILTGLFEVAYQVGSVIGFWINYGINENLDVKASISWRLPMGFQLVPAVPLFIFGLFLHESPLWLMRKGKLEQACKTLEDLRHLPREHEYIQEELQQIQRRLDEEAAVASQYGTGAWAFFRGGLSELMQPGMRNRVLLVFWAFTLTQLSGAAAINYYSPTLFGSLGIEDVTLYTGIYGLLKAIASIIYYAFLIDLVGRRRPVLVSSITCSLCLWFVGSYVKVANPAAKLAAGLTLDASTVAGGKAAIAFVNIYSVAWSFGLNGVPWVVSAEIFPGALRTITGTWASLVQWLFQFVITKALPYIFSSFGYGTWFFFASFMLIATAWAFFFLPETKGLTIDQMDHIFGYKETKSFTIPRTAVTKRLIETMQIERQDAKLSKTDTQIHSTVAEHEVV

SEQ ID NO: 13659 - DNA, 2671 bp, Muscodor strobelii
  misc_feature: SGI EST ID NO. CUFF.32658.0
  misc_feature: Variant of the nucleotide sequence at SEQ ID NO 13657
tgcggtgccatcacggcaacagtccccagttatatcgctgagctctccatatcgtccatccgcggaatactcacaggattgttcgaagtcgcgtatcaagttggatctgtcattggcttctggatcaactatggtatcaatgagaacctcgacgtgaaagcatcgatcagctggcggctacccatgggtttccaactcgtgcccgcggtgccgctattcatcttcggactgtttctgcacgagagcccgttatggctcatgcgcaaaggaaaacttgagcaagcctgcaagacactggaagacctgcgacatctacccagagaacatgaatatattcaggaagagctccaacagatccagaggagactggatgaagaggccgcggtcgcctctcaatacggcacgggcgcgtgggctttctttcgtgggggcctctccgagttaatgcagccgggaatgcgaaaccgagtcttgcttgtcttttgggctttcactttgacacagctgtcaggtgcggcagctataaactattactcgccaactctttttggctcgttagggattgaggatgtgacattgtacactggtatttatggcctgctcaaggccatcgcctccataatatactatgctttccttatcgatctggtcggtcgtcgacgacccgtccttgtgtcttcgatcacctgctccctctgtctctggttcgtcggcagttatgtcaaggtcgccaacccggcggccaaactcgcggctggactcacgctagatgcgtcaacagtagcgggtggtaaagcagccatcgcttttgtcaacatctattcagtcgcgtggtcttttgggttaaacggtgtcccctgggtcgtgtcggcagagatctttcccggtgccttgcggacaatcaccgggacgtgggcttcactagtccaatggctgttccaatttgtcatcaccaaagccctcccctatattttctcttcgtttggctatggaacctggttcttctttgcatctttcatgctcatcgccacggcatgggcgttcttcttcctgcctgagaccaaaggtcttaccattgaccaaatggaccacatctttggctacaaggagaccaaatcctttacgattccgcgcacagctgtcacgaagaggctcatcgaaaccatgcagatcgaaagacaggacgctaaattgtcaaagactgatacccagattcactctacggttgccgaacacgaggtggtttagggcacagacctagcgtcgaacggacctcgtcggtcgtcatgtgagaaccggagtggttacgatgctgtagagaatgctaggcctggatggcggtatatgcaacattatttagaaaagaacatattgggtatttgatggcatagaagtcttaggaaatctatagatatcgtgagttcttcaccctcagcttgccatgtgggtatcgtttgaaccataaaacgaatcgtctcttggtactgagttcaattcttctaaattgttagtggaattgacgaggccatgcacgcaacaataacaacaacaacatcgcctcttcacaacatgacacagcatgagctgtggctctgcatgtaaagttttgcctttatgctgaacaaaagtcgtaatcagtcttggaataaccgaaaggctgaatgcatttgtcggtgaaaactcgctagaatgaaccatcattcgtctagcagaatcgtcattgagcctaggcgcgatggtcaagtggtgtatatccttgttcatctctagcttggctccttttcataaacttaacaggctacgctggaaatggctgacatcggatctggcaagcctgatttgtatcgagtatggtgctcggattcagatcgaacgcagaccatggaacaattcttaccattccatgaatgtatcattaggaagccagctaacttcctggtgcgtatctgtactgatgctccaagtcgtaaagctgttgcgaagtcactcgacgcgcgtatgttcggagtaggtctcctggagacctggcaaaggactcaccacgcccggagtctttcggcaaggaattgcatgataggcaacatttcttctcgatttttgggcattgtgtcttcaggcttcttccacttcacctcgcgaacatccgtaaactctctttccaaggtctccatggcgtcgtcgtcaagggtctcgctatttctgccgtggcaaatcagagcgggggttcgagccttttctctggcactatgcgtagggatcatacttgtaggtagtagcccgccaatcgacacgaggcccttgaaagctcgcaccgatgttagatcaccttcagacacgtctataactctttcggtgtcccgtagcctggaagcaagaccaagaactaaagagccgccctggccaaagccgaagagggtgatgtcgttcaccgtccagccacatgcggcaatgagggtcttctggattagatctaccagcaccaaacgttgtgctttttcgaagccgggatcaggatctagatcaccagtggcgggggacagagtgaggtcatcaccccagtggaagtgagttggcgaagctgtggagtgggagggcggaagaccaagcatggcgggggggagcggcgagacaccgcgcaccgagatggcaaggacacccggtaggttctggt

SEQ ID NO: 13660 - DNA, 801 bp, Muscodor strobelii
  misc_feature: SGI cDNA ID NO. 564483
  misc_feature: Encodes the peptide sequence at SEQ ID NO 13661
atgcgtactcgcatccccaaacctgaagactttgcacatctcgagcccgagctcaaggtctcgttggtcttcccagaagtccccgaggccactacctctattctcatcctgttccacggcttgggcgacgccgaagcctcttttgcttcctttgctgggagcatggacatgaacctaccgggtgtccttgccatctcggtgcgcggtgtctcgccgctcccccccgccatgcttggtcttccgccctcccactccacagcttcgccaactcacttccactggggtgatgacctcactctgtcccccgccactggtgatctagatcctgatcccggcttcgaaaaagcacaacgtttggtgctggtagatctaatccagaagaccctcattgccgcatgtggctggacggtgaacgacatcaccctcttcggctttggccagggcggctctttagttcttggtcttgcttccaggctacgggacaccgaaagagttatagacgtgtctgaaggtgatctaacatcggtgcgagctttcaagggcctcgtgtcgattggcgggctactacctacaagtatgatccctacgcatagtgccagagaaaaggctcgaacccccgctctgatttgccacggcagaaatagcgagacccttgacgacgacgccatggagaccttggaaagagagtttacggatgttcgcgaggtgaagtggaagaagcctgaagacacaatgcccaaaaatcgagaagaaatgttgcctatcatgcaattccttgccgaaagactccgggcgtggtga

SEQ ID NO: 13661 - protein, 266 aa, Muscodor strobelii
  misc_feature: SGI Peptide ID NO. 564483
  misc_feature (22)..(263): Pfam Id: PF02230 Pfam Desc: Phospholipase/Carboxylesterase
  misc_feature (4)..(264): NCBI GI: 39943974 Blast Desc: MGG_03998 [Magnaporthe grisea 70-15] gi|145014718|gb|EDJ99286.1| MGG_03998 [Magnaporthe grisea 70-15]
  misc_feature (1)..(265): NCBI GI: 256731308 Blast Desc: NECHADRAFT_71716 [Nectria haematococca mpVI 77-13-4]
  misc_feature (1)..(264): NCBI GI: 46125989 Blast Desc: FG07372.1 [Gibberella zeae PH-1]
  misc_feature (3)..(265): NCBI GI: 85092042 Blast Desc: NCU04655 [Neurospora crassa OR74A] gi|21622322|emb|CAD37025.1| conserved [Neurospora crassa] gi|28920600|gb|EAA29962.1| [Neurospora crassa OR74A]
  misc_feature (1)..(264): NCBI GI: 261355539 Blast Desc: phospholipase/Carboxylesterase superfamily [Verticillium albo-atrum VaMs.102]
  misc_feature (57)..(264): NCBI GI: 171692257 Blast Desc: protein product [Podospora anserina] gi|170946077|emb|CAP72878.1| protein product [Podospora anserina]
  misc_feature (1)..(265): NCBI GI: 189210150 Blast Desc: phospholipase/Carboxylesterase superfamily protein [Pyrenophora tritici-repentis Pt-1C-BFP] gi|187977500|gb|EDU44126.1| phospholipase/Carboxylesterase
  misc_feature (1)..(266): NCBI GI: 169780768 Blast Desc: [Aspergillus oryzae RIB40] gi|238505042|ref|XP_002383750.1| Phospholipase/Carboxylesterase superfamily [Aspergillus flavus NRRL3357] protein product oryzae]
  misc_feature (1)..(265): NCBI GI: 255955847 Blast Desc: Pc21g16760 [Penicillium chrysogenum Wisconsin 54-1255] gi|211590387|emb|CAP96573.1| Pc21g16760 [Penicillium chrysogenum Wisconsin 54-1255]
  misc_feature (1)..(266): NCBI GI: 67903670 Blast Desc: AN8822.2 [Aspergillus nidulans FGSC A4] gi|40740920|gb|EAA60110.1| AN8822.2 [Aspergillus nidulans FGSC A4] gi|259482967|tpe|CBF77945.1| TPA: superfamily AFUA_5G09340)
MRTRIPKPEDFAHLEPELKVSLVFPEVPEATTSILILFHGLGDAEASFASFAGSMDMNLPGVLAISVRGVSPLPPAMLGLPPSHSTASPTHFHWGDDLTLSPATGDLDPDPGFEKAQRLVLVDLIQKTLIAACGWTVNDITLFGFGQGGSLVLGLASRLRDTERVIDVSEGDLTSVRAFKGLVSIGGLLPTSMIPTHSAREKARTPALICHGRNSETLDDDAMETLEREFTDVREVKWKKPEDTMPKNREEMLPIMQFLAERLRAW

SEQ ID NO: 13662 - DNA, 1485 bp, Muscodor strobelii
  misc_feature: SGI cDNA ID NO. 564484
  misc_feature: Encodes the peptide sequence at SEQ ID NO 13663
atggcggactcgggtgatagctatcgtcctgtaagtcgtgaccgaagtcgctcgcctcgccgtcgatcaaagagtcccggtcgctcaggtcgtcgacgttcttactctccccgcagtcggtcaagaagccgagaagagtatcgtagtggtaggaacgacagacgttcttcacgttctcccatgactggcgctggagcacccacgggagggtcaggttcgggctcgggatttgggggcgcaccccagcgttcattcgaggagcgtgctgcagcgcgcgaaagcatgatgaacaatatccgagaatcttcgcaacaagaccgacgagtctacgtcggtaacctttcctacgacgtcaaatggcaccatctcaaggatttcatgcgacaggctggcgaggttctcttcgcggatgtcttgcaacttccgaatggaatgtcgaagggatgcggcattgtggaatatgctacaagggagcaagcgcaaacggctgtggccacactcagcaaccaaaatctgatgggacgacttgtctatgtacgcgaagatcgggaggccgaaccacgctttatcggatcgactggcggccgtggcggtggctttgccggcggcaatatacagagcggctatagcggtggtgctggagccggaggcggctatggcggtgggggtatgtctggtggcaaccgccagctctatatctccaaccttccctacaccgtgggatggcaagacctgaaggacttgttccgccaagcagctcgaaatggtgctgtaatccgagcggacgtccatctaggtcccgacggacgaccaaagggctctggtatcgtgatgttcgagtcttcagatgatgctcgtagtgctatccagcagttcaatggctttgaatggcagggacgcatgctcgaggtccgagaagaccgtttcgccaactcaggtggaggtggtgggtacggtggtcgtggcgggttcggcggcggccgtggaggttttggtgggtatggcggtcgaggaggctttggcggccgtggtgggtttggtggaggctacggtggtgggcgtggtggatatagtggaggtggtggaggcggcgggtacgatgccggcaacaccgccaacactgcttcagccgcccccaaccctttcaccgactacgccactgccggtaccgatccgggcgacataatctacgtacgcaatcttccgtggtcaactagcaatgaggaccttgtggagcttttcactacgatcggcaaggttgaacaggctgagatacagtacgagccaagtggacgatctcgtggcagtggtgttgttcgctttgacagccaaaccacggctgatacggcaattaccaagtttcaaggataccagtacggaggacgaccactgggtctcagctatgttaaatacgtcacacctggtggaggcgacagcatggatacagatacccacgggggtttgacgcaggaacagatgatgtaa

SEQ ID NO: 13663 - protein, 494 aa, Muscodor strobelii
  misc_feature: SGI Peptide ID NO. 564484
  misc_feature (396)..(466): Pfam Id: PF00076 Pfam Desc: RNA recognition motif. (a.k.a. RRM, RBD, or RNP domain)
  misc_feature (109)..(179): Pfam Id: PF00076 Pfam Desc: RNA recognition motif. (a.k.a. RRM, RBD, or RNP domain)
  misc_feature (231)..(304): Pfam Id: PF00076 Pfam Desc: RNA recognition motif. (a.k.a. RRM, RBD, or RNP domain)
  misc_feature (55)..(494): NCBI GI: 261361160 Blast Desc: RNP domain-containing protein [Verticillium albo-atrum VaMs.102]
  misc_feature (60)..(494): NCBI GI: 27803030 Blast Desc: protein product [Podospora anserina]
  misc_feature (52)..(494): NCBI GI: 225560818 Blast Desc: RNP domain-containing protein [Ajellomyces capsulatus G186AR]
  misc_feature (81)..(494): NCBI GI: 259481715 Blast Desc: TPA: RNP domain protein (AFU_orthologue; AFUA_6G12300) [Aspergillus nidulans FGSC A4]
  misc_feature (81)..(494): NCBI GI: 159124680 Blast Desc: RNP domain protein [Aspergillus fumigatus A1163]
  misc_feature (81)..(494): NCBI GI: 70992519 Blast Desc: RNP domain protein [Aspergillus fumigatus Af293] gi|66848741|gb|EAL89070.1| RNP domain protein [Aspergillus fumigatus Af293]
  misc_feature (76)..(494): NCBI GI: 164427086 Blast Desc: NCU02404 [Neurospora crassa OR74A] gi|157071601|gb|EAA30296.2| [Neurospora crassa OR74A]
  misc_feature (81)..(494): NCBI GI: 67526563 Blast Desc: AN3739.2 [Aspergillus nidulans FGSC A4] gi|40740757|gb|EAA59947.1| AN3739.2 [Aspergillus nidulans FGSC A4]
  misc_feature (129)..(494): NCBI GI: 121700040 Blast Desc: RNP domain protein [Aspergillus clavatus NRRL 1] gi|119396427|gb|EAW06859.1| RNP domain protein [Aspergillus clavatus NRRL 1]
  misc_feature (52)..(437): NCBI GI: 154278026 Blast Desc: [Ajellomyces capsulatus NAm1] gi|150413424|gb|EDN08807.1| [Ajellomyces capsulatus NAm1]
MADSGDSYRPVSRDRSRSPRRRSKSPGRSGRRRSYSPRSRSRSREEYRSGRNDRRSSRSPMTGAGAPTGGSGSGSGFGGAPQRSFEERAAARESMMNNIRESSQQDRRVYVGNLSYDVKWHHLKDFMRQAGEVLFADVLQLPNGMSKGCGIVEYATREQAQTAVATLSNQNLMGRLVYVREDREAEPRFIGSTGGRGGGFAGGNIQSGYSGGAGAGGGYGGGGMSGGNRQLYISNLPYTVGWQDLKDLFRQAARNGAVIRADVHLGPDGRPKGSGIVMFESSDDARSAIQQFNGFEWQGRMLEVREDRFANSGGGGGYGGRGGFGGGRGGFGGYGGRGGFGGRGGFGGGYGGGRGGYSGGGGGGGYDAGNTANTASAAPNPFTDYATAGTDPGDIIYVRNLPWSTSNEDLVELFTTIGKVEQAEIQYEPSGRSRGSGVVRFDSQTTADTAITKFQGYQYGGRPLGLSYVKYVTPGGGDSMDTDTHGGLTQEQMM

SEQ ID NO: 13664 - DNA, 2599 bp, Muscodor strobelii
  misc_feature: SGI EST ID NO. CUFF.32756.10
  misc_feature: Variant of the nucleotide sequence at SEQ ID NO 13662
cgacgcgcaacggccaaaagagcattctagacccatctctcaccggactgctcctgggataatttcccagaggtccgtggatcgccgccattgaacgcgcccggctcccgctgctctgtagctcaggtatccatccccttcgaccccagccgttgcgctatttcatgttgcgcgtcagcttgacacaacatctcgtcgcctacaaagaagaacacttccagccttgtctcgcagcgtctacctctgttcgttgttacctgacattgccgccactgctgacctggcacgacccattttgcatctcatttcctcgtcctcctcagttgtctccaatacctacatgatcactgtcatccttttctttctcgacatttgtacattgtcttaatccgtctccccaggtaccgattacacgacctgatcatcactattattggtgcctttgtcgaccgggccccgtactgtttgggaaaaagcaacgaaaaattttcattctcacgaaacgcagtagcaaagtaggacagaaaaaggtcctactccttcgtcaactttgcaaccatggcggactcgggtgatagctatcgtcctcgtgaccgaagtcgctcgcctcgccgtcgatcaaagagtcccggtcgctcaggtcgtcgacgttcttactctccccgcagtcggtcaagaagccgagaagagtatcgtagtggtaggaacgacagacgttcttcacgttctcccatgactggcgctggagcacccacgggagggtcaggttcgggctcgggatttgggggcgcaccccagcgttcattcgaggagcgtgctgcagcgcgcgaaagcatgatgaacaatatccgagaatcttcgcaacaagaccgacgagtctacgtcggtaacctttcctacgacgtcaaatggcaccatctcaaggatttcatgcgacaggctggcgaggttctcttcgcggatgtcttgcaacttccgaatggaatgtcgaaggtgggcttctatacgtgattcatggctggttttctttttggttctctctctcttggttcttgttgggattgatggattgacgggttgggccctttgtccgtggggtttgtagggatgcggcattgtggaatatgctacaagggagcaagcgcaaacggctgtggccacactcagcaaccaaaatctgatgggacgacttgtctatgtacgcgaagatcgggaggccgaaccacgctttatcggatcgactggcggccgtggcggtggctttgccggcggcaatatacagagcggctatagcggtggtgctggagccggaggcggctatggcggtgggggtatgtctggtggcaaccgccagctctatatctccaaccttccctacaccgtgggatggcaagacctgaaggacttgttccgccaagcagctcgaaatggtgctgtaatccgagcggacgtccatctaggtcccgacggacgaccaaagggctctggtatcgtgatgttcgagtcttcagatgatgctcgtagtgctatccagcagttcaatggctttgaatggcagggacgcatgctcgaggtccgagaagaccgtttcgccaactcaggtggaggtggtgggtacggtggtcgtggcgggttcggcggcggccgtggaggttttggtgggtatggcggtcgaggaggctttggcggccgtggtgggtttggtggaggctacggtggtgggcgtggtggatatagtggaggtggtggaggcggcgggtacgatgccggcaacaccgccaacactgcttcagccgcccccaaccctttcaccgactacgccactgccggtaccgatccgggcgacataatctacgtacgcaatcttccgtggtcaactagcaatgaggaccttgtggagcttttcactacgatcggcaaggttgaacaggctgagatacagtacgagccaagtggacgatctcgtggcagtggtgttgttcgctttgacagccaaaccacggctgatacggcaattaccaagtttcaaggataccagtacggaggacgaccactgggtctcagctatgttaaatacgtcacacctggtggaggcgacagcatggatacagatacccacgggggtttgacgcaggaacagatgatgtaaaacaagagtctcgactcacagctcacaacctggctccccactagcgtcggggccagttcttccttttaaaaaatggggtgcatattttcttcacgacctagtccactgtatttctctggctcccaaggtccgagccgattcggctagtctacttattgagtcatggcggctgttgacgctgtggtgaaaaatggatggcatggtattcacggttgtaaaaaggaggcaaagtggatgccacgagttagattgtatgtcgaatagcatctcctgtgccaaaacatccttccgtttcatgatcggggaacagaccatggtgcaaacaggactggccactgcattggcagcagtgaaggctgcagcaacattcatgagtgtttgatagataacgagaaagttgagcctgacaagagcaccgagccaagaccgggggtcggaccttgttgtagc

SEQ ID NO: 13665 - DNA, 1479 bp, Muscodor strobelii
  misc_feature: SGI cDNA ID NO. 564485
  misc_feature: Encodes the peptide sequence at SEQ ID NO 13666
atggcggactcgggtgatagctatcgtcctcgtgaccgaagtcgctcgcctcgccgtcgatcaaagagtcccggtcgctcaggtcgtcgacgttcttactctccccgcagtcggtcaagaagccgagaagagtatcgtagtggtaggaacgacagacgttcttcacgttctcccatgactggcgctggagcacccacgggagggtcaggttcgggctcgggatttgggggcgcaccccagcgttcattcgaggagcgtgctgcagcgcgcgaaagcatgatgaacaatatccgagaatcttcgcaacaagaccgacgagtctacgtcggtaacctttcctacgacgtcaaatggcaccatctcaaggatttcatgcgacaggctggcgaggttctcttcgcggatgtcttgcaacttccgaatggaatgtcgaagggatgcggcattgtggaatatgctacaagggagcaagcgcaaacggctgtggccacactcagcaaccaaaatctgatgggacgacttgtctatgtacgcgaagatcgggaggccgaaccacgctttatcggatcgactggcggccgtggcggtggctttgccggcggcaatatacagagcggctatagcggtggtgctggagccggaggcggctatggcggtgggggtatgtctggtggcaaccgccagctctatatctccaaccttccctacaccgtgggatggcaagacctgaaggacttgttccgccaagcagctcgaaatggtgctgtaatccgagcggacgtccatctaggtcccgacggacgaccaaagggctctggtatcgtgatgttcgagtcttcagatgatgctcgtagtgctatccagcagttcaatggctttgaatggcagggacgcatgctcgaggtccgagaagaccgtttcgccaactcaggtggaggtggtgggtacggtggtcgtggcgggttcggcggcggccgtggaggttttggtgggtatggcggtcgaggaggctttggcggccgtggtgggtttggtggaggctacggtggtgggcgtggtggatatagtggaggtggtggaggcggcgggtacgatgccggcaacaccgccaacactgcttcagccgcccccaaccctttcaccgactacgccactgccggtaccgatccgggcgacataatctacgtacgcaatcttccgtggtcaactagcaatgaggaccttgtggagcttttcactacgatcggcaaggttgaacaggctgagatacagtacgagccaagtggacgatctcgtggcagtggtgttgttcgctttgacagccaaaccacggctgatacggcaattaccaagtttcaaggataccagtacggaggacgaccactgggtctcagctatgttaaatacgtcacacctggtggaggcgacagcatggatacagatacccacgggggtttgacgcaggaacagatgatgtaa

SEQ ID NO: 13666 - protein, 492 aa, Muscodor strobelii
  misc_feature: SGI Peptide ID NO. 564485
  misc_feature (394)..(464): Pfam Id: PF00076 Pfam Desc: RNA recognition motif. (a.k.a. RRM, RBD, or RNP domain)
  misc_feature (107)..(177): Pfam Id: PF00076 Pfam Desc: RNA recognition motif. (a.k.a. RRM, RBD, or RNP domain)
  misc_feature (229)..(302): Pfam Id: PF00076 Pfam Desc: RNA recognition motif. (a.k.a. RRM, RBD, or RNP domain)
  misc_feature (53)..(492): NCBI GI: 261361160 Blast Desc: RNP domain-containing protein [Verticillium albo-atrum VaMs.102]
  misc_feature (58)..(492): NCBI GI: 27803030 Blast Desc: protein product [Podospora anserina]
  misc_feature (50)..(492): NCBI GI: 225560818 Blast Desc: RNP domain-containing protein [Ajellomyces capsulatus G186AR]
  misc_feature (79)..(492): NCBI GI: 259481715 Blast Desc: TPA: RNP domain protein (AFU_orthologue; AFUA_6G12300) [Aspergillus nidulans FGSC A4]
  misc_feature (79)..(492): NCBI GI: 159124680 Blast Desc: RNP domain protein [Aspergillus fumigatus A1163]
  misc_feature (79)..(492): NCBI GI: 70992519 Blast Desc: RNP domain protein [Aspergillus fumigatus Af293] gi|66848741|gb|EAL89070.1| RNP domain protein [Aspergillus fumigatus Af293]
  misc_feature (74)..(492): NCBI GI: 164427086 Blast Desc: NCU02404 [Neurospora crassa OR74A] gi|157071601|gb|EAA30296.2| [Neurospora crassa OR74A]
  misc_feature (79)..(492): NCBI GI: 67526563 Blast Desc: AN3739.2 [Aspergillus nidulans FGSC A4] gi|40740757|gb|EAA59947.1| AN3739.2 [Aspergillus nidulans FGSC A4]
  misc_feature (127)..(492): NCBI GI: 121700040 Blast Desc: RNP domain protein [Aspergillus clavatus NRRL 1] gi|119396427|gb|EAW06859.1| RNP domain protein [Aspergillus clavatus NRRL 1]
  misc_feature (50)..(435): NCBI GI: 154278026 Blast Desc: [Ajellomyces capsulatus NAm1] gi|150413424|gb|EDN08807.1| [Ajellomyces capsulatus NAm1]
MADSGDSYRPRDRSRSPRRRSKSPGRSGRRRSYSPRSRSRSREEYRSGRNDRRSSRSPMTGAGAPTGGSGSGSGFGGAPQRSFEERAAARESMMNNIRESSQQDRRVYVGNLSYDVKWHHLKDFMRQAGEVLFADVLQLPNGMSKGCGIVEYATREQAQTAVATLSNQNLMGRLVYVREDREAEPRFIGSTGGRGGGFAGGNIQSGYSGGAGAGGGYGGGGMSGGNRQLYISNLPYTVGWQDLKDLFRQAARNGAVIRADVHLGPDGRPKGSGIVMFESSDDARSAIQQFNGFEWQGRMLEVREDRFANSGGGGGYGGRGGFGGGRGGFGGYGGRGGFGGRGGFGGGYGGGRGGYSGGGGGGGYDAGNTANTASAAPNPFTDYATAGTDPGDIIYVRNLPWSTSNEDLVELFTTIGKVEQAEIQYEPSGRSRGSGVVRFDSQTTADTAITKFQGYQYGGRPLGLSYVKYVTPGGGDSMDTDTHGGLTQEQMM

SEQ ID NO: 13667 - DNA, 2599 bp, Muscodor strobelii; identical to SEQ ID NO: 13664
  misc_feature: SGI EST ID NO. CUFF.32756.10
  misc_feature: Variant of the nucleotide sequence at SEQ ID NO 13665

SEQ ID NO: 13668 - DNA, 384 bp, Muscodor strobelii
  misc_feature: SGI cDNA ID NO. 564486
  misc_feature: Encodes the peptide sequence at SEQ ID NO 13669
atgggcgtattgaccaacgacgagttcttcgccaggctcggccagctgttcgatgctcgcaagggcaaagaccacggccaggtcgtcctcgtccagaagagattgacctacgaccaggatgcctcatcctcgtcctcgtccgagcccctcgccgacctgcagcccacaaagcctctgcccgtcctgatccgcgccaccaacgccaagggcaaggccgaccgcaaggacaagatcaagctgagcaccgtcgtcgagcccgcctcgctgcccgccttcttcgaccgctacgccgagacgtgcaaggccggcatggcctcgctcaagccccgcgaccggagccggcggaaggccaaggccaagaagaagaagacgcccgccgcatga

SEQ ID NO: 13669 - protein, 127 aa, Muscodor strobelii
  misc_feature: SGI Peptide ID NO. 564486
  misc_feature (4)..(113): NCBI GI: 46136653 Blast Desc: FG09842.1 [Gibberella zeae PH-1]
  misc_feature (4)..(111): NCBI GI: 261361158 Blast Desc: conserved [Verticillium albo-atrum VaMs.102]
  misc_feature (1)..(111): NCBI GI: 39942984 Blast Desc: MGG_03572 [Magnaporthe grisea 70-15] gi|145009863|gb|EDJ94519.1| MGG_03572 [Magnaporthe grisea 70-15]
  misc_feature (3)..(112): NCBI GI: 116179602 Blast Desc: CHGG_00429 [Chaetomium globosum CBS 148.51] gi|88184726|gb|EAQ92194.1| CHGG_00429 [Chaetomium globosum CBS 148.51]
  misc_feature (4)..(123): NCBI GI: 189091840 Blast Desc: [Podospora anserina] gi|188219273|emb|CAP49253.1| protein product [Podospora anserina]
  misc_feature (4)..(107): NCBI GI: 189191510 Blast Desc: conserved [Pyrenophora tritici-repentis Pt-1C-BFP] gi|187973700|gb|EDU41199.1| conserved [Pyrenophora tritici-repentis Pt-1C-BFP]
  misc_feature (4)..(107): NCBI GI: 169599767 Blast Desc: SNOG_02709 [Phaeosphaeria nodorum SN15] gi|111068320|gb|EAT89440.1| SNOG_02709 [Phaeosphaeria nodorum SN15]
  misc_feature (9)..(123): NCBI GI: 27803031 Blast Desc: protein product [Podospora anserina]
  misc_feature (4)..(120): NCBI GI: 255944517 Blast Desc: Pc20g04850 [Penicillium chrysogenum Wisconsin 54-1255] gi|211587761|emb|CAP85814.1| Pc20g04850 [Penicillium chrysogenum Wisconsin 54-1255]
  misc_feature (4)..(113): NCBI GI: 225554915 Blast Desc: conserved [Ajellomyces capsulatus G186AR]
MGVLTNDEFFARLGQLFDARKGKDHGQVVLVQKRLTYDQDASSSSSSEPLADLQPTKPLPVLIRATNAKGKADRKDKIKLSTVVEPASLPAFFDRYAETCKAGMASLKPRDRSRRKAKAKKKKTPAA

SEQ ID NO: 13670 - DNA, 1786 bp, Muscodor strobelii
  misc_feature: SGI EST ID NO. CUFF.32878.1
  misc_feature: Variant of the nucleotide sequence at SEQ ID NO 13668
taggtagtacgattagatggtctacctaaggtagtccagcatgtgcagaccccgcggcgcccaaaaagaggttgcaacttgaacttaactgccttccgtcttcatcgacacatggcagcgacgtcttgacggatttccaagcaccgcactgctaccaggcgacccaagcgacacttaggtagctaacgcctgtgggctcgtccgcgccgctactcgccacttgccacttgccatgggcgtattgaccaacgacgagttcttcgccaggctcggccagctgttcgatgctcgcaagggcaaagaccacggccaggtcgtcctcgtccagaagagatgtaatcgtccatcccgaccgccggtgccgctgccacgactgactttgccatcgcaccagtgacctacgaccaggatgcctcatcctcgtcctcgtccgagcccctcgccgacctgcagcccacaaagcctctgcccgtcctgatccgcgccaccaacgccaagggcaaggccgaccgcaaggacaagatcaagctgagcaccgtcgtcgagcccgcctcgctgcccgccttcttcgaccgctacgccgagacgtgcaaggccggcatggcctcgctcaagccccgcgaccggagccggcggaaggccaaggccaagaagaagaagacgcccgccgcatgaccccgctgcccacatcctacaccccgtacctttgtgcgtcttgtgcagggggcgagaggcatgaatcgcggctattgggcttttggatgcctttggatgctctcgtccttgttctgtcgccgcggggagcatgcgctcgatgtgtcggcctcatgacactcagtttccaggtgtgctgcctgtgtgtgctcggacgcggcgacaggcaagattcatcacgcctggcaccctccaccctccatcatgccccatctatccagacatagacgtagcccctaccaggagcaaatcacttgtaagctggaggagttgccgtttccggacaatatatataggcagctcaggggcatggagatgaccaagatactaaagaacaagaatcaatggaccacgtccagccaccaactacttcactgctcccgacgtgatttgccgctgctgtgtatgatcctctcctaaaatacagagtagcaacatccatttacagaccatcctcaacacctagatcccttgccacattcctcccatcttgcttctcctcttcttcctcttcctcttcctcctcctctcgtctctccctggcatcgcggcacttctcacactcgctcttgaccggtcgtcgcagactccccacgatcatgcacagcgacttgggacagacaacgtccggatcggggctctcacagctcgccagcttcttgtgcgccgtccacacgtgcttgcagctgatgcatttctgaggatgcagctcgcacattttgcgccttctttctcccgcccaagcctgctcccgactcaccagctggcccacgctccctcgtgccctttctgcactttgtctcgtcctcctgtcctggcgatgctccttcccctcgacgtgtatggagcctgcgacgctgaggactatcaggtgttgcgtgtggcccctcgtgattggagatggatagacgattccgagagcaaagatggtgttcccgatagttgagtaaagcgcaggaacaagtcgacgtgatagtctcgcacctcagggcgtattctagagtccgggcggcaatgtgtagctctctgtacaggtaactgaaagactattctgatgcgttatgactcttgc

SEQ ID NO: 13671 - DNA, 2583 bp, Muscodor strobelii
  misc_feature: SGI cDNA ID NO. 564487
  misc_feature: Encodes the peptide sequence at SEQ ID NO 13672
atggggccaaatcaaaagaggaagcttgcactgccctcaaatcttctgcgcgagctcgatcaggccagccagtccgctgcgggcgctcgcttgcacgctcgtggcaaacctccgccctcgaggagagaccagaggagacaactgcgcgtccagaaacgccacgccaggagctcacagcttcgtcgcactgccaaacctgtgcagaggaacagcagcttgcgcgccgaacgcagagcaccccatgtcgccagacatatagccggcgaagagagcgaggatcatgaagaccagcaggaggatgaagttggggtagaagaaggagacagcgacgaagatgcgaatcaggctctggatgaggatgagggtcatggtcatggtcctggtgatagttatgatgatgatgacagtgacgaatctgacgatgacgagccaggcgagaccagccgctcaagcatgtccaagtcggaacagatcaagttggcccgagaggacaaggaaattgccgacttagagaagaaattgggactaaaaggcaaaaggaaactgccgacatccttcgacgaagatggtctcggtgatctactggaaggcctcgaccagggcgacggtgaccgaaaggacacaccgcacttgtcgaagagtaagaggaaagccgaagccgacgagtggctagctcagaagcgtcgcaaagccgaagctgctgctgccacccgcactgtcgctgcgagccttggcagccccatgggcagcgaggacgccgatgtcagcacgagcgatgatgacgattctggtagccatgatgaccaggacagcatcggcgactttggtggattttcggaccaggaagatgacgagattggtggacgtgagaaaatacaatcagagccaatccgaccccaacgcgagaacccatacgttgctccatccaccaatgttgccaagtacctgcctccgtctctccggcaacaatctggccaggacagccaggcggcgctccagctacagaggcatatccagggcctgatcaatcggctcaccaacgacaacatgacgggtatcctcaaggatgtcaccactttgtacaacacaagccccagacaggctgtcacttcgaccttagtcgacctgctcctggccctgacatgttctcctgagaaacgaccggactccttcttcgtcatgattgccggctttgttgctgctatccacaagactatgggcatcgctgtgagtgcccattttctgcagcaacttgtggacgcgctggagaaacgctcagtggatgcttcggcagatcactcggacgctgcgtctaaccatctagtcgcattacttgccgagctgtacaacatgcaggtcattggatgcaatctcatatttgactacgtccgactatttctagacacattgtcggaactcaacacggagcttctgctgagaatcatccagctgagtgggccgactctccgacgcgatgattcccgcgccctggcggatatcgtggctcggtcccaaaagaaaatcgcacaggttaaagaagcttcggtcagaaccaagttcatgatagacgagatgaagaaacttcagagcaataaagccaaagcattggcacgcaacagagagcttgctgagcaacggacgcagatacgcaagcggattggcaccatcacgggcaggcacgatgtaaatgtccaaccactccgcgtgggtctgcgcgatatgcaagactcggaaacgcgaggtaaatggtggctcatcggggcaagctggtccggaaaccagatcaagccgctccccaaccacaacggatcaagtaatgaagacagtgatgaagatatgaaagatgtggcagtgcgggacgatctaggcatacccgatctatggcagctagcgcgagaacagggtttcaacaccgaggttcgacagcgcatctttgtggctctccacgcggcgacggactgcgcgcacgcagagatgctcgttcataagcttagactaaacaagcaccaacggaaagagatctcggaagtgatcgtccgaagcggagagcggcagacggtgtacaacccctactacgccttagtagctgctagattcagcgtagacaaagagacgaggtttcagtttcgccgatgtctgacgatgcgattcaaaaaaatgggcgaagaagtcgacacgggcgacggagacgacatggaggccgacgagaccgccgacgagggactgagatggctgtacaactcggccaagctattcggaagcctggtggcgtggaagtcgctcaagctcatagatgtgttcaagtaccggaacctggcggctctgcaggagggagcacatgtcttcaccgaggtactcctcatcacggtactacaagagtgcagaggtgacaagctgaaagaggtgttcgggggcttggatgccgatatggacgtcgggcgagggatacagtactttttggatcgacacgtcaggcgaacagagctggtggacgacaagaaagagaggaagaaggtaatgagacgcagtgtggttgtgcttgcactgctggagtcgacgctggcgaccagagctgtcgaatga

SEQ ID NO: 13672 - protein, 860 aa, Muscodor strobelii
  misc_feature: SGI Peptide ID NO. 564487
  misc_feature (335)..(532): Pfam Id: PF02854 Pfam Desc: MIF4G domain
  misc_feature (1)..(837): NCBI GI: 116179600 Blast Desc: CHGG_00428 [Chaetomium globosum CBS 148.51] gi|88184725|gb|EAQ92193.1| CHGG_00428 [Chaetomium globosum CBS 148.51]
  misc_feature (10)..(842): NCBI GI: 145616102 Blast Desc: MGG_13527 [Magnaporthe grisea 70-15] gi|145009864|gb|EDJ94520.1| MGG_13527 [Magnaporthe grisea 70-15]
  misc_feature (148)..(829): NCBI GI: 85092764 Blast Desc: NCU02406 [Neurospora crassa OR74A] gi|28920973|gb|EAA30298.1| conserved [Neurospora crassa OR74A]
  misc_feature (11)..(860): NCBI GI: 154270660 Blast Desc: conserved [Ajellomyces capsulatus NAm1] gi|150409758|gb|EDN05198.1| conserved [Ajellomyces capsulatus NAm1]
  misc_feature (1)..(839): NCBI GI: 156042420 Blast Desc: SS1G_11007 [Sclerotinia sclerotiorum 1980] gi|154695394|gb|EDN95132.1| SS1G_11007 [Sclerotinia sclerotiorum 1980]
  misc_feature (11)..(860): NCBI GI: 240274292 Blast Desc: nuclear protein [Ajellomyces capsulatus H143]
  misc_feature (152)..(855): NCBI GI: 189091842 Blast Desc: [Podospora anserina] gi|27803032|emb|CAD60735.1| protein product [Podospora anserina] gi|188219274|emb|CAP49254.1| protein product [Podospora anserina]
  misc_feature (104)..(837): NCBI GI: 119191085 Blast Desc: CIMG_05590 [Coccidioides immitis RS]
  misc_feature (111)..(837): NCBI GI: 240107427 Blast Desc: MIF4G domain containing protein [Coccidioides posadasii C735 delta SOWgp]
  misc_feature (11)..(860): NCBI GI: 189191512 Blast Desc: conserved [Pyrenophora tritici-repentis Pt-1C-BFP] gi|187973701|gb|EDU41200.1| conserved [Pyrenophora tritici-repentis Pt-1C-BFP]
MGPNQKRKLALPSNLLRELDQASQSAAGARLHARGKPPPSRRDQRRQLRVQKRHARSSQLRRTAKPVQRNSSLRAERRAPHVARHIAGEESEDHEDQQEDEVGVEEGDSDEDANQALDEDEGHGHGPGDSYDDDDSDESDDDEPGETSRSSMSKSEQIKLAREDKEIADLEKKLGLKGKRKLPTSFDEDGLGDLLEGLDQGDGDRKDTPHLSKSKRKAEADEWLAQKRRKAEAAAATRTVAASLGSPMGSEDADVSTSDDDDSGSHDDQDSIGDFGGFSDQEDDEIGGREKIQSEPIRPQRENPYVAPSTNVAKYLPPSLRQQSGQDSQAALQLQRHIQGLINRLTNDNMTGILKDVTTLYNTSPRQAVTSTLVDLLLALTCSPEKRPDSFFVMIAGFVAAIHKTMGIAVSAHFLQQLVDALEKRSVDASADHSDAASNHLVALLAELYNMQVIGCNLIFDYVRLFLDTLSELNTELLLRIIQLSGPTLRRDDSRALADIVARSQKKIAQVKEASVRTKFMIDEMKKLQSNKAKALARNRELAEQRTQIRKRIGTITGRHDVNVQPLRVGLRDMQDSETRGKWWLIGASWSGNQIKPLPNHNGSSNEDSDEDMKDVAVRDDLGIPDLWQLAREQGFNTEVRQRIFVALHAATDCAHAEMLVHKLRLNKHQRKEISEVIVRSGERQTVYNPYYALVAARFSVDKETRFQFRRCLTMRFKKMGEEVDTGDGDDMEADETADEGLRWLYNSAKLFGSLVAWKSLKLIDVFKYRNLAALQEGAHVFTEVLLITVLQECRGDKLKEVFGGLDADMDVGRGIQYFLDRHVRRTELVDDKKERKKVMRRSVVVLALLESTLATRAVE

SEQ ID NO: 13673 - DNA, 3218 bp, Muscodor strobelii
  misc_feature: SGI EST ID NO. CUFF.32687.0
  misc_feature: Variant of the nucleotide sequence at SEQ ID NO 13671
agctttacataaaagaattcaacattgaagaaatccctgtgcaatggtcacaagctgagagagagagagagacaacacgccttgcccagaaacaacaggcatggggccaaatcaaaagaggaagcttgcactgccctcaaatcttctgcgcgagctcgatcaggccagccagtccgctgcgggcgctcgcttgcacgctcgtggcaaacctccgccctcgaggagagaccagaggagacaactgcgcgtccagaaacgccacgccaggagctcacagcttcgtcgcactgccaaacctgtgcagaggaacagcagcttgcgcgccgaacgcagagcaccccatgtcgccagacatatagccggcgaagagagcgaggatcatgaagaccagcaggaggatgaagttggggtagaagaaggagacagcgacgaagatgcgaatcaggctctggatgaggatgagggtcatggtcatggtcctggtgatagttatgatgatgatgacagtgacgaatctgacgatgacgagccaggcgagaccagccgctcaagcatgtccaagtcggaacagatcaagttggcccgagaggacaaggaaattgccgacttagagaagaaattgggactaaaaggcaaaaggaaactgccgacatccttcgacgaagatggtctcggtgatctactggaaggcctcgaccagggcgacggtgaccgaaaggacacaccgcacttgtcgaagagtaagaggaaagccgaagccgacgagtggctagctcagaagcgtcgcaaagccgaagctgctgctgccacccgcactgtcgctgcgagccttggcagccccatgggcagcgaggacgccgatgtcagcacgagcgatgatgacgattctggtagccatgatgaccaggacagcatcggcgactttggtggattttcggaccaggaagatgacgagattggtggacgtgagaaaatacaatcagagccaatccgaccccaacgcgagaacccatacgttgctccatccaccaatgttgccaagtacctgcctccgtctctccggcaacaatctggccaggacagccaggcggcgctccagctacagaggcatatccagggcctgatcaatcggctcaccaacgacaacatgacgggtatcctcaaggatgtcaccactttgtacaacacaagccccagacaggctgtcacttcgaccttagtcgacctgctcctggccctgacatgttctcctgagaaacgaccggactccttcttcgtcatgattgccggctttgttgctgctatccacaagactatgggcatcgctgtgagtgcccattttctgcagcaacttgtggacgcgctggagaaacgctcagtggatgcttcggcagatcactcggacgctgcgtctaaccatctagtcgcattacttgccgagctgtacaacatgcaggtcattggatgcaatctcatatttgactacgtccgactatttctagacacattgtcggaactcaacacggagcttctgctgagaatcatccagctgagtgggccgactctccgacgcgatgattcccgcgccctggcggatatcgtggctcggtcccaaaagaaaatcgcacaggttaaagaagcttcggtcagaaccaagttcatgatagacgagatgaagaaacttcagagcaataaagccaaagcattggcacgcaacagagagcttgctgagcaacggacgcagatacgcaagcggattggcaccatcacgggcaggcacgatgtaaatgtccaaccactccgcgtgggtctgcgcgatatgcaagactcggaaacgcgaggtaaatggtggctcatcggggcaagctggtccggaaaccagatcaagccgctccccaaccacaacggatcaagtaatgaagacagtgatgaagatatgaaagatgtggcagtgcgggacgatctaggcatacccgatctatggcagctagcgcgagaacagggtttcaacaccgaggttcgacagcgcatctttgtggctctccacgcggcgacggactgcgcgcacgcagagatgctcgttcataagcttagactaaacaagcaccaacggaaagagatctcggaagtgatcgtccgaagcggagagcggcagacggtgtacaacccctactacgccttagtagctgctagattcagcgtagacaaagagacgaggtttcagtttcgccgatgtctgacgatgcgattcaaaaaaatgggcgaagaagtcgacacgggcgacggagacgacatggaggccgacgagaccgccgacgagggactgagatggctgtacaactcggccaagctattcggaagcctggtggcgtggaagtcgctcaagctcatagatgtgttcaagtaccggaacctggcggctctgcaggagggagcacatgtcttcaccgaggtactcctcatcacggtactacaagagtgcagaggtgacaagctgaaagaggtgttcgggggcttggatgccgatatggacgtcgggcgagggatacagtactttttggatcgacacgtcaggcgaacagagctggtggacgacaagaaagagaggaagaaggtaatgagacgcagtgtggttgtgcttgcactgctggagtcgacgctggcgaccagagctgtcgaatgagcagatgcgcgttgaacatacggcttagcatatccagtacattcatacacactaagcgaaaaccaagagttcgccatgatgtcgccgttttattaggcctatatacaccatgatcatgtcacgatatgggaacagaatcagcatcagcataaggaagcacctagatgttggatgggtcccacgaggatcggtatcgggttgaatagaccggccaccacagcagggttgagaagttgataggggtctaacaagatcctccaaaaggccgtttctcgtcgatatagcgccctgaccatgcctacatgttttgagccgagtacgtgcgcgctatcatgcgctggggttgatatgggtttccatcttatgccactacgccaggaaaggggggccaaaataggagtgtaaaccgaccatgacggactagtagtgtagttgaatctgtacagtatggaatcgagcagagattgacgaatattggcgagactcggactcctgtcgtatatcatgtgatcagtgcgtttatatgctgagtaag

SEQ ID NO: 13674 - DNA, 1521 bp, Muscodor strobelii
  misc_feature: SGI cDNA ID NO. 564488
  misc_feature: Reduced expression when VOC is produced
  misc_feature: Encodes the peptide sequence at SEQ ID NO 13675
atgctgtccagccgtttaataccgcggaccgccgtccgatgctcctcgcggcctcacagcttgcccacagtcgtctctcccgtcacacgctggagaaggggctacgccagcgcctcagatgagaaggacctggtcatcatcggcggcggcgttgccggatacgtcgcggcgatcaaggccggccaggagggcctgaaggtcgcgtgcatcgagaagcgcggcgccctcggcggcacctgcctcaacgtcggctgcatcccctccaagtcgctgctgaacaactcgcacctgtaccaccagatccagcacgactccaagagccgcggcatcgacgtcggcgacgtcaagctcaacctgcaggccatgatgaaggccaaggacgcctccgtctccggcctgaccaagggcatcgagttcctctttaagaagaacggcgtcgagtacatcaagggcaccggctccttcgcctccgagaacgaggtcaaggtcgccctcaacgacggcggcgaggcctccgtccgcgccaagaacttcctcatcgccaccggctccgagtccacccccttccccagcctcgagttcgacgagaagcgcgtcatcacctccaccggcgccctctccctcgacaaggtccccgccaagatgatcgtcatcggcggcggcatcatcgggctcgagatgggctccgtctggtcccgcctcggcgccaaggtcaccgtcgtcgagttcctcgaccagatcggcgggcccggcatggacaccgagatcgccaagcaggccctcaagaccctcaagaagcagggcatcgacttcaagctcggcaccaaggtcgtcagcggcgacaagagcggcgacaccgtcaagctcgaggtcgacgcggctaagggcggcaagcccgagacgctcgatgccgatgttgttctcgtggccatcggccgtcgtccctacactgccggtctcggtctcgagaacatcggcctggaggtggatgagcgtggtcgcgtcgtcatcgactccgagtaccgcaccaaggcttctcacattcgctgcatcggtgatgtcaccttcggccccatgttggcacacaaggccgaggaggaggccgtggccgccatcgaatatatcaagaagggttacggacacgtcaactacggcgtcatcccctccgtcatgtacacccaccccgaggttgcctgggttggccagagcgagcaggatctgaagaaggccaacattccctacaaggtcggcaccttccccttcagcgctaactcgcgtgccaagacgaatcaggactccgagggtatggtcaagctgttggcggacccggagacggacaggctgttgggtgcccacatcatcggtcccaacgccggcgagatgattgccgaggccacgttggcgctggagtatggtgcctcgactgaggacattgcccgcacctgccacgctcaccccacgctcgccgaggccttcaaagaggcggcgatggctacttactccaaggctatccacttttag

SEQ ID NO: 13675 - protein, 506 aa, Muscodor strobelii
  misc_feature: SGI Peptide ID NO. 564488
  misc_feature (43)..(465): Pfam Id: PF01266 Pfam Desc: FAD dependent oxidoreductase
  misc_feature (43)..(368): Pfam Id: PF01134 Pfam Desc: Glucose inhibited division protein A
  misc_feature (214)..(312): Pfam Id: PF00070 Pfam Desc: Pyridine nucleotide-disulphide oxidoreductase
  misc_feature (43)..(359): Pfam Id: PF07992 Pfam Desc: Pyridine nucleotide-disulphide oxidoreductase
  misc_feature (387)..(496): Pfam Id: PF02852 Pfam Desc: Pyridine nucleotide-disulphide oxidoreductase, dimerisation domain
  misc_feature (43)..(79): Pfam Id: PF00890 Pfam Desc: FAD binding domain
  misc_feature (1)..(506): NCBI GI: 164427090 Blast Desc: dihydrolipoyl dehydrogenase, mitochondrial precursor [Neurospora crassa OR74A] gi|157071603|gb|EAA30299.2| dihydrolipoyl dehydrogenase, mitochondrial precursor [Neurospora
  misc_feature (1)..(506): NCBI GI: 261361155 Blast Desc: dihydrolipoyl dehydrogenase [Verticillium albo-atrum VaMs.102]
  misc_feature (1)..(506): NCBI GI: 145616104 Blast Desc: conserved [Magnaporthe grisea 70-15] gi|145009865|gb|EDJ94521.1| conserved [Magnaporthe grisea 70-15]
  misc_feature (1)..(506): NCBI GI: 189091844 Blast Desc: [Podospora anserina] gi|188219275|emb|CAP49255.1| protein product [Podospora anserina]
  misc_feature (1)..(506): NCBI GI: 156042422 Blast Desc: SS1G_11008 [Sclerotinia sclerotiorum 1980] gi|154695395|gb|EDN95133.1| SS1G_11008 [Sclerotinia sclerotiorum 1980]
  misc_feature (39)..(506): NCBI GI: 256732873 Blast Desc: [Nectria haematococca mpVI 77-13-4]
  misc_feature (1)..(506): NCBI GI: 116179598 Blast Desc: conserved [Chaetomium globosum CBS 148.51] gi|88184724|gb|EAQ92192.1| conserved [Chaetomium globosum CBS 148.51]
  misc_feature (5)..(506): NCBI GI: 46136657 Blast Desc: FG09844.1 [Gibberella zeae PH-1]
  misc_feature (1)..(506): NCBI GI: 27803033 Blast Desc: protein product [Podospora anserina]
  misc_feature (1)..(506): NCBI GI: 154300374 Blast Desc: dihydrolipoyl dehydrogenase, mitochondrial precursor [Botryotinia fuckeliana B05.10] gi|150856699|gb|EDN31891.1| dihydrolipoyl dehydrogenase, mitochondrial precursor [Botryotinia
  misc_feature (1)..(506): SWISSPROT Homolog: EC 1.8.1.4 Dihydrolipoyl dehydrogenase
  misc_feature: Useful for introducing or modulating the production of volatile compounds
MLSSRLIPRTAVRCSSRPHSLPTVVSPVTRWRRGYASASDEKDLVIIGGGVAGYVAAIKAGQEGLKVACIEKRGALGGTCLNVGCIPSKSLLNNSHLYHQIQHDSKSRGIDVGDVKLNLQAMMKAKDASVSGLTKGIEFLFKKNGVEYIKGTGSFASENEVKVALNDGGEASVRAKNFLIATGSESTPFPSLEFDEKRVITSTGALSLDKVPAKMIVIGGGIIGLEMGSVWSRLGAKVTVVEFLDQIGGPGMDTEIAKQALKTLKKQGIDFKLGTKVVSGDKSGDTVKLEVDAAKGGKPETLDADVVLVAIGRRPYTAGLGLENIGLEVDERGRVVIDSEYRTKASHIRCIGDVTFGPMLAHKAEEEAVAAIEYIKKGYGHVNYGVIPSVMYTHPEVAWVGQSEQDLKKANIPYKVGTFPFSANSRAKTNQDSEGMVKLLADPETDRLLGAHIIGPNAGEMIAEATLALEYGASTEDIARTCHAHPTLAEAFKEAAMATYSKAIHF

SEQ ID NO: 13676 - DNA, 2500 bp, Muscodor strobelii
  misc_feature: SGI EST ID NO. CUFF.33152.2
  misc_feature: Variant of the nucleotide sequence at SEQ ID NO 13674
tgacaatccccccatagaagagcttggtgcagccaatggcaggggctccagcagcatctacccagcagtccagcagtgttggggccgttgcagggggcgatcaacgatgttattagcacgcccaaaatttcccaactcgcatcgacgaccgaccatcaacggcaaacccccaacaggccacgacacatcacattgcatcgtccgccagcgatacgacagaggcctggcatcctgactctaccccgacctctgctctgctctgctctgcgccgagcccatcctctagcgccacacccacacccgcatccgcatccgcagccatgctgtccagccgtttaataccgcggaccgccgtccgatgctcctcgcggcctcacagcttgcccacagtcgtctctcccgtcacacgctggagaaggggctacgccagcgcctcagatgagaaggacctggtcatcatcggcggcggcgttgccggatacgtcgcggcgatcaaggccggccaggagggcctgaaggtcgcgtgcatcgagaagcgcggcgccctcggcggcacctgcctcaacgtcggctgcatcccctccaagtcgctgctgaacaactcgcacctgtaccaccagatccagcacgactccaagagccgcggcatcgacgtcggcgacgtcaagctcaacctgcaggccatgatgaaggccaaggacgcctccgtctccggcctgaccaagggcatcgagttcctctttaagaagaacggcgtcgagtacatcaagggcaccggctccttcgcctccgagaacgaggtcaaggtcgccctcaacgacggcggcgaggcctccgtccgcgccaagaacttcctcatcgccaccggctccgagtccacccccttccccagcctcgagttcgacgagaagcgcgtcatcacctccaccggcgccctctccctcgacaaggtccccgccaagatgatcgtcatcggcggcggcatcatcgggctcgagatgggctccgtctggtcccgcctcggcgccaaggtcaccgtcgtcgagttcctcgaccagatcggcgggcccggcatggacaccgagatcgccaagcaggccctcaagaccctcaagaagcagggcatcgacttcaagctcggcaccaaggtcgtcagcggcgacaagagcggcgacaccgtcaagctcgaggtcgacgcggctaagggcggcaagcccgagacgctcgatgccgatgttgttctcgtggccatcggccgtcgtccctacactgccggtctcggtctcgagaacatcggcctggaggtggatgagcgtggtcgcgtcgtcatcgactccgagtaccgcaccaaggcttctcacattcgctgcatcggtgatgtcaccttcggccccatgttggcacacaaggccgaggaggaggccgtggccgccatcgaatatatcaagaagggttacggacacgtcaactacggcgtcatcccctccgtcatgtacacccaccccgaggttgcctgggttggccagagcgagcaggatctgaagaaggccaacattccctacaaggtcggcaccttccccttcagcgctaactcgcgtgccaagacgaatcaggactccgagggtatggtcaagctgttggcggacccggagacggacaggctgttgggtgcccacatcatcggtcccaacgccggcgagatgattgccgaggccacgttggcgctggagtatggtgcctcgactgaggacattgcccgcacctgccacgctcaccccacgctcgccgaggccttcaaagaggcggcgatggctacttactccaaggctatccacttttagaacccccccttcctttgtacatatatatcagataaatagagcccgaacggcgggcaacggcaggcacgggagatgtcaaggttagcatcggtgtcaaggtgtacattatatgacaatagcaacggaacgagagacacttgaatcgagatctggcatccgtaacgtacagtgactgcggagcatgaccccgttgtgtccactatggccactatagacctacagatgttgtgatagcagacgaatgaaatcctatcacgatacccagcaagcgtcctcaacaactctgcagttccgaatgctgatgagctactactagctattagatgaacatagtgaactttcatcgacgatttttgtaccggtgtggattgtggtctggacgaagataagcgcaagcagcgttgtgcttgcagatcttttgtgtgagattttgcaacggaactcagatggtcgtatcttcttcgacttccctagttacgctccgagaaaacagtatctagtaacgatgatgttcgttctgcacattcctgtttctgcgtcatggattttcctgtcggttcatatccagcgggtgaaacgtacacagccatcacgggcttctcgttctttgctgggtatctcgtcttccgtcccatgggagagaaagaaatcaaaacgca

SEQ ID NO: 13677 - DNA, 3138 bp, Muscodor strobelii
  misc_feature: SGI cDNA ID NO. 564489
  misc_feature: Encodes the peptide sequence at SEQ ID NO 13678
atgggatacgtccgcgccgttgcgggtaaccgcctgatcccaaatgtcgtcgacgaggccgctcgcgatactcccgatcgtattgtgtacactatcccgcatttaacagataacggcgacagcttcgaggatatcacagctttacgcttcgccaatgccgtgaatagagcatgccgctggctcgagggtgttctcggccggggcaagaatttcgaggccataggttacatcggcccccacaacctcacctacccaatcctggttctcgcctgtattaaaaccggttacaaagctctcctcgtgtcgccaaggaatagtatagaaggcagtttggccgtcgtcgataagacagactgccggatctgggccaagtccaccgaaaacaatgaacttgtcaaccagatcctcgacaagaggccgatggagatattgcagacacctacacttgaagagctgctcgatcctcgacctgtagccaaatacccctacaccaagacctgggagcaggctaacctagaccctctcgctgtgcttcacacctcaggatccactggtcttcccaagccaatcatcatgcgtctcggcacaatcgccagtggtgacgctatcagggagatagcccttgaggatggcgaggagatcaccccttcgtgggccgcctctgatctcgtcttcaaccccttcccctggttccacgctgccagtctcatggtcaagctcgggttgaacttctggcttggttccacggtggtcaccgaacctacgaacggagttatcagcgccgatactatcgatcgtatcatttcgaatgtccctgtcaaagcgttcttcattcctccatccaccgtcgaagagctggccaagacacccaagactctcgaaaaactcagtgcctgcaaatacatcatcactggtggaggctctctgtcgtctcagcttggtgacattgtcaacaaggtcgtagcagtgcgcaatgtctacggatcaactgaaggtggtatctgggccatggtttcaccacaaaagggcaaggactggagaacattcaagtttcctccagagttagggactgacctgcgcgaggttacaccgggcttatatgagctgtttttcgtcaagaaaccagagtacaagcgctggcagggtctgttctatactttcccagaagacgaggagtactcgaccaaagatctgttcgcaccacaccctacggaacctggccgttggctttgtgtcggtcgtgcagacgatgtcgttgtcctctccaacggtgagaaggttcaacctgtcgatatcgaggcttgtattgcctcgcaccctgaggtgcaatccgctctggttgttggcaaccggaggttccacccagccgtgctcttggaacttcgcggtgctcctcccaccaatgagatcgttctagagcagttattggataaaatctatgctgaggtggtcgaaaaggccaatgctgcatcgccctcgcacgctcgcattttccgctccaacatgatgcttactgtcccaggaaagccattcttgcgaacagataagggaaccgttaagcgtccaggtatgctcaggtcttacgagaaggagatcgatgagttctacgagaagctcgaggccgaggaggccaaggccttgacctcagacatggacatctcatctcctagcacgattgctgatggactgcgcggaatcatcaacgtgctccttaagaaggaactcactgatgacgacaacttgttcgctgcaggtttcgattccctacttgtattccagatcctcggcgctcttcgaaaagccgcagccgagggagccaaggtcgaagtcacacttgcgcctaccttgatctacggtaacccgaccctagagaagctctccaacgccttctacgatgcgatccaccccgatggcgacgcaccatatgatgcttcggccgctacattccagcttgccgaggacatcgttgccaaatacactcgggatctaccaacagacggcgagagcgtgatcgtcactggtaccaccggttcattgggtacctatcttctcaactcgctaattaagaatgagagtgtcaaacggatctactgcttcaaccgatcgtccgatgctgaagaaaggaaccgtgctggcttcaagactaagggcctgacggaagtttggccagctaagaaagtacagtttctcaatgctgacctgtcaaagcccgactttggtctcggtcagggcaagtacgacgttctcctcaagggcgtcaccaagatcatccataaccagtggcctgtgaatttcaattgggatctgtcctcgttcgagcctcacatccgaggtgtgcgtcacctcgtcgacttcgccaagaagagccgacaaggcactgccatcttctacatctcatccatcggtagcatcaccaagtgggctgacgattctcctgtgccggaacagcctatccatgatctcactgttgcaggtacacagggttacagtttgtccaagttgatggctgaaatggtactcgagcaagctgtcaaggtttctggtgtcgatgcctctgtttgccgtgttggtcagatcgctggccccgtcacgacaggtgagaagggcgagtggaacaagcaagagtggtttcctaccatcctggagacgtccaagtatcttaagctcctcccttcgaatctgggcacgcttgatcgcatcgaatgggtgcccgttgacctcctcgctgagatgatctctgagtttgccggcatcggcgctaaaaagggacaaaatgacgaagtcgacgaggatgagctcaaggtgtaccacgctgtgaaccctaagcttggctattggcaggtcattgctcccaccattctcaagtctatgccggctggtacgcgctcggttccttgggctgaatgggtacaagctctcaaggacgcccaacgaacggctacgtctgcaaccgctcgtgaactcactggtcttaagttgctcgacttttacgagtcgctcatcatgcccgaggatgtgaagtacacacccttcaacctcgagactggtgtttctatgcgcaaaagtcagaccatgaagagactccctccggtcacgaacgagtgggttgaactctggcttaagcagtggaatttctag

SEQ ID NO: 13678 - protein, 1045 aa, Muscodor strobelii
  misc_feature: SGI Peptide ID NO. 564489
  misc_feature (46)..(447): Pfam Id: PF00501 Pfam Desc: AMP-binding enzyme
  misc_feature (672)..(912): Pfam Id: PF07993 Pfam Desc: Male sterility protein
  misc_feature (74)..(340): Pfam Id: PF00501 Pfam Desc: AMP-binding enzyme
  misc_feature (404)..(447): Pfam Id: PF00501 Pfam Desc: AMP-binding enzyme
  misc_feature (561)..(630): Pfam Id: PF00550 Pfam Desc: Phosphopantetheine attachment site
  misc_feature (9)..(1045): NCBI GI: 240111808 Blast Desc: conserved [Coccidioides posadasii C735 delta SOWgp]
  misc_feature (9)..(1045): NCBI GI: 119173348 Blast Desc: L-aminoadipate-semialdehyde dehydrogenase [Coccidioides immitis RS]
  misc_feature (1)..(1044): NCBI GI: 156063804 Blast Desc: SS1G_02020 [Sclerotinia sclerotiorum 1980] gi|154697354|gb|EDN97092.1| SS1G_02020 [Sclerotinia sclerotiorum 1980]
  misc_feature (9)..(1043): NCBI GI: 154318668 Blast Desc: BC1G_02723 [Botryotinia fuckeliana B05.10] gi|150857853|gb|EDN33045.1| BC1G_02723 [Botryotinia fuckeliana B05.10]
  misc_feature (9)..(1045): NCBI GI: 85075756 Blast Desc: NCU05000 [Neurospora crassa OR74A] gi|28916838|gb|EAA26584.1| [Neurospora crassa OR74A]
  misc_feature (9)..(1045): NCBI GI: 116178826 Blast Desc: CHGG_00041 [Chaetomium globosum CBS 148.51] gi|88184338|gb|EAQ91806.1| CHGG_00041 [Chaetomium globosum CBS 148.51]
  misc_feature (9)..(1045): NCBI GI: 171679130 Blast Desc: protein product [Podospora anserina] gi|170937636|emb|CAP62295.1| protein product [Podospora anserina]
  misc_feature (11)..(1043): NCBI GI: 156065437 Blast Desc: SS1G_00729 [Sclerotinia sclerotiorum 1980] gi|154691588|gb|EDN91326.1| SS1G_00729 [Sclerotinia sclerotiorum 1980]
  misc_feature (10)..(1045): NCBI GI: 46138205 Blast Desc: FG10617.1 [Gibberella zeae PH-1]
  misc_feature (9)..(1045): NCBI GI: 121701267 Blast Desc: nonribosomal peptide synthetase, [Aspergillus clavatus NRRL 1] gi|119397041|gb|EAW07472.1| nonribosomal peptide synthetase, [Aspergillus clavatus NRRL 1]
MGYVRAVAGNRLIPNVVDEAARDTPDRIVYTIPHLTDNGDSFEDITALRFANAVNRACRWLEGVLGRGKNFEAIGYIGPHNLTYPILVLACIKTGYKALLVSPRNSIEGSLAVVDKTDCRIWAKSTENNELVNQILDKRPMEILQTPTLEELLDPRPVAKYPYTKTWEQANLDPLAVLHTSGSTGLPKPIIMRLGTIASGDAIREIALEDGEEITPSWAASDLVFNPFPWFHAASLMVKLGLNFWLGSTVVTEPTNGVISADTIDRIISNVPVKAFFIPPSTVEELAKTPKTLEKLSACKYIITGGGSLSSQLGDIVNKVVAVRNVYGSTEGGIWAMVSPQKGKDWRTFKFPPELGTDLREVTPGLYELFFVKKPEYKRWQGLFYTFPEDEEYSTKDLFAPHPTEPGRWLCVGRADDVVVLSNGEKVQPVDIEACIASHPEVQSALVVGNRRFHPAVLLELRGAPPTNEIVLEQLLDKIYAEVVEKANAASPSHARIFRSNMMLTVPGKPFLRTDKGTVKRPGMLRSYEKEIDEFYEKLEAEEAKALTSDMDISSPSTIADGLRGIINVLLKKELTDDDNLFAAGFDSLLVFQILGALRKAAAEGAKVEVTLAPTLIYGNPTLEKLSNAFYDAIHPDGDAPYDASAATFQLAEDIVAKYTRDLPTDGESVIVTGTTGSLGTYLLNSLIKNESVKRIYCFNRSSDAEERNRAGFKTKGLTEVWPAKKVQFLNADLSKPDFGLGQGKYDVLLKGVTKIIHNQWPVNFNWDLSSFEPHIRGVRHLVDFAKKSRQGTAIFYISSIGSITKWADDSPVPEQPIHDLTVAGTQGYSLSKLMAEMVLEQAVKVSGVDASVCRVGQIAGPVTTGEKGEWNKQEWFPTILETSKYLKLLPSNLGTLDRIEWVPVDLLAEMISEFAGIGAKKGQNDEVDEDELKVYHAVNPKLGYWQVIAPTILKSMPAGTRSVPWAEWVQALKDAQRTATSATARELTGLKLLDFYESLIMPEDVKYTPFNLETGVSMRKSQTMKRLPPVTNEWVELWLKQWNF

SEQ ID NO: 13679 - DNA, 11769 bp, Muscodor strobelii
  misc_feature: SGI EST ID NO. CUFF.33629.0
  misc_feature: Variant of the nucleotide sequence at SEQ ID NO 13677
gttatatatctatatcctgaaccacccttccccggctctccccttcttgcgaatcattatcaccagcatcatcaccaaacggcgttcctccattggtcgtctcttcttctccacattgccggaccttgatagcaggtcgacactcatccgcatacaaactataacgaccgaagaagagagggacggaaaaataggaggaagcggacagaggcataccagtcaccatgggatacgtccgcgccgttgcgggtaaccgcctgatcccaaatgtcgtcgacgaggccgctcgcgatactcccgatcgtattgtgtacactatcccgcatttaacagataacggcgacagcttcgaggatatcacagctttacgcttcgccaatgccgtgaatagagcatgccgctggctcgagggtgttctcggccggggcaagaatttcgaggccataggttacatcggcccccacaacctcacctacccaatcctggttctcgcctgtattaaaaccggttacaaagctctcctcgtgtcgccaaggaatagtatagaaggcagtttggccgtcgtcgataagacagactgccggatctgggccaagtccaccgaaaacaatgaacttgtcaaccagatcctcgacaagaggccgatggagatattgcagacacctacacttgaagagctgctcgatcctcgacctgtagccaaatacccctacaccaagacctgggagcaggctaacctagaccctctcgctgtgcttcacacctcaggatccactggtcttcccaagccaatcatcatgcgtctcggcacaatcgccagtggtgacgctatcagggagatagcccttgaggatggcgaggagatcaccccttcgtgggccgcctctgatctcgtcttcaaccccttcccctggttccacgctgccagtctcatggtcaagctcgggttgaacttctggcttggttccacggtggtcaccgaacctacgaacggagttatcagcgccgatactatcgatcgtatcatttcgaatgtccctgtcaaagcgttcttcattcctccatccaccgtcgaagagctggccaagacacccaagactctcgaaaaactcagtgcctgcaaatacatcatcactggtggaggctctctgtcgtctcagcttggtgacattgtcaacaaggtcgtagcagtgcgcaatgtctacggatcaactgaaggtggtatctgggccatggtttcaccacaaaagggcaaggactggagaacattcaagtttcctccagagttagggactgacctgcgcgaggttacaccgggcttatatgagctgtttttcgtcaagaaaccagagtacaagcgctggcagggtctgttctatactttcccagaagacgaggagtactcgaccaaagatctgttcgcaccacaccctacggaacctggccgttggctttgtgtcggtcgtgcagacgatgtcgttgtcctctccaacggtgagaaggttcaacctgtcgatatcgaggcttgtattgcctcgcaccctgaggtgcaatccgctctggttgttggcaaccggaggttccacccagccgtgctcttggaacttcgcggtgctcctcccaccaatgagatcgttctagagcagttattggataaaatctatgctgaggtggtcgaaaaggccaatgctgcatcgccctcgcacgctcgcattttccgctccaacatgatgcttactgtcccaggaaagccattcttgcgaacagataagggaaccgttaagcgtccaggtatgctcaggtcttacgagaaggagatcgatgagttctacgagaagctcgaggccgaggaggccaaggccttgacctcagacatggacatctcatctcctagcacgattgctgatggactgcgcggaatcatcaacgtgctccttaagaaggaactcactgatgacgacaacttgttcgctgcaggtttcgattccctacttgtattccagatcctcggcgctcttcgaaaagccgcagccgagggagccaaggtcgaagtcacacttgcgcctaccttgatctacggtaacccgaccctagagaagctctccaacgccttctacgatgcgatccaccccgatggcgacgcaccatatgatgcttcggccgctacattccagcttgccgaggacatcgttgccaaatacactcgggatctaccaacagacggcgagagcgtgatcgtcactggtaccaccggttcattgggtacctatcttctcaactcgctaattaagaatgagagtgtcaaacggatctactgcttcaaccgatcgtccgatgctgaagaaaggaaccgtgctggcttcaagactaagggcctgacggaagtttggccagctaagaaagtacagtttctcaatgctgacctgtcaaagcccgactttggtctcggtcagggcaagtacgacgttctcctcaagggcgtcaccaagatcatccataaccagtggcctgtgaatttcaattgggatctgtcctcgttcgagcctcacatccgaggtgtgcgtcacctcgtcgacttcgccaagaagagccgacaaggcactgccatcttctacatctcatccatcggtagcatcaccaagtgggctgacgattctcctgtgccggaacagcctatccatgatctcactgttgcaggtacacagggttacagtttgtccaagttgatggctgaaatggtactcgagcaagctgtcaaggtttctggtgtcgatgcctctgtttgccgtgttggtcagatcgctggccccgtcacgacaggtgagaagggcgagtggaacaagcaagagtggtttcctaccatcctggagacgtccaagtatcttaagctcctcccttcgaatctgggcacgcttgatcgcatcgaatgggtgcccgttgacctcctcgctgagatgatctctgagtttgccggcatcggcgctaaaaagggacaaaatgacgaagtcgacgaggatgagctcaaggtgtaccacgctgtgaaccctaagcttggctattggcaggtcattgctcccaccattctcaagtctatgccggctggtacgcgctcggttccttgggctgaatgggtacaagctctcaaggacgcccaacgaacggctacgtctgcaaccgctcgtgaactcactggtcttaagttgctcgacttttacgagtcgctcatcatgcccgaggatgtgaagtacacacccttcaacctcgagactggtgtttctatgcgcaaaagtcagaccatgaagagactccctccggtcacgaacgagtgggttgaactctggcttaagcagtggaatttctagattaacctccctcgatgaccgagaacactgcagaacaacatagcaaaaaaagtcactttctgagataccctagcattgatggtcacgataggttggaagattcacgatggggaaatgtcgttgatcgaactaaatggtattttcttcactcgtctaaactaccattcccttatcggaccatgtcgattttgtccagatttcgttttggaatgttttgacgactatacatagcaaagcacggaagattatgtttttcttcttgtaattcacttcatcctgtttatatttaccatgcatattgagcttgattatctagcttcgacatggcgttgggcgcactattggcatcaagcggagattccaataactgtattttgtttccctggtatagatatagagtagcaggacttgagtgtcataggaatgaaagccctaattcgtttaaaccacgcttttcaaatccaaacatgctttcttacttgttttgcatatgatagttcttgtgaaaactatcgtagagtgagacaataatgccgctcggctgcgatagtgacgtaggttcccacctagctgtgctaatctctctacgatttttcatccgatcatgtttacttgtgttgcatatgtggtcgtagtcatttacgaacgtcgagtaaaattacatgcactccatgtagcattattactcattgtcttcgtaaccaatggagtcagcatcacagccgagctaccccaactagcttactgaaaccgcctccgccgcctcgagcgccttggcaaatatagatggtagattgtcctctagtcccacactgatgcgtagcaagttcggatcaacaccaaaacttgccgcccaatctagttcttgatagtgcgccaagatgacatatggcgacgtgatggtgaagttggtgccaagactcgggcctttggccgtttcaagcgcgtcgtggaatgcgactgcgtgggccttactgcgcagtgtgcacgagaggagaccgccataacctccaccaggcaggcgacaagcctcatagttgggccgggacttgacatatttggggtagaagacctgcgttacaagtgggtgggctaaaagcattgcgctgatcgcttctgcgttagcgctggtacgatgaatccgagagatgaaatcgcggctattgcgttccatgaagattacgtcctctgcccaatacgtgtcttcaaatatatccgacatggcactcttgagctctgcgtagtagcgcccgtgcggattcagaaccaggctccctcccatgacattggcgtcgcccgagaatatcttggtgagactactcactaccgcatctgccaatggcaaaagattcacgttgacgaaattgctgagcgtctcgtcgacgatgacggcgaagtcgtaagtatcggccagcgtccgtatacggctcaggtttgggcaagtcagcagcgggtttccaggaaattcgcagaacagacctagaaatcgctcgccagccttcagccgggtctcgaggtcgtccaagtctgattcagatccatgtccgtaaaatatagcaccaggaccgaacttctgcagaatcttgagcgtatcaacgtatggaaatccgtaactaatgctcttatgtggtctacgacagctgagcagagcctgatgcgctgtgaagatagcattcatacccgtcgacattaagtatatatcatcttcttttaggtccgtgaccccacgcgcattcgagtccatcactggaagtgatttgctttgtaagtctatgtccgtcgtgagcactccggcgatgcggcgtctgatggccgacttggcgttctccacgagtgatacatcgaggttacgaccaaagcgctcctctaagaaccttgagctttcgagactatcggctagttcccggtctggtaggcctggcttgccagcggcaggcacgtgtttagccccattagtgccagttttctcatccatggaagaagcccgctggtatcgtctaggaccgcgacgtaacttcccctgatgtggcgaaggaggcgaggccgagcggtcctcgagtacaagaaggccctcgtggaacaaacctctgcagaactcggctcgtcggctcgagacgccctcgcccgagtgctgccagtactgtcttgcgaagggataagcttcctcggagcagacgacggcatgaatggaaggatctaggtcacgcaaaagctcagtaggctcttgagatgagtccaagacaaagcgcagaacattgaagtcggtcagggctgcggccgaggcacggccacggatgaagtcctcacatctctgtgcaatcctgcgggtagggaatagcatagccctctgaccggattgaccgtagcgagacagtatctcgctctcaaaagcctggatacttttgtgtataaagaatcgcgggtagcccgtaatcatcgtgccgaggacggcctgatcgccttcctcgtatccgacattggccttccatgtaggaagggagacgctcacagcctatagtcaggtattaggcattagtgatgtgaaaaagaggtcacatcgggaacagttcaatgctcacatgagtagtgttgggcggaatggaatcacccaggtcaatggagggcatgctgtctagtttagtagtaggatgcaaagaacgatgacggatctctgattacaggttgctcgctatctactagataattctttgtgtgatactggattctcctgttgacagttgtagatgcctctctctgttggctagtgttcatcgcacggatcggaaagacgaagatgtcgtggcatttcatgaggctttcgcttgctggatatcggacctaacacaaagtagtaatgggacggaaggcgttggtcgccggagtcggagctatgaatttctcggggcccgcctttcttcgtttcctgagttatcgagaacaggtagaatcaggtccccccaatcgcacttagaatcatgctgtcactgatctacgaggcagaaaagactagagattcgtcgcttagctcatccgtactcctggcggtctatggggtagtcgcccgtcacgagagaaggaagtgtctcgagccgtttcaatcgcggacccacgagttcgcgggtttacataggtagtcatgcacatcgggacttgctacgccgtctatatcatgccgggattccgttttatgtatttctgtgctactatacagtgtagacctgtgtagacgaccttcagacataggggctggtctcagctgcaaattgatgacctcaaatggtggggtcgtctaagaggggtcgaatatgtcgactccatgaatgatgtaagtgagtctcaatgacacgatggttcatcaagcatcacggcttgttgcagccacggctgaagaaagtctttcaacatgattcttcataatgtgattaatgctggggaagatagctcagtgacggcatgggatattgagctcgaagccggacgagttaagagtgcgtggccgtctgaagcaacccaggatatgccatcccttttgcttctccctcctctctgccacccgcatatccacctcgacaaggcctacattcttacttgcaaccacggcgcctctccggcctacccggactactctgatctttgtctcacatcgggttcctttgacgaagctctcattaatacatcgaaagccaaagaacgatatacggcagatgacctgtatcttcgcgggtcgcaacttcttgctacaagctacgtccaaggcgtaacagctctacgagctttcgttgaagttgaccatgtcacgggaacactgccactgacgactgccattcgcctcaagaaagactttggacacctactggaattgcagatttgtattttcgctcaggatcccatcttctcaacgacgcacgcggaagccaaccggtctgccattacagatacgctgaaagacagtttgttctcggatttggtcggagccctcggcacgacaccatacgttgaagcttgtcgtgaagcgtcgctagcaaacatcgaatgggccattgtgactgcgttaagggcatgtatagaaagatcccgcgcgagttattttctgaccgtgctcctaagacaccgtgctaactttgttgtagtaagtaatctgaactatcagatatcaaaaaccagctctttgtcttgaaacccgcggccccgcgaaaagtcgtgaaaaataactaacccgacacctttctggctaccagatacaagcttcatctagatttccacctagactataacctgaattcgtctccacgcccattgatcatgtctgtcattgatctgctgaagaagcatgaatgggtcaagcaagcagacaaatctaagaccatagttcttggtcactgtgcgcagctaaccgtcgtcgacgacaccgagcggaggacaatcgctagtgccatactttcaagccagctacccatccatttcatcggtttgccgacaagtgatctgttcatgatgggtcgaccgtccactgaaactgggtcaagccatcatcgaccacgagggacaattcatgtcccgtccatgatcaaggagcttagcctctcagcatgtctcggcgtcaacaacgtcggcaatgcctttacgccctttggaacgggggatccgttacagctcgcctctgtaagtatcttccgcagttatctcctgtttatctagaaaaatttcgggagttaggtactctatcctcccaacaagcgctcgggaaaaaatgtttcaagtctgcggattttagcaagcttccgacaacagtacttactgactgaattcatcgcagtggtacgtacctctattccctctctgtccttctaccaaacatgcgctcgtttccatgctccgtaaaatgacaaatggatttgggctaggacgactgacttgaaatgcgtgccagggcagtgggtatttatcaagcagggaccgacgacgacgcagcacttctctatgactgcgtgagcaggagagcaaggcaagctatcggtctggacaacgcccaaaatgacataattcgtccaggttcatctttacgtggtatgctgttattgaaaacgccgaggttcatctcagtaccagcagttgatgacggccggtcggtcatgacggtcgtaaacagacgtcgtataactgtcagagatattgtctgggatccgcctgagagcaacctacgatcgataataatctaaagtcctttctgtgtctagcaacgagatgggatctcgcatgatgcctttcgcatttgctcatgatttctcactcacatagcaaccgcgccgcagctcagtggtgacgtcccaggaccgtccaggtttttacatgcttggaacttgaatgacgtccactacatgacgcagcattccacattcttatgaccaggtccgaatatttcttggtttcgttcgcgttcgtttgctcgtaccttttctttcacctccttgggaaagtatttgcgaaggaaggcagcgcggtcagcatcgaaattctcgagtccagcgagcattatggtgtcggcccgacacagagggcagaatctctcgcccttgcgagacattttgaccaaacaccgactgcagaaagtgtgctgacactgtagcttcaccggccagtaagcaacggagagacaaataggacacaggtagtcgtcgagttgtgggacagtggagatcaactgggtggacatctgggcgcacacatcccgtgccacgcttgaagctagaagacgatcggaattgacagccgcgggaaatgttttggagacgccgagagacgtccgtttatcgaactctagcggtacgagttagcaatgttgatactcatgtgtcatcgaatgctagtggcgtgggatgcgacttactcttcagtatcttctgcacagcgaggttgttgatttcacgaaattttaggatagaaagtagagcaacattgagctgtacgaagctaccaaatgcggcctggctgctgcctgatttcagcttctgcacgagcctgcgctgcacgacttgctcttgaaaccagtgaagctgttccacagcctgagcgcttgtccgggcaccagaatccctctcgcgagccgagaaaaagacgcgggcgtcgaggtacaactcaaagatcttccgccagacttcgagatcagctttggctttgcgcccgtgcgatggatcgaccgtttcccccaaatcctggccgagctgtctgatttggttctgcaacttgacttgctcctcctcttgtaaggtgccgatgttggacacatccgtctgtagaatctcgaagaactgcgcatcaaacaccaaaggcacctcgacttgccgtacatcctccagttcgttcgggccgtcctggccgcccacggagggcgccgcggcggccaaaggtaggttgccaggggactctggcgtctgttggagcgcaatcctctctaaaaaattccctggtggccggggtcagccgggcgtcgacggcaataccgtccttgagctggacgaagacggtcagcctgggacggaagtgggctgagtggtccgtcttcccgtcgaggtagtagcggaaacgcagatcggagtcggaacagtgactctcggccagcccggccagcgtgtccttccccaagccaagctcttgcagctcgttggtgaccttcttgagacatttcttcagctggccatagggaatggcgcaatccacccatttctgggggaactctggatatgcgttagcccagggagcggcgaagatgggagacagacggagggatggttataattgccttctcgctgcagagccttccggaactcttgcgcaaacttcatggtgaagggatggaaaaaacaagctgtgtgcctctacacccgcaagaagaacaggtgatgcgacgagctggtacgcaaggtgcaccgggggggcagagatggtaggacgaagtcatggactcgccagcgcagctgtggttggtggcggcaaccgatggtgaaaattgcacaggcacggcggacgggtgggagaccggatgggtatcggcggttggattcggaatggcctcttattttaaggtctctttacttatcatgagcacatcgagtccgcagggtcctattcgggaaatgtgtcgcgtgatgcacccgcacctgcatcgcatcgcatctctgcccctgtcgccacagcagcacgccacccgcaaatggcatggacaagacgacagaccgcgcagtggcgaaggcgtgtgtcgataatgtagatggtacctggaaccccagacttggcgaatacatagagtctagacgggagactgaggtaaggtacatgtaggtgtcgaagtcaatactgagtgactaaggtccgttgcctgctggggtcaacccgtcgcttcaggcaagatagattcacgggcagctgtggccctgacaccagcaagtcgattggaccactcaacccttccaagagaagcaccagataccttagtcacatgtacagcgtacgctacatggtacatgacctgaagtgcatgtacgtaggtagataccttagctacatattaatagctagcatcatcttgactgcagtgatgtgtgtgttgtgaggcactccggccccatcccgtcttgttctgggcgctgatagccgtccgatgtgtttggaagtcattatgaatcatcccatgttgggtacgggggaactcaatctaggtacatgcctgcatggacagccccgccactacttttaccccccctcgaccatgctaagcgatagaggatggaggggtaaagtattaattttcagctctttgatcttagtccgcatctacacagtacctaacattagcacgcagagcctctgtccatgccgtctcaacacgtgtaaccaaagactgaatcgaaatctcgtcttcgtctctttgctttatatatactaacagctgcgtgtgcccgcacagctgcggcggtgctgaaccatgggcgccgagcagtcgtccacgcgacgccctgccgccgtcgatgctgctccgaagaagacggactactacgagctcctgggcgtcgagcgctcggcgggcgacgaggagatcaagaaggcgtaccggcggaaggcgctcgagctgcacccggaccgcaactacggcgacgtcgagaatgccacgcgcaagtttgccgacgtccaggccgcctacgaggtgctctcggacccccaggagcgcgcctggtacgacgcccacagcgacgccatcctgcgcggcgacgacccggccgacttcgacgccgcccccgagttccgcaacgtccgcctcaccaccgccgacgacatcttcgccctgatgggccgcttcacccgcagcgtgcccctcgacgactcgcccgccggcttcttcaccgtcctgcgc

SEQ ID NO: 13680 - DNA, 1824 bp, Muscodor strobelii
  misc_feature: SGI cDNA ID NO. 564490
  misc_feature: Reduced expression when VOC is produced
  misc_feature: Encodes the peptide sequence at SEQ ID NO 13681
atgccctccattgacctgggtgattccattccgcccaacactactcatgctgtgagcgtctcccttcctacatggaaggccaatgtcggatacgaggaaggcgatcaggccgtcctcggcacgatgattacgggctacccgcgattctttatacacaaaagtatccaggcttttgagagcgagatactgtctcgctacggtcaatccggtcagagggctatgctattccctacccgcaggattgcacagagatgtgaggacttcatccgtggccgtgcctcggccgcagccctgaccgacttcaatgttctgcgctttgtcttggactcatctcaagagcctactgagcttttgcgtgacctagatccttccattcatgccgtcgtctgctccgaggaagcttatcccttcgcaagacagtactggcagcactcgggcgagggcgtctcgagccgacgagccgagttctgcagaggtttgttccacgagggccttcttgtactcgaggaccgctcggcctcgcctccttcgccacatcaggggaagttacgtcgcggtcctagacgataccagcgggcttcttccatggatgagaaaactggcactaatggggctaaacacgtgcctgccgctggcaagccaggcctaccagaccgggaactagccgatagtctcgaaagctcaaggttcttagaggagcgctttggtcgtaacctcgatgtatcactcgtggagaacgccaagtcggccatcagacgccgcatcgccggagtgctcacgacggacatagacttacaaagcaaatcacttccagtgatggactcgaatgcgcgtggggtcacggacctaaaagaagatgatatatacttaatgtcgacgggtatgaatgctatcttcacagcgcatcaggctctgctcagctgtcgtagaccacataagagcattagttacggatttccatacgttgatacgctcaagattctgcagaagttcggtcctggtgctatattttacggacatggatctgaatcagacttggacgacctcgagacccggctgaaggctggcgagcgatttctaggtctgttctgcgaatttcctggaaacccgctgctgacttgcccaaacctgagccgtatacggacgctggccgatacttacgacttcgccgtcatcgtcgacgagacgctcagcaatttcgtcaacgtgaatcttttgccattggcagatgcggtagtgagtagtctcaccaagatattctcgggcgacgccaatgtcatgggagggagcctggttctgaatccgcacgggcgctactacgcagagctcaagagtgccatgtcggatatatttgaagacacgtattgggcagaggacgtaatcttcatggaacgcaatagccgcgatttcatctctcggattcatcgtaccagcgctaacgcagaagcgatcagcgcaatgcttttagcccacccacttgtaacgcaggtcttctaccccaaatatgtcaagtcccggcccaactatgaggcttgtcgcctgcctggtggaggttatggcggtctcctctcgtgcacactgcgcagtaaggcccacgcagtcgcattccacgacgcgcttgaaacggccaaaggcccgagtcttggcaccaacttcaccatcacgtcgccatatgtcatcttggcgcactatcaagaactagattgggcggcaagttttggtgttgatccgaacttgctacgcatcagtgtgggactagaggacaatctaccatctatatttgccaaggcgctcgaggcggcggaggcggtttcagtaagctag

SEQ ID NO: 13681 - protein, 607 aa, Muscodor strobelii
  misc_feature: SGI Peptide ID NO. 564490
  misc_feature (247)..(599): Pfam Id: PF01053 Pfam Desc: Cys/Met metabolism PLP-dependent enzyme
  misc_feature (1)..(602): NCBI GI: 189091774 Blast Desc: [Podospora anserina] gi|27802996|emb|CAD60699.1| protein product [Podospora anserina] gi|188219240|emb|CAP49220.1| protein product [Podospora anserina]
  misc_feature (1)..(607): NCBI GI: 46136679 Blast Desc: FG09855.1 [Gibberella zeae PH-1]
  misc_feature (1)..(602): NCBI GI: 39943006 Blast Desc: MGG_03583 [Magnaporthe grisea 70-15] gi|145009848|gb|EDJ94504.1| MGG_03583 [Magnaporthe grisea 70-15]
  misc_feature (1)..(601): NCBI GI: 156042406 Blast Desc: SS1G_11000 [Sclerotinia sclerotiorum 1980] gi|154695387|gb|EDN95125.1| SS1G_11000 [Sclerotinia sclerotiorum 1980]
  misc_feature (1)..(605): NCBI GI: 164427116 Blast Desc: NCU02430 [Neurospora crassa OR74A] gi|167012005|sp|P38675.3|MET7_NEUCR RecName: Full=Cystathionine gamma-synthase; AltName: Full=O-succinylhomoserine (thiol)-lyase
  misc_feature (17)..(604): NCBI GI: 261361141 Blast Desc: cystathionine gamma-synthase [Verticillium albo-atrum VaMs.102]
  misc_feature (1)..(601): NCBI GI: 116179666 Blast Desc: CHGG_00461 [Chaetomium globosum CBS 148.51] gi|88184758|gb|EAQ92226.1| CHGG_00461 [Chaetomium globosum CBS 148.51]
  misc_feature (1)..(602): NCBI GI: 154300356 Blast Desc: BC1G_11367 [Botryotinia fuckeliana B05.10] gi|150856690|gb|EDN31882.1| BC1G_11367 [Botryotinia fuckeliana B05.10]
  misc_feature (42)..(604): NCBI GI: 145230223 Blast Desc: An01g10010 [Aspergillus niger] gi|134055537|emb|CAK37183.1| protein product [Aspergillus niger]
  misc_feature (4)..(600): NCBI GI: 189194561 Blast Desc: cystathionine gamma-synthase [Pyrenophora tritici-repentis Pt-1C-BFP] gi|187979183|gb|EDU45809.1| cystathionine gamma-synthase [Pyrenophora tritici-repentis
  misc_feature (1)..(605): SWISSPROT Homolog: EC 2.5.1.48 Cystathionine gamma-synthase
  misc_feature: Useful for introducing or modulating the production of volatile compounds
MPSIDLGDSIPPNTTHAVSVSLPTWKANVGYEEGDQAVLGTMITGYPRFFIHKSIQAFESEILSRYGQSGQRAMLFPTRRIAQRCEDFIRGRASAAALTDFNVLRFVLDSSQEPTELLRDLDPSIHAVVCSEEAYPFARQYWQHSGEGVSSRRAEFCRGLFHEGLLVLEDRSASPPSPHQGKLRRGPRRYQRASSMDEKTGTNGAKHVPAAGKPGLPDRELADSLESSRFLEERFGRNLDVSLVENAKSAIRRRIAGVLTTDIDLQSKSLPVMDSNARGVTDLKEDDIYLMSTGMNAIFTAHQALLSCRRPHKSISYGFPYVDTLKILQKFGPGAIFYGHGSESDLDDLETRLKAGERFLGLFCEFPGNPLLTCPNLSRIRTLADTYDFAVIVDETLSNFVNVNLLPLADAVVSSLTKIFSGDANVMGGSLVLNPHGRYYAELKSAMSDIFEDTYWAEDVIFMERNSRDFISRIHRTSANAEAISAMLLAHPLVTQVFYPKYVKSRPNYEACRLPGGGYGGLLSCTLRSKAHAVAFHDALETAKGPSLGTNFTITSPYVILAHYQELDWAASFGVDPNLLRISVGLEDNLPSIFAKALEAAEAVSVS

SEQ ID NO: 13682 - DNA, 11622 bp, Muscodor strobelii
  misc_feature: SGI EST ID NO. CUFF.33630.1
  misc_feature: Variant of the nucleotide sequence at SEQ ID NO 13680
gcgcaggacggtgaagaagccggcgggcgagtcgtcgaggggcacgctgcgggtgaagcggcccatcagggcgaagatgtcgtcggcggtggtgaggcggacgttgcggaactcgggggcggcgtcgaagtcggccgggtcgtcgccgcgcaggatggcgtcgctgtgggcgtcgtaccaggcgcgctcctgggggtccgagagcacctcgtaggcggcctggacgtcggcaaacttgcgcgtggcattctcgacgtcgccgtagttgcggtccgggtgcagctcgagcgccttccgccggtacgccttcttgatctcctcgtcgcccgccgagcgctcgacgcccaggagctcgtagtagtccgtcttcttcggagcagcatcgacggcggcagggcgtcgcgtggacgactgctcggcgcccatggttcagcaccgccgcagctgtgcgggcacacgcagctgttagtatatataaagcaaagagacgaagacgagatttcgattcagtctttggttacacgtgttgagacggcatggacagaggctctgcgtgctaatgttaggtactgtgtagatgcggactaagatcaaagagctgaaaattaatactttacccctccatcctctatcgcttagcatggtcgagggggggtaaaagtagtggcggggctgtccatgcaggcatgtacctagattgagttcccccgtacccaacatgggatgattcataatgacttccaaacacatcggacggctatcagcgcccagaacaagacgggatggggccggagtgcctcacaacacacacatcactgcagtcaagatgatgctagctattaatatgtagctaaggtatctacctacgtacatgcacttcaggtcatgtaccatgtagcgtacgctgtacatgtgactaaggtatctggtgcttctcttggaagggttgagtggtccaatcgacttgctggtgtcagggccacagctgcccgtgaatctatcttgcctgaagcgacgggttgaccccagcaggcaacggaccttagtcactcagtattgacttcgacacctacatgtaccttacctcagtctcccgtctagactctatgtattcgccaagtctggggttccaggtaccatctacattatcgacacacgccttcgccactgcgcggtctgtcgtcttgtccatgccatttgcgggtggcgtgctgctgtggcgacaggggcagagatgcgatgcgatgcaggtgcgggtgcatcacgcgacacatttcccgaataggaccctgcggactcgatgtgctcatgataagtaaagagaccttaaaataagaggccattccgaatccaaccgccgatacccatccggtctcccacccgtccgccgtgcctgtgcaattttcaccatcggttgccgccaccaaccacagctgcgctggcgagtccatgacttcgtcctaccatctctgcccccccggtgcaccttgcgtaccagctcgtcgcatcacctgttcttcttgcgggtgtagaggcacacagcttgttttttccatcccttcaccatgaagtttgcgcaagagttccggaaggctctgcagcgagaagagttcccccagaaatgggtggattgcgccattccctatggccagctgaagaaatgtctcaagaaggtcaccaacgagctgcaagagcttggcttggggaaggacacgctggccgggctggccgagagtcactgttccgactccgatctgcgtttccgctactacctcgacgggaagacggaccactcagcccacttccgtcccaggctgaccgtcttcgtccagctcaaggacggtattgccgtcgacgcccggctgaccccggccaccagggaattttttagagaggattgcgctccaacagacgccagagtcccctggcaacctacctttggccgccgcggcgccctccgtgggcggccaggacggcccgaacgaactggaggatgtacggcaagtcgaggtgcctttggtgtttgatgcgcagttcttcgagattctacagacggatgtgtccaacatcggcaccttacaagaggaggagcaagtcaagttgcagaaccaaatcagacagctcggccaggatttgggggaaacggtcgatccatcgcacgggcgcaaagccaaagctgatctcgaagtctggcggaagatctttgagttgtacctcgacgcccgcgtctttttctcggctcgcgagagggattctggtgcccggacaagcgctcaggctgtggaacagcttcactggtttcaagagcaagtcgtgcagcgcaggctcgtgcagaagctgaaatcaggcagcagccaggccgcatttggtagcttcgtacagctcaatgttgctctactttctatcctaaaatttcgtgaaatcaacaacctcgctgtgcagaagatactgaagaagttcgataaacggacgtctctcggcgtctccaaaacatttcccgcggctgtcaattccgatcgtcttctagcttcaagcgtggcacgggatgtgtgcgcccagatgtccacccagttgatctccactgtcccacaactcgacgactacctgtgtcctatttgtctctccgttgcttactggccggtgaagctacagtgtcagcacactttctgcagtcggtgtttggtcaaaatgtctcgcaagggcgagagattctgccctctgtgtcgggccgacaccataatgctcgctggactcgagaatttcgatgctgaccgcgctgccttccttcgcaaatactttcccaaggaggtgaaagaaaaggtacgagcaaacgaacgcgaacgaaaccaagaaatattcggacctggtcataagaatgtggaatgctgcgtcatgtagtggacgtcattcaagttccaagcatgtaaaaacctggacggtcctgggacgtcaccactgagctgcggcgcggttgctatgtgagtgagaaatcatgagcaaatgcgaaaggcatcatgcgagatcccatctcgttgctagacacagaaaggactttagattattatcgatcgtaggttgctctcaggcggatcccagacaatatctctgacagttatacgacgtctgtttacgaccgtcatgaccgaccggccgtcatcaactgctggtactgagatgaacctcggcgttttcaataacagcataccacgtaaagatgaacctggacgaattatgtcattttgggcgttgtccagaccgatagcttgccttgctctcctgctcacgcagtcatagagaagtgctgcgtcgtcgtcggtccctgcttgataaatacccactgccctggcacgcatttcaagtcagtcgtcctagcccaaatccatttgtcattttacggagcatggaaacgagcgcatgtttggtagaaggacagagagggaatagagacttgaaacattttttcccgagcgcttgttgggaggatagagtacctaactcccgaaatttttctagataaacaggagataactgcggaagatacttacagaggcgagctgtaacggatcccccgttccaaagggcgtaaaggcattgccgacgttgttgacgccgagacatgctgagaggctaagctccttgatcatggacgggacatgaattgtccctcgtggtcgatgatggcttgacccagtttcagtggacggtcgacccatcatgaacagatcacttgtcggcaaaccgatgaaatggatgggtagctggcttgaaagtatggcactagcgattgtcctccgctcggtgtcgtcgacgacggttagctgcgcacagtgaccaagaactatggtcttagatttgtctgcttgcttgacccattcatgcttcttcagcagatcaatgacagacatgatcaatgggcgtggagacgaattcaggttatagtctaggtggaaatctagatgaagcttgtatctggtagccagaaaggtgtcgggttagttatttttcacgacttttcgcggggccgcgggtttcaagacaaagagctggtttttgatatctgatagttcagattacttactacaacaaagttagcacggtgtcttaggagcacggtcagaaaataactcgcgcgggatctttctatacatgcccttaacgcagtcacaatggcccattcgatgtttgctagcgacgcttcacgacaagcttcaacgtatggtgtcgtgccgagggctccgaccaaatccgagaacaaactgtctttcagcgtatctgtaatggcagaccggttggcttccgcgtgcgtcgttgagaagatgggatcctgagcgaaaatacaaatctgcaattccagtaggtgtccaaagtctttcttgaggcgaatggcagtcgtcagtggcagtgttcccgtgacatggtcaacttcaacgaaagctcgtagagctgttacgccttggacgtagcttgtagcaagaagttgcgacccgcgaagatacaggtcatctgccgtatatcgttctttggctttcgatgtattaatgagagcttcgtcaaaggaacccgatgtgagacaaagatcagagtagtccgggtaggccggagaggcgccgtggttgcaagtaagaatgtaggccttgtcgaggtggatatgcgggtggcagagaggagggagaagcaaaagggatggcatatcctgggttgcttcagacggccacgcactcttaactcgtccggcttcgagctcaatatcccatgccgtcactgagctatcttccccagcattaatcacattatgaagaatcatgttgaaagactttcttcagccgtggctgcaacaagccgtgatgcttgatgaaccatcgtgtcattgagactcacttacatcattcatggagtcgacatattcgacccctcttagacgaccccaccatttgaggtcatcaatttgcagctgagaccagcccctatgtctgaaggtcgtctacacaggtctacactgtatagtagcacagaaatacataaaacggaatcccggcatgatatagacggcgtagcaagtcccgatgtgcatgactacctatgtaaacccgcgaactcgtgggtccgcgattgaaacggctcgagacacttccttctctcgtgacgggcgactaccccatagaccgccaggagtacggatgagctaagcgacgaatctctagtcttttctgcctcgtagatcagtgacagcatgattctaagtgcgattggggggacctgattctacctgttctcgataactcaggaaacgaagaaaggcgggccccgagaaattcatagctccgactccggcgaccaacgccttccgtcccattactactttgtgttaggtccgatatccagcaagcgaaagcctcatgaaatgccacgacatcttcgtctttccgatccgtgcgatgaacactagccaacagagagaggcatctacaactgtcaacaggagaatccagtatcacacaaagaattatctagtagatagcgagcaacctgtaatcagagatccgtcatcgttctttgcatcctactactaaactagacagcatgccctccattgacctgggtgattccattccgcccaacactactcatgctgtgagcgtctcccttcctacatggaaggccaatgtcggatacgaggaaggcgatcaggccgtcctcggcacgatgattacgggctacccgcgattctttatacacaaaagtatccaggcttttgagagcgagatactgtctcgctacggtcaatccggtcagagggctatgctattccctacccgcaggattgcacagagatgtgaggacttcatccgtggccgtgcctcggccgcagccctgaccgacttcaatgttctgcgctttgtcttggactcatctcaagagcctactgagcttttgcgtgacctagatccttccattcatgccgtcgtctgctccgaggaagcttatcccttcgcaagacagtactggcagcactcgggcgagggcgtctcgagccgacgagccgagttctgcagaggtttgttccacgagggccttcttgtactcgaggaccgctcggcctcgcctccttcgccacatcaggggaagttacgtcgcggtcctagacgataccagcgggcttcttccatggatgagaaaactggcactaatggggctaaacacgtgcctgccgctggcaagccaggcctaccagaccgggaactagccgatagtctcgaaagctcaaggttcttagaggagcgctttggtcgtaacctcgatgtatcactcgtggagaacgccaagtcggccatcagacgccgcatcgccggagtgctcacgacggacatagacttacaaagcaaatcacttccagtgatggactcgaatgcgcgtggggtcacggacctaaaagaagatgatatatacttaatgtcgacgggtatgaatgctatcttcacagcgcatcaggctctgctcagctgtcgtagaccacataagagcattagttacggatttccatacgttgatacgctcaagattctgcagaagttcggtcctggtgctatattttacggacatggatctgaatcagacttggacgacctcgagacccggctgaaggctggcgagcgatttctaggtctgttctgcgaatttcctggaaacccgctgctgacttgcccaaacctgagccgtatacggacgctggccgatacttacgacttcgccgtcatcgtcgacgagacgctcagcaatttcgtcaacgtgaatcttttgccattggcagatgcggtagtgagtagtctcaccaagatattctcgggcgacgccaatgtcatgggagggagcctggttctgaatccgcacgggcgctactacgcagagctcaagagtgccatgtcggatatatttgaagacacgtattgggcagaggacgtaatcttcatggaacgcaatagccgcgatttcatctctcggattcatcgtaccagcgctaacgcagaagcgatcagcgcaatgcttttagcccacccacttgtaacgcaggtcttctaccccaaatatgtcaagtcccggcccaactatgaggcttgtcgcctgcctggtggaggttatggcggtctcctctcgtgcacactgcgcagtaaggcccacgcagtcgcattccacgacgcgcttgaaacggccaaaggcccgagtcttggcaccaacttcaccatcacgtcgccatatgtcatcttggcgcactatcaagaactagattgggcggcaagttttggtgttgatccgaacttgctacgcatcagtgtgggactagaggacaatctaccatctatatttgccaaggcgctcgaggcggcggaggcggtttcagtaagctagttggggtagctcggctgtgatgctgactccattggttacgaagacaatgagtaataatgctacatggagtgcatgtaattttactcgacgttcgtaaatgactacgaccacatatgcaacacaagtaaacatgatcggatgaaaaatcgtagagagattagcacagctaggtgggaacctacgtcactatcgcagccgagcggcattattgtctcactctacgatagttttcacaagaactatcatatgcaaaacaagtaagaaagcatgtttggatttgaaaagcgtggtttaaacgaattagggctttcattcctatgacactcaagtcctgctactctatatctataccagggaaacaaaatacagttattggaatctccgcttgatgccaatagtgcgcccaacgccatgtcgaagctagataatcaagctcaatatgcatggtaaatataaacaggatgaagtgaattacaagaagaaaaacataatcttccgtgctttgctatgtatagtcgtcaaaacattccaaaacgaaatctggacaaaatcgacatggtccgataagggaatggtagtttagacgagtgaagaaaataccatttagttcgatcaacgacatttccccatcgtgaatcttccaacctatcgtgaccatcaatgctagggtatctcagaaagtgactttttttgctatgttgttctgcagtgttctcggtcatcgagggaggttaatctagaaattccactgcttaagccagagttcaacccactcgttcgtgaccggagggagtctcttcatggtctgacttttgcgcatagaaacaccagtctcgaggttgaagggtgtgtacttcacatcctcgggcatgatgagcgactcgtaaaagtcgagcaacttaagaccagtgagttcacgagcggttgcagacgtagccgttcgttgggcgtccttgagagcttgtacccattcagcccaaggaaccgagcgcgtaccagccggcatagacttgagaatggtgggagcaatgacctgccaatagccaagcttagggttcacagcgtggtacaccttgagctcatcctcgtcgacttcgtcattttgtccctttttagcgccgatgccggcaaactcagagatcatctcagcgaggaggtcaacgggcacccattcgatgcgatcaagcgtgcccagattcgaagggaggagcttaagatacttggacgtctccaggatggtaggaaaccactcttgcttgttccactcgcccttctcacctgtcgtgacggggccagcgatctgaccaacacggcaaacagaggcatcgacaccagaaaccttgacagcttgctcgagtaccatttcagccatcaacttggacaaactgtaaccctgtgtacctgcaacagtgagatcatggataggctgttccggcacaggagaatcgtcagcccacttggtgatgctaccgatggatgagatgtagaagatggcagtgccttgtcggctcttcttggcgaagtcgacgaggtgacgcacacctcggatgtgaggctcgaacgaggacagatcccaattgaaattcacaggccactggttatggatgatcttggtgacgcccttgaggagaacgtcgtacttgccctgaccgagaccaaagtcgggctttgacaggtcagcattgagaaactgtactttcttagctggccaaacttccgtcaggcccttagtcttgaagccagcacggttcctttcttcagcatcggacgatcggttgaagcagtagatccgtttgacactctcattcttaattagcgagttgagaagataggtacccaatgaaccggtggtaccagtgacgatcacgctctcgccgtctgttggtagatcccgagtgtatttggcaacgatgtcctcggcaagctggaatgtagcggccgaagcatcatatggtgcgtcgccatcggggtggatcgcatcgtagaaggcgttggagagcttctctagggtcgggttaccgtagatcaaggtaggcgcaagtgtgacttcgaccttggctccctcggctgcggcttttcgaagagcgccgaggatctggaatacaagtagggaatcgaaacctgcagcgaacaagttgtcgtcatcagtgagttccttcttaaggagcacgttgatgattccgcgcagtccatcagcaatcgtgctaggagatgagatgtccatgtctgaggtcaaggccttggcctcctcggcctcgagcttctcgtagaactcatcgatctccttctcgtaagacctgagcatacctggacgcttaacggttcccttatctgttcgcaagaatggctttcctgggacagtaagcatcatgttggagcggaaaatgcgagcgtgcgagggcgatgcagcattggccttttcgaccacctcagcatagattttatccaataactgctctagaacgatctcattggtgggaggagcaccgcgaagttccaagagcacggctgggtggaacctccggttgccaacaaccagagcggattgcacctcagggtgcgaggcaatacaagcctcgatatcgacaggttgaaccttctcaccgttggagaggacaacgacatcgtctgcacgaccgacacaaagccaacggccaggttccgtagggtgtggtgcgaacagatctttggtcgagtactcctcgtcttctgggaaagtatagaacagaccctgccagcgcttgtactctggtttcttgacgaaaaacagctcatataagcccggtgtaacctcgcgcaggtcagtccctaactctggaggaaacttgaatgttctccagtccttgcccttttgtggtgaaaccatggcccagataccaccttcagttgatccgtagacattgcgcactgctacgaccttgttgacaatgtcaccaagctgagacgacagagagcctccaccagtgatgatgtatttgcaggcactgagtttttcgagagtcttgggtgtcttggccagctcttcgacggtggatggaggaatgaagaacgctttgacagggacattcgaaatgatacgatcgatagtatcggcgctgataactccgttcgtaggttcggtgaccaccgtggaaccaagccagaagttcaacccgagcttgaccatgagactggcagcgtggaaccaggggaaggggttgaagacgagatcagaggcggcccacgaaggggtgatctcctcgccatcctcaagggctatctccctgatagcgtcaccactggcgattgtgccgagacgcatgatgattggcttgggaagaccagtggatcctgaggtgtgaagcacagcgagagggtctaggttagcctgctcccaggtcttggtgtaggggtatttggctacaggtcgaggatcgagcagctcttcaagtgtaggtgtctgcaatatctccatcggcctcttgtcgaggatctggttgacaagttcattgttttcggtggacttggcccagatccggcagtctgtcttatcgacgacggccaaactgccttctatactattccttggcgacacgaggagagcctaagatggtcaatttccatcccgaagataattcatattctgagattgatcacttactttgtaaccggttttaatacaggcgagaaccaggattgggtaggtgaggttgtctgtgtaaggaccgttgttagagcgtgaagcttgtagtacaagaatcgggggagtgaacatacgggggccgatgtaacctatggcctcgaaattcttgccccggccgagaacaccctcgagccagcggcatgctctattcacggcattggcgaagcgtaaagctgtgatatcctcgaagctgtcgccgttatctgttaaatgcgggatagtgtacacaatacgatcgggagtatcgcgagcggcctcgtcgacgacatttgggatcaggcggttacccgcaacggcgcggacgtatcccatggtgactggtatgcctctgtccgcttcctcctatttttccgtccctctcttcttcggtcgttatagtttgtatgcggatgagtgtcgacctgctatcaaggtccggcaatgtggagaagaagagacgaccaatggaggaacgccgtttggtgatgatgctggtgataatgattcgcaagaaggggagagccggggaagggtggttcaggatatagatatataac

SEQ ID NO: 13683 - DNA, 1173 bp, Muscodor strobelii
  misc_feature: SGI cDNA ID NO. 564491
  misc_feature: Reduced expression when VOC is produced
  misc_feature: Encodes the peptide sequence at SEQ ID NO 13684
atgattcttcataatgtgattaatgctggggaagatagctcagtgacggcatgggatattgagctcgaagccggacgagttaagagtgcgtggccgtctgaagcaacccaggatatgccatcccttttgcttctccctcctctctgccacccgcatatccacctcgacaaggcctacattcttacttgcaaccacggcgcctctccggcctacccggactactctgatctttgtctcacatcgggttcctttgacgaagctctcattaatacatcgaaagccaaagaacgatatacggcagatgacctgtatcttcgcgggtcgcaacttcttgctacaagctacgtccaaggcgtaacagctctacgagctttcgttgaagttgaccatgtcacgggaacactgccactgacgactgccattcgcctcaagaaagactttggacacctactggaattgcagatttgtattttcgctcaggatcccatcttctcaacgacgcacgcggaagccaaccggtctgccattacagatacgctgaaagacagtttgttctcggatttggtcggagccctcggcacgacaccatacgttgaagcttgtcgtgaagcgtcgctagcaaacatcgaatgggccattgtgactgcatacaagcttcatctagatttccacctagactataacctgaattcgtctccacgcccattgatcatgtctgtcattgatctgctgaagaagcatgaatgggtcaagcaagcagacaaatctaagaccatagttcttggtcactgtgcgcagctaaccgtcgtcgacgacaccgagcggaggacaatcgctagtgccatactttcaagccagctacccatccatttcatcggtttgccgacaagtgatctgttcatgatgggtcgaccgtccactgaaactgggtcaagccatcatcgaccacgagggacaattcatgtcccgtccatgatcaaggagcttagcctctcagcatgtctcggcgtcaacaacgtcggcaatgcctttacgccctttggaacgggggatccgttacagctcgcctcttggtacgtacctctattccctctctgtccttctaccaaacatgcgctcgtttccatgctccgtaaaatgacaaatggatttgggctaggacgactgacttga

SEQ ID NO: 13684 - protein, 390 aa, Muscodor strobelii
  misc_feature: SGI Peptide ID NO. 564491
  misc_feature (1)..(363): NCBI GI: 261354128 Blast Desc: amidohydrolase [Verticillium albo-atrum VaMs.102]
  misc_feature (1)..(363): NCBI GI: 46109844 Blast Desc: FG01804.1 [Gibberella zeae PH-1]
  misc_feature (33)..(349): NCBI GI: 154318971 Blast Desc: BC1G_02437 [Botryotinia fuckeliana B05.10] gi|150856868|gb|EDN32060.1| BC1G_02437 [Botryotinia fuckeliana B05.10]
  misc_feature (33)..(363): NCBI GI: 159130850 Blast Desc: zinc metallopeptidase, [Aspergillus fumigatus A1163]
  misc_feature (18)..(363): NCBI GI: 255953417 Blast Desc: Pc21g04150 [Penicillium chrysogenum Wisconsin 54-1255] gi|211589172|emb|CAP95312.1| Pc21g04150 [Penicillium chrysogenum Wisconsin 54-1255]
  misc_feature (3)..(363): NCBI GI: 145255435 Blast Desc: An18g05100 [Aspergillus niger] gi|134084555|emb|CAK43308.1| protein product [Aspergillus niger]
  misc_feature (16)..(363): NCBI GI: 67527972 Blast Desc: AN4228.2 [Aspergillus nidulans FGSC A4] gi|40740137|gb|EAA59327.1| AN4228.2 [Aspergillus nidulans FGSC A4] gi|259481163|tpe|CBF74438.1| TPA: zinc metallopeptidase, FGSC
  misc_feature (38)..(363): NCBI GI: 119496533 Blast Desc: zinc metallopeptidase, [Neosartorya fischeri NRRL 181] gi|119413202|gb|EAW23143.1| zinc metallopeptidase, [Neosartorya fischeri NRRL 181]
  misc_feature (2)..(363): NCBI GI: 115389334 Blast Desc: conserved [Aspergillus terreus NIH2624] gi|114194568|gb|EAU36268.1| conserved [Aspergillus terreus NIH2624]
  misc_feature (17)..(363): NCBI GI: 121702539 Blast Desc: zinc metallopeptidase, [Aspergillus clavatus NRRL 1] gi|119397677|gb|EAW08108.1| zinc metallopeptidase, [Aspergillus clavatus NRRL 1]
  misc_feature (81)..(355): SWISSPROT Homolog: EC 3.5.4.1 Cytosine deaminase
  misc_feature: Useful for introducing or modulating the production of volatile compounds
MILHNVINAGEDSSVTAWDIELEAGRVKSAWPSEATQDMPSLLLLPPLCHPHIHLDKAYILTCNHGASPAYPDYSDLCLTSGSFDEALINTSKAKERYTADDLYLRGSQLLATSYVQGVTALRAFVEVDHVTGTLPLTTAIRLKKDFGHLLELQICIFAQDPIFSTTHAEANRSAITDTLKDSLFSDLVGALGTTPYVEACREASLANIEWAIVTAYKLHLDFHLDYNLNSSPRPLIMSVIDLLKKHEWVKQADKSKTIVLGHCAQLTVVDDTERRTIASAILSSQLPIHFIGLPTSDLFMMGRPSTETGSSHHRPRGTIHVPSMIKELSLSACLGVNNVGNAFTPFGTGDPLQLASWYVPLFPLCPSTKHALVSMLRKMTNGFGLGRLT

SEQ ID NO: 13685 - DNA, 1272 bp, Muscodor strobelii
  misc_feature: SGI cDNA ID NO. 564492
  misc_feature: Reduced expression when VOC is produced
  misc_feature: Encodes the peptide sequence at SEQ ID NO 13686
atgaagtttgcgcaagagttccggaaggctctgcagcgagaagagttcccccagaaatgggtggattgcgccattccctatggccagctgaagaaatgtctcaagaaggtcaccaacgagctgcaagagcttggcttggggaaggacacgctggccgggctggccgagagtcactgttccgactccgatctgcgtttccgctactacctcgacgggaagacggaccactcagcccacttccgtcccaggctgaccgtcttcgtccagctcaaggacggtattgccacgccagagtcccctggcaacctacctttggccgccgcggcgccctccgtgggcggccaggacggcccgaacgaactggaggatgtacggcaagtcgaggtgcctttggtgtttgatgcgcagttcttcgagattctacagacggatgtgtccaacatcggcaccttacaagaggaggagcaagtcaagttgcagaaccaaatcagacagctcggccaggatttgggggaaacggtcgatccatcgcacgggcgcaaagccaaagctgatctcgaagtctggcggaagatctttgagttgtacctcgacgcccgcgtctttttctcggctcgcgagagggattctggtgcccggacaagcgctcaggctgtggaacagcttcactggtttcaagagcaagtcgtgcagcgcaggctcgtgcagaagctgaaatcaggcagcagccaggccgcatttggtagcttcgtacagctcaatgttgctctactttctatcctaaaatttcgtgaaatcaacaacctcgctgtgcagaagatactgaagaagttcgataaacggacgtctctcggcgtctccaaaacatttcccgcggctgtcaattccgatcgtcttctagcttcaagcgtggcacgggatgtgtgcgcccagatgtccacccagttgatctccactgtcccacaactcgacgactacctgtgtcctatttgtctctccgttgcttactggccggtgaagctacagtgtcagcacactttctgcagtcggtgtttggtcaaaatgtctcgcaagggcgagagattctgccctctgtgtcgggccgacaccataatgctcgctggactcgagaatttcgatgctgaccgcgctgccttccttcgcaaatactttcccaaggaggtgaaagaaaaggtacgagcaaacgaacgcgaacgaaaccaagaaatattcggacctggtcataagaatgtggaatgctgcgtcatgtag

SEQ ID NO: 13686 - protein, 423 aa, Muscodor strobelii
  misc_feature: SGI Peptide ID NO. 564492
  misc_feature (328)..(366): Pfam Id: PF00097 Pfam Desc: Zinc finger, C3HC4 type (RING finger)
  misc_feature (1)..(423): NCBI GI: 39943004 Blast Desc: MGG_03582 [Magnaporthe grisea 70-15] gi|145009849|gb|EDJ94505.1| MGG_03582 [Magnaporthe grisea 70-15]
  misc_feature (1)..(375): NCBI GI: 261361140 Blast Desc: RING-14 protein [Verticillium albo-atrum VaMs.102]
  misc_feature (127)..(423): NCBI GI: 46136681 Blast Desc: FG09856.1 [Gibberella zeae PH-1] gi|116090839|gb|ABJ56001.1| RING-14 protein [Gibberella zeae]
  misc_feature (109)..(423): NCBI GI: 256732425 Blast Desc: NECHADRAFT_38033 [Nectria haematococca mpVI 77-13-4]
  misc_feature (1)..(412): NCBI GI: 189091772 Blast Desc: [Podospora anserina] gi|188219239|emb|CAP49219.1| protein product [Podospora anserina]
  misc_feature (1)..(412): NCBI GI: 27802995 Blast Desc: protein product [Podospora anserina]
  misc_feature (1)..(423): NCBI GI: 189194477 Blast Desc: RING-14 protein [Pyrenophora tritici-repentis Pt-1C-BFP] gi|187979141|gb|EDU45767.1| RING-14 protein [Pyrenophora tritici-repentis Pt-1C-BFP]
  misc_feature (1)..(423): NCBI GI: 226284507 Blast Desc: RING-14 protein [Paracoccidioides brasiliensis Pb01]
  misc_feature (1)..(423): NCBI GI: 226294413 Blast Desc: RING-14 protein [Paracoccidioides brasiliensis Pb18]
  misc_feature (1)..(412): NCBI GI: 240106528 Blast Desc: SPX domain containing protein [Coccidioides posadasii C735 delta SOWgp]
  misc_feature: Useful for introducing or modulating the production of volatile compounds
MKFAQEFRKALQREEFPQKWVDCAIPYGQLKKCLKKVTNELQELGLGKDTLAGLAESHCSDSDLRFRYYLDGKTDHSAHFRPRLTVFVQLKDGIATPESPGNLPLAAAAPSVGGQDGPNELEDVRQVEVPLVFDAQFFEILQTDVSNIGTLQEEEQVKLQNQIRQLGQDLGETVDPSHGRKAKADLEVWRKIFELYLDARVFFSARERDSGARTSAQAVEQLHWFQEQVVQRRLVQKLKSGSSQAAFGSFVQLNVALLSILKFREINNLAVQKILKKFDKRTSLGVSKTFPAAVNSDRLLASSVARDVCAQMSTQLISTVPQLDDYLCPICLSVAYWPVKLQCQHTFCSRCLVKMSRKGERFCPLCRADTIMLAGLENFDADRAAFLRKYFPKEVKEKVRANERERNQEIFGPGHKNVECCVM

SEQ ID NO: 13687 - DNA, 11622 bp, Muscodor strobelii; identical to SEQ ID NO: 13682
  misc_feature: SGI EST ID NO. CUFF.33630.1
  misc_feature: Variant of the nucleotide sequence at SEQ ID NO 13685

SEQ ID NO: 13688 - DNA, 426 bp, Muscodor strobelii
  misc_feature: SGI cDNA ID NO. 564493
  misc_feature: Reduced expression when VOC is produced
  misc_feature: Encodes the peptide sequence at SEQ ID NO 13689
atgggcgccgagcagtcgtccacgcgacgccctgccgccgtcgatgctgctccgaagaagacggactactacgagctcctgggcgtcgagcgctcggcgggcgacgaggagatcaagaaggcgtaccggcggaaggcgctcgagctgcacccggaccgcaactacggcgacgtcgagaatgccacgcgcaagtttgccgacgtccaggccgcctacgaggtgctctcggacccccaggagcgcgcctggtacgacgcccacagcgacgccatcctgcgcggcgacgacccggccgacttcgacgccgcccccgagttccgcaacgtccgcctcaccaccgccgacgacatcttcgccctgatgggccgcttcacccgcagcgtgcccctcgacgactcgcccgccggcttcttcaccgtcctgcgc

SEQ ID NO: 13689 - protein, 142 aa, Muscodor strobelii
  misc_feature: SGI Peptide ID NO. 564493
  misc_feature (22)..(85): Pfam Id: PF00226 Pfam Desc: DnaJ domain
  misc_feature (1)..(141): NCBI GI: 39943002 Blast Desc: MGG_03581 [Magnaporthe grisea 70-15] gi|145009850|gb|EDJ94506.1| MGG_03581 [Magnaporthe grisea 70-15]
  misc_feature (1)..(141): NCBI GI: 261361139 Blast Desc: DnaJ domain-containing protein [Verticillium albo-atrum VaMs.102]
  misc_feature (1)..(142): NCBI GI: 256732864 Blast Desc: NECHADRAFT_92391 [Nectria haematococca mpVI 77-13-4]
  misc_feature (1)..(142): NCBI GI: 46136683 Blast Desc: FG09857.1 [Gibberella zeae PH-1]
  misc_feature (1)..(142): NCBI GI: 156042332 Blast Desc: SS1G_10963 [Sclerotinia sclerotiorum 1980] gi|154695350|gb|EDN95088.1| SS1G_10963 [Sclerotinia sclerotiorum 1980]
  misc_feature (1)..(142): NCBI GI: 154300264 Blast Desc: BC1G_11321 [Botryotinia fuckeliana B05.10] gi|150856644|gb|EDN31836.1| BC1G_11321 [Botryotinia fuckeliana B05.10]
  misc_feature (1)..(141): NCBI GI: 189091770 Blast Desc: [Podospora anserina] gi|27802994|emb|CAD60697.1| protein product [Podospora anserina] gi|188219238|emb|CAP49218.1| protein product [Podospora anserina]
  misc_feature (1)..(141): NCBI GI: 116179670 Blast Desc: CHGG_00463 [Chaetomium globosum CBS 148.51] gi|88184760|gb|EAQ92228.1| CHGG_00463 [Chaetomium globosum CBS 148.51]
  misc_feature (1)..(141): NCBI GI: 85067702 Blast Desc: NCU02432 [Neurospora crassa OR74A] gi|28920859|gb|EAA30201.1| conserved [Neurospora crassa OR74A]
  misc_feature (1)..(142): NCBI GI: 261195787 Blast Desc: C2H2 finger domain-containing protein [Ajellomyces dermatitidis SLH14081] gi|239587430|gb|EEQ70073.1| C2H2 finger domain-containing protein [Ajellomyces dermatitidis SLH14081]
  misc_feature: Useful for introducing or modulating the production of volatile compounds
MGAEQSSTRRPAAVDAAPKKTDYYELLGVERSAGDEEIKKAYRRKALELHPDRNYGDVENATRKFADVQAAYEVLSDPQERAWYDAHSDAILRGDDPADFDAAPEFRNVRLTTADDIFALMGRFTRSVPLDDSPAGFFTVLR

SEQ ID NO: 13690 - DNA, 11769 bp, Muscodor strobelii; identical to SEQ ID NO: 13679
  misc_feature: SGI EST ID NO. CUFF.33629.0
  misc_feature: Variant of the nucleotide sequence at SEQ ID NO 13688

SEQ ID NO: 13691 - DNA, 2130 bp, Muscodor strobelii
  misc_feature: SGI cDNA ID NO. 564494
  misc_feature: Encodes the peptide sequence at SEQ ID NO 13692
atgccgcccaccacagcagctgccatggcctccacaatgtccaaagctgcgatgtctgcgagaactccagttgcgacggttacaagcgcaaatccaccgtctagcagcatcgcgaggtcgtcggcatcaacgccaacaaacgccatatccttgcagccgccgttgacaccgccagccagtgcaacgagcgcgagatcgccaattgggaaaataggcgggacgaagcgcacgcgctcgagcgaatctaaagacagcagaatcgcgaaatccaggcaacggccggtcttctcaaagagtatggagcctccgatattatctttttataacggcactcagcctgtccctctaccttcacgatttgccaatgtcaagcgacgcttagtcgccggccatgagtccgcgctggaagcttcgtggggtcgattgattgcggcattgcgcgacgaggtgaagtatatcgacaagcaccgcgcggagctcattccgtcaattgactttaatgacatccacgatgcatccaaagtagcgccatttggcgatagcttaaaacgccatggcattggcgttattcgcggtgtcgtgccacaagaagttgcaagtcactgggtggaagaaaccaaaaaataccttgaaacgaaacacgatttcaaagcaccaccagcccaggatccaacttgtttcgatttcttctggactccggcacaagttcgatcccgcgcgcatcctcacatgcttaaggcgcaacgtttcgccatgtcattatggaacgcaaatgatgacgaccgtctggcgacaaaatttcccatcacgtatgcagatcgtattagaatagaatcgagcgctaatggaatcaccacaatcaatggtgtcgcagccgccgctgcatccgcttctgccgaagacagcttgatcgctgcggctgcggcggcatcggaagtagctatggcccagatcgataatgggagtttggagcgatgggaatcggatgggtatgggcgctgtggtctttatgatgatattttcaagggtaattgggagtcgtacaacgcatgggatcccgcgggtcgcatcaatgcgacgtcggatctttacaacggtgcaggcgcttgctccatgatgcgtctatttcaaggtattcttgctttgacggtagtcgaacctggcatgattagccttctaccttcaccaaaactgtctactgtatatttcttgttacggccctttttctcgccaaaggaaccaactccggagcaaggtgccagcgtcgaacagtgggagaaatatctcgatccctcgaattgggctctggataaagagcaatctacgatcattcacggcgcggtaccaggacatgcacagcgtgtgacagcagcatggcacccacaccttgaactcgacaagagtctcgtaactcctccgacgctacagccgggtgactacattatttggcatcctgatcaagcgtatcagttctcgaatacacactctcgcccaggtcccaagcccggatcgtcggacgcggaagagacgtcaatgctggtgtactctccagctgctccgttgacccaaacgaatgctctattccttgctcgccaacgaaaggctttcttacgcgggcaccctggtcctgacttcgattccactggtacgggccttggcagcgaagcgccgcacacgggacgccccagcgaaaaggatatcaaagaagtcggtggagaagagggcttgcgggctatgggattggcgccttggatagcgagtaaagatgcaacgccattggatacaccacgggatacaccacgtgctacgcccagaaccaggtcgccggtcgaggagaagaaggagaaggatgtggaaatggtcgtgagtaatggaagtgaaagctcgaattcaacacgcccaagctctcgctcagaggctgaggtcgtgagactcgcgaacatcattcttttcccagaccgctatgatttttacatgccgacaagagcgagcagtcctgtgccatcggcgaaagacaaagacaaggatgtggacagagtaccagtgcccgagaaagcgggcgaaaagatagctgggaaactgaacgaggtaaagaaagagatagagggcaggacacagtctaaaccatga

SEQ ID NO: 13692 - protein, 709 aa, Muscodor strobelii
  misc_feature: SGI Peptide ID NO. 564494
  misc_feature (97)..(708): NCBI GI: 171678133 Blast Desc: protein product [Podospora anserina] gi|170937136|emb|CAP61793.1| protein product [Podospora anserina]
  misc_feature (97)..(665): NCBI GI: 116205860 Blast Desc: CHGG_02223 [Chaetomium globosum CBS 148.51] gi|88182820|gb|EAQ90288.1| CHGG_02223 [Chaetomium globosum CBS 148.51]
  misc_feature (76)..(704): NCBI GI: 85095509 Blast Desc: NCU05846 [Neurospora crassa OR74A] gi|28921565|gb|EAA30870.1| conserved [Neurospora crassa OR74A]
  misc_feature (80)..(666): NCBI GI: 149211301 Blast Desc: MGCH7_ch7g1108 [Magnaporthe grisea 70-15] gi|86197063|gb|EAQ71701.1| MGCH7_ch7g1108 [Magnaporthe grisea 70-15]
  misc_feature (80)..(666): NCBI GI: 39969437 Blast Desc: MGG_10329 [Magnaporthe grisea 70-15] gi|145009523|gb|EDJ94190.1| MGG_10329 [Magnaporthe grisea 70-15]
  misc_feature (101)..(654): NCBI GI: 256724832 Blast Desc: NECHADRAFT_11754 [Nectria haematococca mpVI 77-13-4]
  misc_feature (98)..(604): NCBI GI: 261361557 Blast Desc: conserved [Verticillium albo-atrum VaMs.102]
  misc_feature (3)..(654): NCBI GI: 46121991 Blast Desc: FG05373.1 [Gibberella zeae PH-1]
  misc_feature (107)..(657): NCBI GI: 256735417 Blast Desc: NECHADRAFT_31259 [Nectria haematococca mpVI 77-13-4]
  misc_feature (111)..(658): NCBI GI: 171695046 Blast Desc: protein product [Podospora anserina] gi|170947765|emb|CAP59928.1| protein product [Podospora anserina]
MPPTTAAAMASTMSKAAMSARTPVATVTSANPPSSSIARSSASTPTNAISLQPPLTPPASATSARSPIGKIGGTKRTRSSESKDSRIAKSRQRPVFSKSMEPPILSFYNGTQPVPLPSRFANVKRRLVAGHESALEASWGRLIAALRDEVKYIDKHRAELIPSIDFNDIHDASKVAPFGDSLKRHGIGVIRGVVPQEVASHWVEETKKYLETKHDFKAPPAQDPTCFDFFWTPAQVRSRAHPHMLKAQRFAMSLWNANDDDRLATKFPITYADRIRIESSANGITTINGVAAAAASASAEDSLIAAAAAASEVAMAQIDNGSLERWESDGYGRCGLYDDIFKGNWESYNAWDPAGRINATSDLYNGAGACSMMRLFQGILALTVVEPGMISLLPSPKLSTVYFLLRPFFSPKEPTPEQGASVEQWEKYLDPSNWALDKEQSTIIHGAVPGHAQRVTAAWHPHLELDKSLVTPPTLQPGDYIIWHPDQAYQFSNTHSRPGPKPGSSDAEETSMLVYSPAAPLTQTNALFLARQRKAFLRGHPGPDFDSTGTGLGSEAPHTGRPSEKDIKEVGGEEGLRAMGLAPWIASKDATPLDTPRDTPRATPRTRSPVEEKKEKDVEMVVSNGSESSNSTRPSSRSEAEVVRLANIILFPDRYDFYMPTRASSPVPSAKDKDKDVDRVPVPEKAGEKIAGKLNEVKKEIEGRTQSKP

SEQ ID NO: 13693 - DNA, 678 bp, Muscodor strobelii
  misc_feature: SGI cDNA ID NO. 564495
  misc_feature: Encodes the peptide sequence at SEQ ID NO 13694
atgctgtcatccttcgttcttgccgctgtcgctctgctcccgggtgcattttcgctccctcaactcggtgatctcttccactcgggagactcacgagcaaggtctattgaaactagacagggctactactggtccttttggtctgagggtacgggtaactggaaatgcaacaatggcgccggtggttcttacacggcaacatggtctgggaataatggtggctttgtctgtggaaagggatggagtcctggaggcaatagagccgtgaaatatagcggcacctatgatcccaagggccccggatatctctctatctacgggtggactcgaaatcccttgatcgaatactacatcatggattcccacggagatctcgctcctaacgagccgtggacagccaagggcaacttcacaattgatggagaggggacatacgcagtatacacctctactcgggttaataagccttcaatcgttggaactgcgacttttcagcagtactggtcggtgcgtaatgagagtagagttggcggcaccatcaccactggcaagcatttcgatgcctggaagagcttcggcatgaatctaggcggacacgactatatgatccttgctacggaaggatacacaaatggtgcaaacgggccgagcggatcgtcgtcgcttacgttatcgtga

SEQ ID NO: 13694 - protein, 225 aa, Muscodor strobelii
  misc_feature: SGI Peptide ID NO. 564495
  misc_feature (37)..(224): Pfam Id: PF00457 Pfam Desc: Glycosyl hydrolases family 11
  misc_feature (1)..(225): NCBI GI: 116179002 Blast Desc: CHGG_00129 [Chaetomium globosum CBS 148.51] gi|88184426|gb|EAQ91894.1| CHGG_00129 [Chaetomium globosum CBS 148.51]
  misc_feature (1)..(209): NCBI GI: 171680488 Blast Desc: protein product [Podospora anserina] gi|170939871|emb|CAP65097.1| protein product [Podospora anserina]
  misc_feature (4)..(210): NCBI GI: 116182700 Blast Desc: CHGG_01978 [Chaetomium globosum CBS 148.51] gi|88186275|gb|EAQ93743.1| CHGG_01978 [Chaetomium globosum CBS 148.51]
  misc_feature (13)..(212): NCBI GI: 169862294 Blast Desc: CC1G_12474 [Coprinopsis cinerea okayama7#130] gi|116501139|gb|EAU84034.1| CC1G_12474 [Coprinopsis cinerea okayama7#130]
  misc_feature (33)..(225): NCBI GI: 23477178 Blast Desc: xyn11C [Chaetomium thermophilum]
  misc_feature (2)..(225): NCBI GI: 39946222 Blast Desc: MGG_08401 [Magnaporthe grisea 70-15] gi|145019940|gb|EDK04168.1| MGG_08401 [Magnaporthe grisea 70-15]
  misc_feature (1)..(224): NCBI GI: 1351450 Blast Desc: XYNB_ASPKA RecName: Full=Endo-1,4-beta-xylanase B; Short=Xylanase B; AltName: Full=1,4-beta-D-xylan xylanohydrolase B; Flags: Precursor gi|1065986|dbj|BAA07264.1| xylanase-B
  misc_feature (6)..(225): NCBI GI: 84369987 Blast Desc: endo-1,4-beta-xylanase [Penicillium citrinum]
  misc_feature (16)..(224): NCBI GI: 169778667 Blast Desc: [Aspergillus oryzae RIB40] gi|12082170|dbj|BAB20794.1| xylanase G2 [Aspergillus oryzae] gi|83772537|dbj|BAE62665.1| protein product [Aspergillus oryzae] gi|212524196|gb|ACJ26384.1|
  misc_feature (4)..(225): NCBI GI: 256731913 Blast Desc: NECHADRAFT_106153 [Nectria haematococca mpVI 77-13-4]
  misc_feature (18)..(224): SWISSPROT Homolog: EC 3.2.1.8 Endo-1,4-beta-xylanase
MLSSFVLAAVALLPGAFSLPQLGDLFHSGDSRARSIETRQGYYWSFWSEGTGNWKCNNGAGGSYTATWSGNNGGFVCGKGWSPGGNRAVKYSGTYDPKGPGYLSIYGWTRNPLIEYYIMDSHGDLAPNEPWTAKGNFTIDGEGTYAVYTSTRVNKPSIVGTATFQQYWSVRNESRVGGTITTGKHFDAWKSFGMNLGGHDYMILATEGYTNGANGPSGSSSLTLS

SEQ ID NO: 13695 - DNA, 2793 bp, Muscodor strobelii
  misc_feature: SGI EST ID NO. CUFF.32707.0
  misc_feature: Variant of the nucleotide sequence at SEQ ID NO 13693
cagcagtactggtcggtgcgtaatgagagtagagttggcggcaccatcaccactggcaagcatttcgatgcctggaagagcttcggcatgaatctaggcggacacgactatatgatccttgctacggaaggatacacaaatggtgcaaacgggccgagcggatcgtcgtcgcttacgttatcgtgagagtcttgtcgagtttctttagtttgctgcttgagtatgatatacattttagtaggatacctagaaaccaagtatcaaagaattgtaccccaaaactccgtaattgctgttctgttgggagaagccatgatttgaaggcgcaaatgattgtatgatattgtgtcttcgctctagtgtcgaaagatcactgattcttgtaaataccaactcttgatatcagaagttcccaacccaagctatatacaacaatgcacatgggccccgtgctaatccacaagtcgatactaaatcgatatttgacgaatggctcatggtttagactgtgtcctgccctctatctctttctttacctcgttcagtttcccagctatcttttcgcccgctttctcgggcactggtactctgtccacatccttgtctttgtctttcgccgatggcacaggactgctcgctcttgtcggcatgtaaaaatcatagcggtctgggaaaagaatgatgttcgcgagtctcacgacctcagcctctgagcgagagcttgggcgtgttgaattcgagctttcacttccattactcacgaccatttccacatccttctccttcttctcctcgaccggcgacctggttctgggcgtagcacgtggtgtatcccgtggtgtatccaatggcgttgcatctttactcgctatccaaggcgccaatcccatagcccgcaagccctcttctccaccgacttctttgatatccttttcgctggggcgtcccgtgtgcggcgcttcgctgccaaggcccgtaccagtggaatcgaagtcaggaccagggtgcccgcgtaagaaagcctttcgttggcgagcaaggaatagagcattcgtttgggtcaacggagcagctggagagtacaccagcattgacgtctcttccgcgtccgacgatccgggcttgggacctgggcgagagtgtgtattcgagaactgatacgcttgatcaggatgccaaataatgtagtcacccggctgtagcgtcggaggagttacgagactcttgtcgagttcaaggtgtgggtgccatgctgctgtcacacgctgtgcatgtcctggtaccgcgccgtgaatgatcgtagattgctctttatccagagcccaattcgagggatcgagatatttctcccactgttcgacgctggcaccttgctccggagttggttcctttggcgagaaaaagggccgtaacaagaaatatacagtagacagttttggtgaaggtagaaggctaatcatgccaggttcgactaccgtcaaagcaagaataccttgaaatagacgcatcatggagcaagcgcctgcaccgttgtaaagatccgacgtcgcattgatgcgacccgcgggatcccatgcgttgtacgactcccaattacccttgaaaatatcatcataaagaccacagcgcccatacccatccgattcccatcgctccaaactcccattatcgatctgggccatagctacttccgatgccgccgcagccgcagcgatcaagctgtcttcggcagaagcggatgcagcggcggctgcgacaccattgattgtggtgattccattagcgctcgattctattctaatacgatctgcatacgtgatgggaaattttgtcgccagacggtcgtcatcatttgcgttccataatgacatggcgaaacgttgcgccttaagcatgtgaggatgcgcgcgggatcgaacttgtgccggagtccagaagaaatcgaaacaagttggatcctgggctggtggtgctttgaaatcgtgtttcgtttcaaggtattttttggtttcttccacccagtgacttgcaacttcttgtggcacgacaccgcgaataacgccaatgccatggcgttttaagctatcgccaaatggcgctactttggatgcatcgtggatgtcattaaagtcaattgacggaatgagctccgcgcggtgcttgtcgatatacttcacctcgtcgcgcaatgccgcaatcaatcgaccccacgaagcttccagcgcggactcatggccggcgactaagcgtcgcttgacattggcaaatcgtgaaggtagagggacaggctgagtgccgttataaaaagataatatcggaggctccatactctttgagaagaccggccgttgcctggatttcgcgattctgctgtctttagattcgctcgagcgcgtgcgcttcgtcccgcctattttcccaattggcgatctcgcgctcgttgcactggctggcggtgtcaacggcggctgcaaggatatggcgtttgttggcgttgatgccgacgacctcgcgatgctgctagacggtggatttgcgcttgtaaccgtcgcaactggagttctcgcagacatcgcagctttggacattgtggaggccatggcagctgctgtggtgggcggcatcttgagtgtcgcactgacgttggcagccgctgcgactacgctccccagttgagaggggagcggcgcggcggctgtgctctgtaccacgtctacgttggacattatcaaccttttcccccgtgtcttctgacctctgagtctgctgcagtgtctggttcggccattcaga

SEQ ID NO: 13696 - DNA, 3210 bp, Muscodor strobelii
  misc_feature: SGI cDNA ID NO. 564496
  misc_feature: Encodes the peptide sequence at SEQ ID NO 13697
atggccgaatctaaggagcattctgaaaaccacgacattggcacgactgccaacactgccgactctgactctgcagcgtttccatcttcagataccccgaaggaagcgaagtcacatgaagataaacccaagtcgcacgaggaagaggatgcttctgagaatccattgttgttacatgctacgggaaaagaagcgaaagctgccgtacgagaagccatcaaaaaagtcgcgaccttcaacaaattgaaagcctccgcgtcctcgatcgatctgtccgatgagcttgataaactcatcaatgtccttgatgacgtagatgaagatcctgaaataacaaccggagagaaagatgcaacagggctctcccctgaagatgaagagtatcgccactgttcgattaagctgctctccatgaaaatgttaggaaagaagcttccgagcggctcgattcttgtcttctacgaacaggctccaccattgtcgatttacaataactccaagactccaaagaaagattttaggacggcccatagtgattcacacaatatcgagaagccaatgcgaatcctgatcagatctccttacatgttgcaagagttagaaaaaatttccggtctgacattcaatgggatatcaagcatcgagttgataccacctttcaaactactggtacattgttgggatggcttcagcgcggctctagagaagcatcgggagaagctcgctgaactagacctgcccaaagatacggaggcatcttctccactcgtgtcaaacagcgatgacaaggaccaatctggacctccgaaacctgagggcgattttgtcaggtctaaccttgagtgtcgcattactcatttgcagactttagcacatttcactaggaatgagttagggtatctcattgggctcaaagagaaagttcgagatggctcacttgcaacgataacgtttgaggaactctatcatcttttctctcctggagatatcgtcgtcagaagattagatcgagatggagacgatgattcattagaagttttgcaggtatatggtgttactggaggccgcaaaaggcttgcgagattcatcgggaatactcgaatagaccctgaagaggcagataatcttcctaacgcgggggtagggacgtggacagatgtggtcgtcgactgcgttgctatgcgatggaacggtcgtaaggtcggacccgtgcgcgagattcataggcttcagcattttatcggagatagagacatcaaagagctcgagatatatcccatccagtttcacgaaaagcccgaagaactttgcgaaaaactgaaagagcgaggccaacgggtcattaactgctttggccataagaagtataacggaagaacagtaaaacctaatcttccgcctgactcatcagacgacgaagacgacgatttcctctttcaagatatcgataatgatatctatgtagacatggaaactttccatagatcacacatagtgagattcgaccggctctggagagttaggccaagcctcagagaggtttcggaattcatttccaacagaacagtgtactacactatcggagatcatgacgttgatgcattaaaatcagatcgatttatgcaccaaaacttccatctgactcaggctagaacaattgtggaactacggagtgcgccacatcattatttgatgctcctgcctgagggtataccagcttgggatttacggcgacgttcatgggtctgggtacacatcgacaagatcgaggaaatcgacaagagcgaacaagcgagatctcgtggatgggatgacttggtcattcataagggttctagcgaactcctgctttcacttgtagagaaccatgcatcgtcagctgaacataaaagggggaagaatgcatcaggtcatcagattccgaccgctcagatcgatcttatcaaggggaaagggcgcggtctgatcattctcctctatggccctcctggaacaggcaagacttcgacagcagagacaatagccgcgtacactggcaaacctttgtatgcaataacatgcggagatattggcacagggcctgaagagatacaaagaagcttaacacgacacactgagcgagcagagaagtggggttgtgttcttctcattgacgaagccgatgtctttcttgtaagtatctgtcttatcccgtttcctggctatcgaaggacgtggaatgacattgaaagaaatgcaatggtttctgtgtttttgcgacatctggaatactacactggaattcttttcttaacgacgaacatagtcggtatcatagacgaggccttcaaatcgcgcatccatgtcgccttgcgctacgacccgatcgacatgaactcaaccgagagcatctggaataacctactagacgggatcatcagagataatgaatacgcagacgtcaagatcgaattcaaacgagaaatattaatggactttgctcgcaaccactatgaggaaaacgaaggaaccgaaactacatggaacgctcgacagatccggaatgctttctccatggccattgcaatgggccagttcgatcgcatggagcggatccgaaaacgcaaattaacgcctagcgaagtgattaagtcctccaacagaagcctccataccatcaagctgacgagccgtaattttgctaaaattgccgaagcatcaaccgactttgaacagtacatcagctccgttcgtggatcagaccgcaagaacgcccttgacaatcaacaacgagatgactattttggaggacccgccgcgacaccgcctcgcaagaactatcgacaacacgatggagataacatgtcttccgtacaaaagggccgcctcgccctacctttgcgcacacgagtagcaaactcaaggaaactttcgagacggcctatgtatagagacgaagaggaggaagacgatgatgacgaagacgaagaagaagaattgcaacagttgcaaactcgacggaggaaggagaggaaatcaaccaaagacgatgacgaccatgacgaagagcaagcacacaaccggcgacgaaagggaaaacaaattgcaaaggatgaggaggagaaggaggaggacgacgacgacaatgagcacatccggaagaaagagaccaagactcggcaacgaaagggaagaggtaattatgaggacgatgactcagaagacgagtag

SEQ ID NO: 13697 - protein, 1069 aa, Muscodor strobelii
  misc_feature: SGI Peptide ID NO. 564496
  misc_feature (656)..(855): Pfam Id: PF00004 Pfam Desc: ATPase family associated with various cellular activities (AAA)
  misc_feature (656)..(721): Pfam Id: PF00004 Pfam Desc: ATPase family associated with various cellular activities (AAA)
  misc_feature (286)..(940): NCBI GI: 169614862 Blast Desc: SNOG_10581 [Phaeosphaeria nodorum SN15] gi|160702838|gb|EAT81975.2| SNOG_10581 [Phaeosphaeria nodorum SN15]
  misc_feature (89)..(1041): NCBI GI: 46117366 Blast Desc: FG04525.1 [Gibberella zeae PH-1]
  misc_feature (179)..(1010): NCBI GI: 154279082 Blast Desc: [Ajellomyces capsulatus NAm1] gi|150412297|gb|EDN07684.1| [Ajellomyces capsulatus NAm1]
  misc_feature (187)..(935): NCBI GI: 255950188 Blast Desc: Pc22g19580 [Penicillium chrysogenum Wisconsin 54-1255] gi|211592878|emb|CAP99246.1| Pc22g19580 [Penicillium chrysogenum Wisconsin 54-1255]
  misc_feature (179)..(912): NCBI GI: 225562337 Blast Desc: conserved [Ajellomyces capsulatus G186AR]
  misc_feature (162)..(870): NCBI GI: 240281176 Blast Desc: conserved [Ajellomyces capsulatus H143]
  misc_feature (180)..(912): NCBI GI: 171690692 Blast Desc: protein product [Podospora anserina] gi|170945294|emb|CAP71406.1| protein product [Podospora anserina]
  misc_feature (138)..(912): NCBI GI: 256724746 Blast Desc: NECHADRAFT_84360 [Nectria haematococca mpVI 77-13-4]
  misc_feature (123)..(912): NCBI GI: 226282273 Blast Desc: conserved [Paracoccidioides brasiliensis Pb01]
  misc_feature (123)..(912): NCBI GI: 226292566 Blast Desc: conserved [Paracoccidioides brasiliensis Pb18]
MAESKEHSENHDIGTTANTADSDSAAFPSSDTPKEAKSHEDKPKSHEEEDASENPLLLHATGKEAKAAVREAIKKVATFNKLKASASSIDLSDELDKLINVLDDVDEDPEITTGEKDATGLSPEDEEYRHCSIKLLSMKMLGKKLPSGSILVFYEQAPPLSIYNNSKTPKKDFRTAHSDSHNIEKPMRILIRSPYMLQELEKISGLTFNGISSIELIPPFKLLVHCWDGFSAALEKHREKLAELDLPKDTEASSPLVSNSDDKDQSGPPKPEGDFVRSNLECRITHLQTLAHFTRNELGYLIGLKEKVRDGSLATITFEELYHLFSPGDIVVRRLDRDGDDDSLEVLQVYGVTGGRKRLARFIGNTRIDPEEADNLPNAGVGTWTDVVVDCVAMRWNGRKVGPVREIHRLQHFIGDRDIKELEIYPIQFHEKPEELCEKLKERGQRVINCFGHKKYNGRTVKPNLPPDSSDDEDDDFLFQDIDNDIYVDMETFHRSHIVRFDRLWRVRPSLREVSEFISNRTVYYTIGDHDVDALKSDRFMHQNFHLTQARTIVELRSAPHHYLMLLPEGIPAWDLRRRSWVWVHIDKIEEIDKSEQARSRGWDDLVIHKGSSELLLSLVENHASSAEHKRGKNASGHQIPTAQIDLIKGKGRGLIILLYGPPGTGKTSTAETIAAYTGKPLYAITCGDIGTGPEEIQRSLTRHTERAEKWGCVLLIDEADVFLVSICLIPFPGYRRTWNDIERNAMVSVFLRHLEYYTGILFLTTNIVGIIDEAFKSRIHVALRYDPIDMNSTESIWNNLLDGIIRDNEYADVKIEFKREILMDFARNHYEENEGTETTWNARQIRNAFSMAIAMGQFDRMERIRKRKLTPSEVIKSSNRSLHTIKLTSRNFAKIAEASTDFEQYISSVRGSDRKNALDNQQRDDYFGGPAATPPRKNYRQHDGDNMSSVQKGRLALPLRTRVANSRKLSRRPMYRDEEEEDDDDEDEEEELQQLQTRRRKERKSTKDDDDHDEEQAHNRRRKGKQIAKDEEEKEEDDDDNEHIRKKETKTRQRKGRGNYEDDDSEDE

SEQ ID NO: 13698 - DNA, 1512 bp, Muscodor strobelii
  misc_feature: SGI EST ID NO. CUFF.32722.0
  misc_feature: Variant of the nucleotide sequence at SEQ ID NO 13696
caagcatcgagttgataccacctttcaaactactggtacattgttgggatggcttcagcgcggctctagagaagcatcgggagaagctcgctgaactagacctgcccaaagatacggaggcatcttctccactcgtgtcaaacagcgatgacaaggaccaatctggacctccgaaacctgagggcgattttgtcaggtctaaccttgagtgtcgcattactcatttgcagactttagcacatttcactaggaatgagttagggtatctcattgggctcaaagagaaagttcgagatggctcacttgcaacgataacgtttgaggaactctatcatcttttctctcctggagatatcgtcgtcagaagattagatcgagatggagacgatgattcattagaagttttgcaggtatatggtgttactggaggccgcaaaaggcttgcgagattcatcgggaatactcgaatagaccctgaagaggcagataatcttcctaacgcgggggtagggacgtggacagatgtggtcgtcgactgcgttgctatgcgatggaacggtcgtaaggtcggacccgtgcgcgagattcataggcttcagcattttatcggagatagagacatcaaagagctcgagatatatcccatccagtttcacgaaaagcccgaagaactttgcgaaaaactgaaagagcgaggccaacgggtcattaactgctttggccataagaagtataacggaagaacagtaaaacctaatcttccgcctgactcatcagacgacgaagacgacgatttcctctttcaagatatcgataatgatatctatgtagacatggaaactttccatagatcacacatagtgagattcgaccggctctggagagttaggccaagcctcagagaggtttcggaattcatttccaacagaacagtgtactacactatcggagatcatgacgttgatgcattaaaatcagatcgatttatgcaccaaaacttccatctgactcaggctagaacaattgtggaactacggagtgcgccacatcattatttgatgctcctgcctgagggtataccagcttgggatttacggcgacgttcatgggtctgggtacacatcgacaagatcgaggaaatcgacaagagcgaacaagcgagatctcgtggatgggatgacttggtcattcataagggttctagcgaactcctgctttcacttgtagagaaccatgcatcgtcagctgaacataaaagggggaagaatgcatcaggtcatcagattccgaccgctcagatcgatcttatcaaggggaaagggcgcggtctgatcattctcctctatggccctcctggaacaggcaagacttcgacagcagagacaatagccgcgtacactggcaaacctttgtatgcaataacatgcggagatattggcacagggcctgaagagatacaaagaagcttaacacgacacactgagcgagcagagaagtggggttgtgttcttc

SEQ ID NO: 13699 - DNA, 1791 bp, Muscodor strobelii
  misc_feature: SGI cDNA ID NO. 564497
  misc_feature: Encodes the peptide sequence at SEQ ID NO 13700
atgacaggaagcatactccgccttgcccggacggcccgcgttcagccaggcgaggtcacggaattcgtggacgcacttgacggtactctgcatgagacacttacccgaccgcgaccaaagcaaagttatagttcagatgagatagaccatgaaataatttactctgattatcgcacagcacaagaagcattgatggtgaccatcaataagtgccttgcaaaactgaaacttcctcctgcggaagctgatgcagggactgattggaatgctgtgcaaatccggatggaacaggcatgtgctgcgatcgagaaagtttcgaatcgtgaccagcagattgttggagtcacaggaaaaatgaagaaagcatttcggaccttatgcagaaacgcgggagccggcaagacgatcgcgtctttaattcccgatgactcgttcggctcggtattgtcaagtggtcttaaggttgtcttcacagcacttgaagaaactggaactcatcgtgaagcggtgaccaaagcactggaaaggttgcctcgtatcttagagaaccacgtcgagtatacagagttagcgaaccaagatgaagaaacccaccgtcggacggcaaagctatataccgaagtgtgtctaacactcaatcacatcctgagatggtatttgacccatgcttttgtcgctggggcgaaacgtcttctcaatcccgctgctttttcaaacgaccttagtgagcgaatggcagaagtgagcttggcagccaaggacctgaaagctcgaggaacacagtttatgtggaggcgaatggacggcatgtctaagacgcaggaatggatgtcgtatcaaaatgttcaggcaggccggcagctcaacgatatcgaacggagcatacacagacttgcggcggatcgtcagctatcttatgacgctgttggggcagccgtattagcacatcttcagccgctactcgaaggagttgtcaaacgtcttgaaatcaagaatacagagaatcgggagctacagctagaaattgatgtcgactccgttctgagagacttgtgctacgacgaaacgcttgtcgccaatgatgtggagacccttctccgcttgagtctcccaacaaggatggatgagttggatatcaaccgtattcgcgcgataaaggatagctcgcgtatgcaggcttggctgactgtcgatgaagcatcattgttactcgtcaatggaggatcgaatgcgctagaccattcgacctcgttccttgctgcacacatagcacagtctctcattcagcgagaagacgtaaatcaagaagccatcattatggtcccgctggtgtatttctgcagccagcataccgattactatcatgatgtagctgctaaccctgcagaaatggtcatgagtcttctcctgcagctcctcgaccgctatggatccttttgctccagggatatgcagcaagttcaacaagtcaatccgggcgacatagaaaaagtctgtaatgtctttggtcgcttaataaatcgattgccacccaatgtggttgtctacgtcgttgttgagggtatttcttcatttggcgcacctctcgaaaggtccaaagggctgaaagatgcaattgagtgtctcgttgacgtgtaccgacaagagacacgggcgacagtgaaaatggtcttcattactagaacaagggccagggatctagaggatctatttgaggatgaagagataattcacgtgccatcgaatcctccgccaacaggtgggccattcttgagcagagtgactttgtaa

SEQ ID NO: 13700 - protein, 596 aa, Muscodor strobelii
  misc_feature: SGI Peptide ID NO. 564497
  misc_feature (18)..(579): NCBI GI: 46117364 Blast Desc: FG04524.1 [Gibberella zeae PH-1]
  misc_feature (96)..(593): NCBI GI: 225680864 Blast Desc: [Paracoccidioides brasiliensis Pb03]
  misc_feature (37)..(593): NCBI GI: 256724620 Blast Desc: NECHADRAFT_48249 [Nectria haematococca mpVI 77-13-4]
  misc_feature (96)..(588): NCBI GI: 226292565 Blast Desc: conserved [Paracoccidioides brasiliensis Pb18]
  misc_feature (114)..(525): NCBI GI: 171690694 Blast Desc: protein product [Podospora anserina] gi|170945295|emb|CAP71407.1| protein product [Podospora anserina]
  misc_feature (96)..(563): NCBI GI: 189206646 Blast Desc: conserved [Pyrenophora tritici-repentis Pt-1C-BFP] gi|187975750|gb|EDU42376.1| conserved [Pyrenophora tritici-repentis Pt-1C-BFP]
  misc_feature (275)..(588): NCBI GI: 115402847 Blast Desc: conserved [Aspergillus terreus NIH2624] gi|114189346|gb|EAU31046.1| conserved [Aspergillus terreus NIH2624]
  misc_feature (345)..(588): NCBI GI: 261201478 Blast Desc: conserved [Ajellomyces dermatitidis SLH14081] gi|239592198|gb|EEQ74779.1| conserved [Ajellomyces dermatitidis SLH14081]
  misc_feature (345)..(588): NCBI GI: 239611643 Blast Desc: conserved [Ajellomyces dermatitidis ER-3]
  misc_feature (353)..(588): NCBI GI: 226282274 Blast Desc: conserved [Paracoccidioides brasiliensis Pb01]
MTGSILRLARTARVQPGEVTEFVDALDGTLHETLTRPRPKQSYSSDEIDHEIIYSDYRTAQEALMVTINKCLAKLKLPPAEADAGTDWNAVQIRMEQACAAIEKVSNRDQQIVGVTGKMKKAFRTLCRNAGAGKTIASLIPDDSFGSVLSSGLKVVFTALEETGTHREAVTKALERLPRILENHVEYTELANQDEETHRRTAKLYTEVCLTLNHILRWYLTHAFVAGAKRLLNPAAFSNDLSERMAEVSLAAKDLKARGTQFMWRRMDGMSKTQEWMSYQNVQAGRQLNDIERSIHRLAADRQLSYDAVGAAVLAHLQPLLEGVVKRLEIKNTENRELQLEIDVDSVLRDLCYDETLVANDVETLLRLSLPTRMDELDINRIRAIKDSSRMQAWLTVDEASLLLVNGGSNALDHSTSFLAAHIAQSLIQREDVNQEAIIMVPLVYFCSQHTDYYHDVAANPAEMVMSLLLQLLDRYGSFCSRDMQQVQQVNPGDIEKVCNVFGRLINRLPPNVVVYVVVEGISSFGAPLERSKGLKDAIECLVDVYRQETRATVKMVFITRTRARDLEDLFEDEEIIHVPSNPPPTGGPFLSRVTL

SEQ ID NO: 13701 - DNA, 2764 bp, Muscodor strobelii
  misc_feature: SGI EST ID NO. CUFF.32727.1
  misc_feature: Variant of the nucleotide sequence at SEQ ID NO 13699
ctgataaccttgacatgggtcagccatgcttgtataatgaaaaagaaggagttggagaaattctttcacttgacaaagtgcctggtttgagatatatggtgcaatgcaagaaaaaaggcaattataaggatgaaaatcactcttcgagatgtgatgcgggaatggctgcgtagaacttgccattcgagccattcatgcctgaagtgtcatgtattttcatacatatgtcggggttacgatctagtatgcccgaccaggtatcatcaatccttgtgctcgcccagatcgaattggaaccccgcatggattacttcgcgctggcccctttccggcaaccagctgaggtcaaccaagttgcctcacataagcgactgcgcctcctgtcgctcgtatgaatgtcgagttatttaggtcgataggatagcacaaagaatgtcgcaatgccttttcttgttgttttggctaccggccggttgtaatgatatgatgctcacacgctctccaagttgaaactcgatttccccgcttattacacctcttgggttctatcttcaaatgacaggaagcatactccgccttgcccggacggcccgcgttcagccaggcgaggtcacggaattcgtggacgcacttgacggtactctgcatgagacacttacccgaccgcgaccaaagcaaagttatagttcagatgagatagaccatgaaataatttactctgattatcgcacagcacaagaagcattgatggtgaccatcaataagtgccttgcaaaactgaaacttcctcctgcggaagctgatgcagggactgattggaatgctgtgcaaatccggatggaacaggcatgtgctgcgatcgagaaagtttcgaatcgtgaccagcagattgttggagtcacaggaaaaatgaagaaagcatttcggaccttatgcagaaacgcgggagccggcaagacgatcgcgtctttaattcccgatgactcgttcggctcggtattgtcaagtggtcttaaggttgtcttcacagcacttgaagaaactggaactcatcgtgaagcggtgaccaaagcactggaaaggttgcctcgtatcttagagaaccacgtcgagtatacagagttagcgaaccaagatgaagaaacccaccgtcggacggcaaagctatataccgaagtgtgtctaacactcaatcacatcctgagatggtatttgacccatgcttttggtgagcaatccaatgaagacataacagcgagaaatgcccatggaggctgatattggaaacagtcgctggggcgaaacgtcttctcaatcccgctgctttttcaaacgaccttagtgagcgaatggcagaagtgagcttggcagccaaggacctgaaagctcgaggaacacagtttatgtggaggcgaatggacggcatgtctaagacgcaggaatggatgtcgtatcaaaatgttcaggcaggccggcagctcaacgatatcgaacggagcatacacagacttgcggcggatcgtcagctatcttatgacgctgttggggcagccgtattagcacatcttcagccgctactcgaaggagttgtcaaacgtcttgaaatcaagaatacagagaatcgggagctacagctagaaattgatgtcgactccgttctgagagacttgtgctacgacgaaacgcttgtcgccaatgatgtggagacccttctccgcttgagtctcccaacaaggatggatgagttggatatcaaccgtattcgcgcgataaaggatagctcgcgtatgcaggcttggctgactgtcgatgaagcatcattgttactcgtcaatggaggatcgaatgcgctagaccattcgacctcgttccttgctgcacacatagcacagtctctcattcagcgagaagacgtaaatcaagaagccatcattatggtcccgctggtgtatttctgcagccagcataccgattactatcatgatgtagctgctaaccctgcagaaatggtcatgagtcttctcctgcagctcctcgaccgctatggatccttttgctccagggatatgcagcaagttcaacaagtcaatccgggcgacatagaaaaagtctgtaatgtctttggtcgcttaataaatcgattgccacccaatgtggttgtctacgtcgttgttgagggtatttcttcatttggcgcacctctcgaaaggtccaaagggctgaaagatgcaattgagtgtctcgttgacgtgtaccgacaagagacacgggcgacagtgaaaatggtcttcattactagaacaagggccagggatctagaggatctatttgaggatgaagagataattcacgtgccatcgaatcctccgccaacaggtgggccattcttgagcagagtgactttgtaataaacgatatgttaacaatatcctggaagactattatcttgattgggaatttgtgagctgtgatccgaggagtgtaatgttgaactgatcaatagatgggagtggtgtaaatttgcactattactcttacttgcgtaatgtatccaatacactggatttgtctcgctactcgcctgacgtccagccgtatgccaatccaacgaagaagaaatgccagaaatcacaggcccagtcactatctctaatcatctacttggccgcgttgtaaatgtgacatcgaactatctcatgagcgcgtgtctaatctcctgacagtgcgacacggacggatcgctcttattgtgatgagacctaga

SEQ ID NO: 13702 - DNA, 3207 bp, Muscodor strobelii
  misc_feature: SGI cDNA ID NO. 564498
  misc_feature: Encodes the peptide sequence at SEQ ID NO 13703
atggtcttccagccaaagatggtcgagactcccatctaccatggaagcctcgtggcttttgagggcccgtcagacattgtctcaacacagctgcgtctgcttccgagttcttctaaaatccttatgatgccgccgcttcagaatttcgtcgaggaggatgagattgataggcctttcgaggctcgagcatatatacttaaaatccacgaggcatgcactgcaagatcggagatggcccatacatttctgcgaggatctacaccagataacaagcgtttagtattcatgaatggcggtacagtagccgctcaaatgagctgcataaatatgatcagccaacgagcgaccaacggcgatgtcacaatggctgagttgctcttcaatgagctcattcgaaatggtgtttcgggtctggaacgacgacagacttctgtaaaggctacgaggactgtgaccgcggagggcgggacgatgaaggagggttgtgatgaagtgagaccggacgacccggtttcggcggcaatgagagctgcagatgctctagatcgcagaacggcatctctgcaagccggtaacgaacttgatatctcgggtttctctcggccacgaagtacgagtgtacctattctttctgcaaccgacgatctacaagacattgcacccttctacatttttggggcgccagagagaaatcgatctcaattaaattcagtccacagagcccttgagtatccttcggtcgagaagtggcggatcatgacagcatctgtagaccaattgacagatccgaatcctgcaacgcgatccccaagctgtgttggcgaaacataccccgagacaacttcaactccgacaaaggttataagcccacatacgctggcattcgaccatatgccccatactccagctgagctgggtgaggcacgggttgtcaatgttcgatcatcgctgtcgatgtcaacacataagcgagtcaagtccctggaccggatttatgcgcctggtattcgaaaccaagatatttctctctgtcagttccctccgccgttgctctttgaaagatccagtagctctcaagacccagaaaatagaccagatgagaaggccaaggcaatcttcctacagcggagaagcgtgctgcagtctaaattcaactctgagaatcttcaaccagcatttgttagaccaaattcaatggtcatcaagagcaggctgtcttctcaaactgtgctcccagccctcaagactgctggcctaacatcagcagcatatattgatcgcggcacgaaccctgtgcgcaattatgcggatcgttataccttgacagacccgcttgggcgacccgaagacgaggataaaaaacatgcaggctcattcctaaatctcgacgatgagtttgagcttgacctggacgagccatttcgtactgtgctaccactgattgaagatctggtgattcacttgaagagtggcgagcgtaattcacagttagaaactctgattcaaggcttcaaagatggtacttatccagtctcgatgcctcctctgctgtcagaatcagaaaacatagagcgaccacaaacgccatcttcgggaacgtctactccaaaagtaggaaggaataacacattggatacccaggggatagcggatatccctatgacgatctatcaggtggatactgaagaatatgacccctttgcatcccatggcaactatcttcaaccaccacccagaagctgtctgccgtcaaagagcatcgacacccagatacctcagatagccgtaccggcaccaccgcccccagacacgagtccagcatcagataaatcgttccatgaattcgatacgagtgaatgcaaaacagctgtagcgactcaaaattcattgcgatccattcttagcatatacttcccacctgacaaagtcggctatcaacaattcaacttccctttacttccagagctcagcagtatgtggcgacctgtattcagacaagcatcttccgacagcctcaaaaaagcgaaccggaaaatggatttgatattggcaataggtgcgcagcgtggtgttgatcgggaattcctgggtgccattagcggctccttagaaaagctagggaccaagccgagtgggattactcgcagtggaagacttgatttgagatatctcattgcaaatgctatgcaagccttcacagcgcagccgcttgctaaccaagcacaagagaaccctttcaacaaccctcttctcctcgctactttgatcatgcctcacttagagacctatatggccgcacactcagacacacgattcttgttactcgaatacccatccgagtacttgtccaccgtcctggcactgcagcgtctagtaggtgttgatcttctcaaagtcgccggcatcatagacggcgaatctaaagaacctaagcctcgctatggactcaataaatcaagaccgaagataagctcagaatccatatcctcgatgtcaggtctttcatccctcggcaagcactcaggcgctactctagtatccaaaattggatcaaagtcgcccaatgacgcctctacatccaacccgtcgttctccaaggcaaactttatcatcacatcagcagcaagcgagtccgaaatcgcgacactaatctcgactatttggaagattctcatcggtatatcagctttttatgtcccagacggtaccgtctcaccacgatactccctccaacacctagaaaaacgcagatctctcgccagtttagcagagacagagagcaccaagcgctcgtcaaaacgcaactcgcgagagcgaccaccggcagatataccggtcctcgacaccgagcaacaatgcgcacctctagcttccgcagcagccgtactaggattctcatccacaacctcctcctcctcctcgcccgccgacacaccccgcgatcccccagcaacctacgtctcaacagggacacacgtcgatctacctcttcctcttcccccgcttccgcccaccccaattagcgcagtccgtccagctacgccactaaaatcttcccgtggctccatcgccgaaaccatcaagtccagccgaacattcaaaacttcacaatctcaatgcagtaaactgcggcatattctaggccgtgatctacccgctgcgcccctcgatcaagggagaccaagcgacgtatgctcatatttttga

SEQ ID NO: 13703 - protein, 1068 aa, Muscodor strobelii
  misc_feature: SGI Peptide ID NO. 564498
  misc_feature (15)..(901): NCBI GI: 256729089 Blast Desc: NECHADRAFT_80014 [Nectria haematococca mpVI 77-13-4]
  misc_feature (15)..(901): NCBI GI: 46138713 Blast Desc: FG10871.1 [Gibberella zeae PH-1]
  misc_feature (13)..(511): NCBI GI: 261357007 Blast Desc: conserved [Verticillium albo-atrum VaMs.102]
  misc_feature (472)..(901): NCBI GI: 116199371 Blast Desc: CHGG_07841 [Chaetomium globosum CBS 148.51] gi|88179120|gb|EAQ86588.1| CHGG_07841 [Chaetomium globosum CBS 148.51]
  misc_feature (469)..(952): NCBI GI: 85110350 Blast Desc: NCU08487 [Neurospora crassa OR74A] gi|8218292|emb|CAB92718.1| related to gastric mucin [Neurospora crassa] gi|28925096|gb|EAA34180.1| [Neurospora crassa OR74A]
  misc_feature (469)..(900): NCBI GI: 171689270 Blast Desc: protein product [Podospora anserina] gi|170944597|emb|CAP70708.1| protein product [Podospora anserina]
  misc_feature (467)..(898): NCBI GI: 154319011 Blast Desc: BC1G_02457 [Botryotinia fuckeliana B05.10] gi|150856888|gb|EDN32080.1| BC1G_02457 [Botryotinia fuckeliana B05.10]
  misc_feature (7)..(216): NCBI GI: 145605661 Blast Desc: MGG_06966 [Magnaporthe grisea 70-15] gi|145013458|gb|EDJ98099.1| MGG_06966 [Magnaporthe grisea 70-15]
  misc_feature (464)..(898): NCBI GI: 156062994 Blast Desc: SS1G_01613 [Sclerotinia sclerotiorum 1980] gi|154696949|gb|EDN96687.1| SS1G_01613 [Sclerotinia sclerotiorum 1980]
  misc_feature (641)..(901): NCBI GI: 145605661 Blast Desc: MGG_06966 [Magnaporthe grisea 70-15] gi|145013458|gb|EDJ98099.1| MGG_06966 [Magnaporthe grisea 70-15]
MVFQPKMVETPIYHGSLVAFEGPSDIVSTQLRLLPSSSKILMMPPLQNFVEEDEIDRPFEARAYILKIHEACTARSEMAHTFLRGSTPDNKRLVFMNGGTVAAQMSCINMISQRATNGDVTMAELLFNELIRNGVSGLERRQTSVKATRTVTAEGGTMKEGCDEVRPDDPVSAAMRAADALDRRTASLQAGNELDISGFSRPRSTSVPILSATDDLQDIAPFYIFGAPERNRSQLNSVHRALEYPSVEKWRIMTASVDQLTDPNPATRSPSCVGETYPETTSTPTKVISPHTLAFDHMPHTPAELGEARVVNVRSSLSMSTHKRVKSLDRIYAPGIRNQDISLCQFPPPLLFERSSSSQDPENRPDEKAKAIFLQRRSVLQSKFNSENLQPAFVRPNSMVIKSRLSSQTVLPALKTAGLTSAAYIDRGTNPVRNYADRYTLTDPLGRPEDEDKKHAGSFLNLDDEFELDLDEPFRTVLPLIEDLVIHLKSGERNSQLETLIQGFKDGTYPVSMPPLLSESENIERPQTPSSGTSTPKVGRNNTLDTQGIADIPMTIYQVDTEEYDPFASHGNYLQPPPRSCLPSKSIDTQIPQIAVPAPPPPDTSPASDKSFHEFDTSECKTAVATQNSLRSILSIYFPPDKVGYQQFNFPLLPELSSMWRPVFRQASSDSLKKANRKMDLILAIGAQRGVDREFLGAISGSLEKLGTKPSGITRSGRLDLRYLIANAMQAFTAQPLANQAQENPFNNPLLLATLIMPHLETYMAAHSDTRFLLLEYPSEYLSTVLALQRLVGVDLLKVAGIIDGESKEPKPRYGLNKSRPKISSESISSMSGLSSLGKHSGATLVSKIGSKSPNDASTSNPSFSKANFIITSAASESEIATLISTIWKILIGISAFYVPDGTVSPRYSLQHLEKRRSLASLAETESTKRSSKRNSRERPPADIPVLDTEQQCAPLASAAAVLGFSSTTSSSSSPADTPRDPPATYVSTGTHVDLPLPLPPLPPTPISAVRPATPLKSSRGSIAETIKSSRTFKTSQSQCSKLRHILGRDLPAAPLDQGRPSDVCSYF

SEQ ID NO: 13704 - DNA, 3542 bp, Muscodor strobelii
  misc_feature: SGI EST ID NO. CUFF.32743.0
  misc_feature: Variant of the nucleotide sequence at SEQ ID NO 13702
tatatacttaaaatccacgaggcatgcactgcaagatcggagatggcccatacatttctgcgaggatctacaccagataacaagcgtttagtattcatgaatggcggtacagtagccgctcaaatgagctgcataaatatgatcagccaacgagcgaccaacggcgatgtcacaatggctgagttgctcttcaatgagctcattcgaaatggtgtttcgggtctggaacgacgacagacttctgtaaaggctacgaggactgtgaccgcggagggcgggacgatgaaggagggttgtgatgaagtgagaccggacgacccggtttcggcggcaatgagagctgcagatgctctagatcgcagaacggcatctctgcaagccggtaacgaacttgatatctcgggtttctctcggccacgaagtacgagtgtacctattctttctgcaaccgacgatctacaagacattgcacccttctacatttttggggcgccagagagaaatcgatctcaattaaattcagtccacagagcccttgagtatccttcggtcgagaagtggcggatcatgacagcatctgtagaccaattgacagatccgaatcctgcaacgcgatccccaagctgtgttggcgaaacataccccgagacaacttcaactccgacaaaggttataagcccacatacgctggcattcgaccatatgccccatactccagctgagctgggtgaggcacgggttgtcaatgttcgatcatcgctgtcgatgtcaacacataagcgagtcaagtccctggaccggatttatgcgcctggtattcgaaaccaagatatttctctctgtcagttccctccgccgttgctctttgaaagatccagtagctctcaagacccagaaaatagaccagatgagaaggccaaggcaatcttcctacagcggagaagcgtgctgcagtctaaattcaactctgagaatcttcaaccagcatttgttagaccaaattcaatggtcatcaagagcaggctgtcttctcaaactgtgctcccagccctcaagactgctggcctaacatcagcagcatatattgatcgcggcacgaaccctgtgcgcaattatgcggatcgttataccttgacagacccgcttgggcgacccgaagacgaggataaaaaacatgcaggctcattcctaaatctcgacgatgagtttgagcttgacctggacgagccatttcgtactgtgctaccactgattgaagatctggtgattcacttgaagagtggcgagcgtaattcacagttagaaactctgattcaaggcttcaaagatggtacttatccagtctcgatgcctcctctgctgtcagaatcagaaaacatagagcgaccacaaacgccatcttcgggaacgtctactccaaaagtaggaaggaataacacattggatacccaggggatagcggatatccctatgacgatctatcaggtggatactgaagaatatgacccctttgcatcccatggcaactatcttcaaccaccacccagaagctgtctgccgtcaaagagcatcgacacccagatacctcagatagccgtaccggcaccaccgcccccagacacgagtccagcatcagataaatcgttccatgaattcgatacgagtgaatgcaaaacagctgtagcgactcaaaattcattgcgatccattcttagcatatacttcccacctgacaaagtcggctatcaacaattcaacttccctttacttccagagctcagcagtatgtggcgacctgtattcagacaagcatcttccgacagcctcaaaaaagcgaaccggaaaatggatttgatattggcaataggtgcgcagcgtggtgttgatcgggaattcctgggtgccattagcggctccttagaaaagctagggaccaagccgagtgggattactcgcagtggaagacttgatttgagatatctcattgcaaatgctatgcaagccttcacagcgcagccgcttgctaaccaagcacaagagaaccctttcaacaaccctcttctcctcgctactttgatcatgcctcacttagagacctatatggccgcacactcagacacacgattcttgttactcgaatacccatccgagtacttgtccaccgtcctggcactgcagcgtctagtaggtgttgatcttctcaaagtcgccggcatcatagacggcgaatctaaagaacctaagcctcgctatggactcaataaatcaagaccgaagataagctcagaatccatatcctcgatgtcaggtctttcatccctcggcaagcactcaggcgctactctagtatccaaaattggatcaaagtcgcccaatgacgcctctacatccaacccgtcgttctccaaggcaaactttatcatcacatcagcagcaagcgagtccgaaatcgcgacactaatctcgactatttggaagattctcatcggtatatcagctttttatgtcccagacggtaccgtctcaccacgatactccctccaacacctagaaaaacgcagatctctcgccagtttagcagagacagagagcaccaagcgctcgtcaaaacgcaactcgcgagagcgaccaccggcagatataccggtcctcgacaccgagcaacaatgcgcacctctagcttccgcagcagccgtactaggattctcatccacaacctcctcctcctcctcgcccgccgacacaccccgcgatcccccagcaacctacgtctcaacagggacacacgtcgatctacctcttcctcttcccccgcttccgcccaccccaattagcgcagtccgtccagctacgccactaaaatcttcccgtggctccatcgccgaaaccatcaagtccagccgaacattcaaaacttcacaatctcaatgcagtaaactgcggcatattctaggccgtgatctacccgctgcgcccctcgatcaagggagaccaagcgacgtatgctcatatttttgacgtctcggatgatgatgaagagagtatcttcagagatgaggaacgcaagtatatccccttgtttgaccagacaatggggccgaggaagggtaatagtcgaaaggctcttaagtggcttgggttggctacttagggagtcaaatttcagccagcgaatgtctgccacatcatgctgtccgatctggaacatctctccgtctctccatgaaccatcgcctaccgacctcggcgcttctcatcttcgtctcgctgttttaatcaccacgcctcggcgggatttatgactagcctaaggcctagtccatagtctgcaatttgttttcagcattagcgatcgtcgttgcttttaagactcttgtaacatctttcgctatgcgctgcgtggtattctagggctggctatctactctcatatcgacggagttttcagtaatggttcttgtgtatagcgattgattttaccttgtgtaatatacctgcgcttcgattcccagcatccagcctatccaatatctaagtgacgc

SEQ ID NO: 13705 - DNA, 819 bp, Muscodor strobelii
  misc_feature: SGI cDNA ID NO. 564499
  misc_feature: Encodes the peptide sequence at SEQ ID NO 13706
atggccactcctactcctcccgatgacactggctctcagagctacctatctttccccaagctcgagcgtggagaccaggagctgctcggctacgtgctggccacgactcctcccatgactccccgaagaagcccccagaatctagtgattccgcagagcctcacgaagaagaagcgggtcgagattcctgtgaagtacgcgctgactgagagtaatatcagatacgattacctcttcaagctactcctcatcggtgactccggtgttggaaagtcctgtctcctcctgcgtttcgccgacgacacctataccgagtcttacatctccacgatcggcgtggactttaaaatcaggactattgagttggatggcaagaccgtcaagctgcagatctgggacaccgccggtcaagagcgattccgaactatcacctcttcgtactaccgcggcgcccacggcatctgcgtcgtctacgatgtcaccgacatggacagcttcaacaacgtgaagcagtggctccaggagatcgaccgctacgccaccgagggtgttaacaagctcctcgtcggcaacaagagcgatatgtcggacaagaaggtcgtcgagtacaccgtcgccaaggagttcgccgacagcctgggcatccccttccttgagacctccgccaagaacgcctccaacgtcgagcaggccttcttaaccatggcccgccagatcaaggagcgccagggcaaccaggctaccgctaacaccaagcctggcgtccaggtcggccctggccacaacgtcgccaaccctaacaacggcggctgctgctag

SEQ ID NO: 13706 - protein, 272 aa, Muscodor strobelii
  misc_feature: SGI Peptide ID NO. 564499
  misc_feature (80)..(194): Pfam Id: PF08477 Pfam Desc: Miro-like protein
  misc_feature (80)..(241): Pfam Id: PF00071 Pfam Desc: Ras family
  misc_feature (72)..(272): NCBI GI: 164423490 Blast Desc: GTP-binding protein ypt1 [Neurospora crassa OR74A] gi|466171|sp|P33723.1|YPT1_NEUCR RecName: Full=GTP-binding protein ypt1 gi|262046|gb|AAB24564.1| NCYPT1 [Neurospora crassa]
  misc_feature (72)..(272): NCBI GI: 261356976 Blast Desc: GTP-binding protein ypt1 [Verticillium albo-atrum VaMs.102]
  misc_feature (72)..(272): NCBI GI: 116199373 Blast Desc: GTP-binding protein ypt1 [Chaetomium globosum CBS 148.51] gi|88179121|gb|EAQ86589.1| GTP-binding protein ypt1 [Chaetomium globosum CBS 148.51]
  misc_feature (72)..(272): NCBI GI: 11558500 Blast Desc: small GTP-binding protein YPTI [Hypocrea jecorina]
  misc_feature (72)..(272): NCBI GI: 39978155 Blast Desc: secretion related GTPase [Magnaporthe grisea 70-15] gi|145013461|gb|EDJ98102.1| secretion related GTPase [Magnaporthe grisea 70-15]
  misc_feature (72)..(272): NCBI GI: 171689264 Blast Desc: protein product [Podospora anserina] gi|170944594|emb|CAP70705.1| protein product [Podospora anserina]
  misc_feature (71)..(272): NCBI GI: 258571511 Blast Desc: GTP-binding protein ypt1 [Uncinocarpus reesii 1704] gi|237904829|gb|EEP79230.1| GTP-binding protein ypt1 [Uncinocarpus reesii 1704]
  misc_feature (73)..(272): NCBI GI: 67528150 Blast Desc: YPT1_NEUCR GTP-binding protein ypt1 [Aspergillus nidulans FGSC A4] gi|40739629|gb|EAA58819.1| YPT1_NEUCR GTP-binding protein ypt1 [Aspergillus nidulans FGSC A4]
  misc_feature (72)..(272): NCBI GI: 46138717 Blast Desc: YPT1_NEUCR GTP-binding protein ypt1 [Gibberella zeae PH-1]
  misc_feature (74)..(272): NCBI GI: 212537905 Blast Desc: aminopeptidase, [Penicillium marneffei ATCC 18224] gi|210068850|gb|EEA22941.1| aminopeptidase, [Penicillium marneffei ATCC 18224]
  misc_feature (79)..(216): SWISSPROT Homolog: EC 2.7.11.1 Non-specific serine/threonine protein kinase
MATPTPPDDTGSQSYLSFPKLERGDQELLGYVLATTPPMTPRRSPQNLVIPQSLTKKKRVEIPVKYALTESNIRYDYLFKLLLIGDSGVGKSCLLLRFADDTYTESYISTIGVDFKIRTIELDGKTVKLQIWDTAGQERFRTITSSYYRGAHGICVVYDVTDMDSFNNVKQWLQEIDRYATEGVNKLLVGNKSDMSDKKVVEYTVAKEFADSLGIPFLETSAKNASNVEQAFLTMARQIKERQGNQATANTKPGVQVGPGHNVANPNNGGCC

SEQ ID NO: 13707 - DNA, 1476 bp, Muscodor strobelii
  misc_feature: SGI EST ID NO. CUFF.32972.1
  misc_feature: Variant of the nucleotide sequence at SEQ ID NO 13705
attgtctcccaacaagttggagttccctgtcggatcattagtgggcctcgcagcgtaaaccgggccggacgcaaccactcacaagctccgtgacgacggcagcggcaggcgcagcagcctagagactagcagaagggtgcgtgtgcaagtaccaggccagcgcgataagcagtgtcagggtaccaggaaacgtcgacgactccctgtgttgtggaattccttctttctgcatcatcgcccgtaacgaccaacgtcgtcctcccaaacatcaacacctaccaccccaacaccacgtccatcgccgtcgcccgccatctcggactttgtttttcatttttgtagacctctatctcggttgcatctggctcatattatacagctggttgattaatctcctatttacccttcgttgtcgcagctgaagtcggtcagccgccgcatccttatccatcaccatgaatccagaatacgattacctcttcaagctactcctcatcggtgactccggtgttggaaagtcctgtctcctcctgcgtttcgccgacgacacctataccgagtcttacatctccacgatcggcgtggactttaaaatcaggactattgagttggatggcaagaccgtcaagctgcagatctgggacaccgccggtcaagagcgattccgaactatcacctcttcgtactaccgcggcgcccacggcatctgcgtcgtctacgatgtcaccgacatggacagcttcaacaacgtgaagcagtggctccaggagatcgaccgctacgccaccgagggtgttaacaagctcctcgtcggcaacaagagcgatatgtcggacaagaaggtcgtcgagtacaccgtcgccaaggagttcgccgacagcctgggcatccccttccttgagacctccgccaagaacgcctccaacgtcgagcaggccttcttaaccatggcccgccagatcaaggagcgccagggcaaccaggctaccgctaacaccaagcctggcgtccaggtcggccctggccacaacgtcgccaaccctaacaacggcggctgctgctagacgacatgggcgggaacccaacgtcttgatgatcatgataccctacgcaaacaacgactctcggggctcttcccatctttgatttttcgcatcgttccggttcggcaacaactgcgtgtgataattagaggcacgatacatgcagacggttgcaaatcaggatggcaacgggagggatttgcgtatgtttcggttttctcgtcgacgaacttggtctggaggacgagcgtctcggacagatcggtttgcgctttacggattacttaaactaaactgctacggctgcgctacgccaatggctacacagatagtgaattgatctcatttggatcaccatctactgattctactgatgtgtgtcttgaaatatcgtgatcatgatacaatgcctatgcttaacaggaaattgagc

SEQ ID NO: 13708 - DNA, 915 bp, Muscodor strobelii
  misc_feature: SGI cDNA ID NO. 564500
  misc_feature: Reduced expression when VOC is produced
  misc_feature: Encodes the peptide sequence at SEQ ID NO 13709
atgtccctaagcagcactcccagtgccgtccgcgctcttgcccaggggttgagctcacgagcccctgcctcgacactctgccgaactccagctttagcaacaacctcttcatacccttctctacctatctctactccggcgagaaccacatccgcatctcccagcgcaatacataccacatcgccgccagaattaacagcgatatggttcaactcatcgccaccgcgcttcgacctgccaggtccaggtaaccaagggcccgagaacgaccgtaaagtcaagctgggcaaaacccttcacatcctccaagagcgcctcccaacccttctccaatctccgctcccccaagaaatcctctcacccaacatatccctccacctcttcccctcaacccacccctacctgccgaccgtctcagggcgcgtagcctacatagccgctctctggacatcaccaatagcatggaaccgcgtccccatcgtcggaaacgtacgtctcgagatcctatccgagcgcatgatcagccagcccgttcacttctcgccccggcgtccaggcgcatacggtgaacaactcgtggtcaaatggcggactgcttcaacgaaagaagctgaggaaaacgagggtctgagtctggcggaacagggagagcagagactagatgcgcatttacgtggatcccagactggaagcgagaagaagaagagtttcacgggtctgtttgtgtttgagttcgataaagatggacggattatcagtcatacgatagagcatgtcgatgagcatggtgaacgggatggtgtaggttccaagattgtgggcttgacggattggttgctgggtgggattaaggggcggaatgatggattgccttcgttgtgtaggagtacgacgacggggaagtgtgggaagtga

SEQ ID NO: 13709 - protein, 304 aa, Muscodor strobelii
  misc_feature: SGI Peptide ID NO. 564500
  misc_feature (50)..(284): NCBI GI: 145605663 Blast Desc: MGG_06961 [Magnaporthe grisea 70-15] gi|145013462|gb|EDJ98103.1| MGG_06961 [Magnaporthe grisea 70-15]
  misc_feature (60)..(298): NCBI GI: 164423492 Blast Desc: NCU08476 [Neurospora crassa OR74A] gi|16944513|emb|CAB92030.2| conserved [Neurospora crassa] gi|157070116|gb|EAA33909.2| [Neurospora crassa OR74A]
  misc_feature (28)..(293): NCBI GI: 261356787 Blast Desc: conserved [Verticillium albo-atrum VaMs.102]
  misc_feature (98)..(288): NCBI GI: 156063736 Blast Desc: SS1G_01986 [Sclerotinia sclerotiorum 1980] gi|154697320|gb|EDN97058.1| SS1G_01986 [Sclerotinia sclerotiorum 1980]
  misc_feature (65)..(288): NCBI GI: 256729088 Blast Desc: [Nectria haematococca mpVI 77-13-4]
  misc_feature (98)..(288): NCBI GI: 154318600 Blast Desc: BC1G_02689 [Botryotinia fuckeliana B05.10] gi|150857819|gb|EDN33011.1| BC1G_02689 [Botryotinia fuckeliana B05.10]
  misc_feature (31)..(284): NCBI GI: 46138719 Blast Desc: FG10874.1 [Gibberella zeae PH-1]
  misc_feature (69)..(294): NCBI GI: 169605195 Blast Desc: SNOG_05618 [Phaeosphaeria nodorum SN15] gi|111065562|gb|EAT86682.1| SNOG_05618 [Phaeosphaeria nodorum SN15]
  misc_feature (8)..(304): NCBI GI: 119196213 Blast Desc: CIMG_02481 [Coccidioides immitis RS]
  misc_feature (8)..(304): NCBI GI: 240110680 Blast Desc: CPC735_041020 [Coccidioides posadasii C735 delta SOWgp]
  misc_feature: Useful for introducing or modulating the production of volatile compounds
MSLSSTPSAVRALAQGLSSRAPASTLCRTPALATTSSYPSLPISTPARTTSASPSAIHTTSPPELTAIWFNSSPPRFDLPGPGNQGPENDRKVKLGKTLHILQERLPTLLQSPLPQEILSPNISLHLFPSTHPYLPTVSGRVAYIAALWTSPIAWNRVPIVGNVRLEILSERMISQPVHFSPRRPGAYGEQLVVKWRTASTKEAEENEGLSLAEQGEQRLDAHLRGSQTGSEKKKSFTGLFVFEFDKDGRIISHTIEHVDEHGERDGVGSKIVGLTDWLLGGIKGRNDGLPSLCRSTTTGKCGK

SEQ ID NO: 13710 - DNA, 3015 bp, Muscodor strobelii
  misc_feature: SGI EST ID NO. CUFF.32762.0
  misc_feature: Variant of the nucleotide sequence at SEQ ID NO 13708
cgctggggaacctgtcgagctgtctcggtctggcggctgtttgagtggcattgggggggcccaagaaaagtcgctgcagagagaaaaaatagcttcacttacatcataccagtcattcctttccgtccgcccctgacatcctcactcccctacctcttcactatctttattttgactgcattgattgtctctctgttctgttcaacttgattccaacgagcacttctccacgcgacgtctcctgctctcgatagaatacgattcatgcattatcgtcgccgccgccgcctttgaggcccttcgactatccagatgtccctaagcagcactcccagtgccgtccgcgctcttgcccaggggttgagctcacgagcccctgcctcgacactctgccgaactccagctttagcaacaacctcttcatacccttctctacctatctctactccggcgagaaccacatccgcatctcccagcgcaatacataccacatcgccgccagaattaacagcgatatggttcaactcatcgccaccgcgcttcgacctgccaggtccaggtaaccaagggcccgagaacgaccgtaaagtcaagctgggcaaaacccttcacatcctccaagagcgcctcccaacccttctccaatctccgctcccccaagaaatcctctcacccaacatatccctccacctcttcccctcaacccacccctacctgccgaccgtctcagggcgcgtagcctacatagccgctctctggacatcaccaatagcatggaaccgcgtccccatcgtcggaaacgtacgtctcgagatcctatccgagcgcatgatcagccagcccgttcacttctcgccccggcgtccaggcgcatacggtgaacaactcgtggtcaaatggcggactgcttcaacgaaagaagctgaggaaaacgagggtctgagtctggcggaacagggagagcagagactagatgcgcatttacgtggatcccagactggaagcgagaagaagaagagtttcacgggtctgtttgtgtttgagttcgataaagatggacggattatcagtcatacgatagagcatgtcgatgagcatggtgaacgggatggtgtaggttccaagattgtgggcttgacggattggttgctgggtgggattaaggggcggaatgatggattgccttcgttgtgtaggagtacgacgacggggaagtgtgggaagtgagaggattggctgagtttgtatgattgtgttgtgttgggggtttgtatctttaggatggcgtttggcgggcaatgtagcattatggatttgcactttggggcgcgatcaaatacccaagatgaagaagggctacgacatattggaagcccggatggggataagaagagaagagactctgtattatacctaagtcacgccactcagtcctcagatgaggtaaaagacttgaatgaaccgcgtattgaatctgtacagctcttcattccgtttatctctacaacaccatctcactcccaccatcctcgatatctatctccctctccctttctctctccttgcccttccctttgccatttccattcccatatccgcctatcccattcttccccgaatcacccatcataaactcataaaccctatcctccaacccctcctccctcagcaactcaaacctacaatcaaccaacttactcgtcgtaatagcgcccctataattctgtctccaaatcctctggagcacattctcactctccatctcccgtctcctcctcctcaactgactcgccctaatcaacgcattcccggtactctcactcaagtccccaactccttccagatcagccaatccattctcgtttccatcctcgaccaacatacccacaccccccatatacgaatgcgtaatctcatcattatcattaacaccaacaagaacagtcgacatagcagcagtcgtaaatcgatcaacgacatgaaacagcgttccgaaaatctgttgagaacccgtagccccgtaccgcagggcgcggaaggggaggccgatttttcggactcggctcgtgtccctgctacttaaaaagtacgacatgggagagttgaatccgaaggagtcgcagggctctaactcgcctagtaagtagacggtgtcgagtgagtagttaaagtatgtgtgtggaggggagctgtgctttgggtctggggctgggaggggaggttcgccagactccccttctgagcccgtgggtggagagggagtggaggtttgccatgcggcgcgcggtgagcctgggtaggcgaggtatgagggacggatgtctggtgaggagaggacaagggggactttccattggaatgttagttcgtagtgttgcagagctagggagcgggtttcgcggtttatttggaggaggatggggacttggtgtgctggtgtgggaggtaaggtggcccagttggagctgtgttgttggtttggggttggttggccggattctaggatgtctgtctttcttgttagttttcttcatcttgaaggattatagattctcgtacatgtatgaaatggccgtttgaggtcacagagtgtgaagaacagaagacttacaacaagaaatcccaacgatcctaggaacgatcagatactcccacaccttcaacctcaactccgcaggcaacgcgccgaaaaatttaaagacaggtgtttccgctgcatggtatatagtcaacggcatagcctgtacggccgctgtctccagcccatcggatacgaggtcgaattccagccagaagagtgtgggtggcgggtacatctctgccatttctggcgtgattggtacgttgtaggatgagaagaattccagcctttctgattttgggggtgtgggcgatcttggcattgacacggtgttttatgtgttgctatgagtttggataggtgttatgtattatatattgagggtgctctcgttgctgccttcaaccttacaggtcgtgaatactcggtgccta

SEQ ID NO: 13711 - DNA, 1221 bp, Muscodor strobelii
  misc_feature: SGI cDNA ID NO. 564501
  misc_feature: Encodes the peptide sequence at SEQ ID NO 13712
atggcagagatgtacccgccacccacactcttctggctggaattcgacctcgtatccgatgggctggagacagcggccgtacaggctatgccgttgactatataccatgcagcggaaacacctgtctttaaatttttcggcgcgttgcctgcggagttgaggttgaaggtgtgggagtatctgatcgttcctaggatcgttgggatttcttgttacatcctagaatccggccaaccaaccccaaaccaacaacacagctccaactgggccaccttacctcccacaccagcacaccaagtccccatcctcctccaaataaaccgcgaaacccgctccctagctctgcaacactacgaactaacattccaatggaaagtcccccttgtcctctcctcaccagacatccgtccctcatacctcgcctacccaggctcaccgcgcgccgcatggcaaacctccactccctctccacccacgggctcagaaggggagtctggcgaacctcccctcccagccccagacccaaagcacagctcccctccacacacatactttaactactcactcgacaccgtctacttactaggcgagttagagccctgcgactccttcggattcaactctcccatgtcgtactttttaagtagcagggacacgagccgagtccgaaaaatcggcctccccttccgcgccctgcggtacggggctacgggttctcaacagattttcggaacgctgtttcatgtcgttgatcgatttacgactgctgctatgtcgactgttcttgttggtgttaatgataatgatgagattacgcattcgtatatggggggtgtgggtatgttggtcgaggatggaaacgagaatggattggctgatctggaaggagttggggacttgagtgagagtaccgggaatgcgttgattagggcgagtcagttgaggaggaggagacgggagatggagagtgagaatgtgctccagaggatttggagacagaattataggggcgctattacgacgagtaagttggttgattgtaggtttgagttgctgagggaggaggggttggaggatagggtttatgagtttatgatgggtgattcggggaagaatgggataggcggatatgggaatggaaatggcaaagggaagggcaaggagagagaaagggagagggagatagatatcgaggatggtgggagtgagatggtgttgtag

SEQ ID NO: 13712 - protein, 406 aa, Muscodor strobelii
  misc_feature: SGI Peptide ID NO. 564501
  misc_feature (3)..(270): NCBI GI: 46107912 Blast Desc: FG00839.1 [Gibberella zeae PH-1]
  misc_feature (3)..(271): NCBI GI: 256734646 Blast Desc: NECHADRAFT_31225 [Nectria haematococca mpVI 77-13-4]
  misc_feature (13)..(309): NCBI GI: 171689260 Blast Desc: protein product [Podospora anserina] gi|170944592|emb|CAP70703.1| protein product [Podospora anserina]
  misc_feature (43)..(194): NCBI GI: 67541338 Blast Desc: AN6839.2 [Aspergillus nidulans FGSC A4] gi|40739048|gb|EAA58238.1| [Aspergillus nidulans FGSC A4] gi|259480436|tpe|CBF71566.1| TPA: conserved [Aspergillus nidulans
MAEMYPPPTLFWLEFDLVSDGLETAAVQAMPLTIYHAAETPVFKFFGALPAELRLKVWEYLIVPRIVGISCYILESGQPTPNQQHSSNWATLPPTPAHQVPILLQINRETRSLALQHYELTFQWKVPLVLSSPDIRPSYLAYPGSPRAAWQTSTPSPPTGSEGESGEPPLPAPDPKHSSPPHTYFNYSLDTVYLLGELEPCDSFGFNSPMSYFLSSRDTSRVRKIGLPFRALRYGATGSQQIFGTLFHVVDRFTTAAMSTVLVGVNDNDEITHSYMGGVGMLVEDGNENGLADLEGVGDLSESTGNALIRASQLRRRRREMESENVLQRIWRQNYRGAITTSKLVDCRFELLREEGLEDRVYEFMMGDSGKNGIGGYGNGNGKGKGKEREREREIDIEDGGSEMVL

SEQ ID NO: 13713 - DNA, 3839 bp, Muscodor strobelii
  misc_feature: SGI EST ID NO. CUFF.32763.2
  misc_feature: Variant of the nucleotide sequence at SEQ ID NO 13711
tggatgtgatgaattcgagtggcgcattgaagcgccccttagagttggcacgtttataggccgagccagtcattcgggtgcatccaggcaagcctggatcgatataacatgtagagctatatcgacatatgccacagtgaggaagtataagagtgccgattttgtagatgatagatataaagattcatataccagagccatgctcgcgtctatttagatgacgtaactctcgaagtgtaggcgtccgttgttctgaggtatcataaactcatcacagtctagatctttatgagctgcagtgcaagagtttgccgataatatatcaaccaacttgcctatagtatatgccaacacaaactaaatacatccatgaccaatcgattctacacaatgaaaacccaacaagagagaggtacatcgtcgcgagggtcgcaattggccgtcattctgggtcccgggtaaggccgacctctttatcggccgttgcgatcggacgccaagcccgtcataccacaccaggccaatgcgacatgatgagacaaacactctaaagcttctcacgactgcattccattcacagacttatctcaatcgaaatcgtcaagaactgcagataacgaatttcaacagctgtagtctatccagccgctccgtttacacacagggtatcaggcagaaagtcacaaagtcattaaacctctcaacctacttcatgttggacactcatacaccatgagcgacaagtattcgccacatatatctcaacaggatttccaagggtagactacgaaccctccaccgacatcaatttacttagctagcctgttcatagacaggctcaggcagaaacacacgatataggcaccgagtattcacgacctgtaaggttgaaggcagcaacgagagcaccctcaatatataatacataacacctatccaaactcatagcaacacataaaacaccgtgtcaatgccaagatcgcccacacccccaaaatcagaaaggctggaattcttctcatcctacaacgtaccaatcacgccagaaatggcagagatgtacccgccacccacactcttctggctggaattcgacctcgtatccgatgggctggagacagcggccgtacaggctatgccgttgactatataccatgcagcggaaacacctgtctttaaatttttcggcgcgttgcctgcggagttgaggttgaaggtgtgggagtatctgatcgttcctaggatcgttgggatttcttgttacatcctagaatccggccaaccaaccccaaaccaacaacacagctccaactgggccaccttacctcccacaccagcacaccaagtccccatcctcctccaaataaaccgcgaaacccgctccctagctctgcaacactacgaactaacattccaatggaaagtcccccttgtcctctcctcaccagacatccgtccctcatacctcgcctacccaggctcaccgcgcgccgcatggcaaacctccactccctctccacccacgggctcagaaggggagtctggcgaacctcccctcccagccccagacccaaagcacagctcccctccacacacatactttaactactcactcgacaccgtctacttactaggcgagttagagccctgcgactccttcggattcaactctcccatgtcgtactttttaagtagcagggacacgagccgagtccgaaaaatcggcctccccttccgcgccctgcggtacggggctacgggttctcaacagattttcggaacgctgtttcatgtcgttgatcgatttacgactgctgctatgtcgactgttcttgttggtgttaatgataatgatgagattacgcattcgtatatggggggtgtgggtatgttggtcgaggatggaaacgagaatggattggctgatctggaaggagttggggacttgagtgagagtaccgggaatgcgttgattagggcgagtcagttgaggaggaggagacgggagatggagagtgagaatgtgctccagaggatttggagacagaattataggggcgctattacgacgagtaagttggttgattgtaggtttgagttgctgagggaggaggggttggaggatagggtttatgagtttatgatgggtgattcggggaagaatgggataggcggatatgggaatggaaatggcaaagggaagggcaaggagagagaaagggagagggagatagatatcgaggatggtgggagtgagatggtgttgtagagataaacggaatgaagagctgtacagattcaatacgcggttcattcaagtcttttacctcatctgaggactgagtggcgtgacttaggtataatacagagtctcttctcttcttatccccatccgggcttccaatatgtcgtagcccttcttcatcttgggtatttgatcgcgccccaaagtgcaaatccataatgctacattgcccgccaaacgccatcctaaagatacaaacccccaacacaacacaatcatacaaactcagccaatcctctcacttcccacacttccccgtcgtcgtactcctacacaacgaaggcaatccatcattccgccccttaatcccacccagcaaccaatccgtcaagcccacaatcttggaacctacaccatcccgttcaccatgctcatcgacatgctctatcgtatgactgataatccgtccatctttatcgaactcaaacacaaacagacccgtgaaactcttcttcttctcgcttccagtctgggatccacgtaaatgcgcatctagtctctgctctccctgttccgccagactcagaccctcgttttcctcagcttctttcgttgaagcagtccgccatttgaccacgagttgttcaccgtatgcgcctggacgccggggcgagaagtgaacgggctggctgatcatgcgctcggataggatctcgagacgtacgtttccgacgatggggacgcggttccatgctattggtgatgtccagagagcggctatgtaggctacgcgccctgagacggtcggcaggtaggggtgggttgaggggaagaggtggagggatatgttgggtgagaggatttcttgggggagcggagattggagaagggttgggaggcgctcttggaggatgtgaagggctgagacggatgttagtcgatctgaataatgaggatgggacgtctgtggatgggatgtcgaaaacgtacttttgcccagcttgactttacggtcgttctcgggcccttggttacctggacctggcaggtcgaagcgcggtggcgatgagttgaaccatatcgctgttaattctggcggcgatgtggtatgtattgcgctgggagatgcggatgtggttctcgccggagtagagataggtagagaagggtatgaagaggttgttgctaaagctggagttcggcagagtgtcgaggcaggggctcgtgagctcaacccctgggcaagagcgcggacggcactgggagtgctgcttagggacatctggatagtcgaagggcctcaaaggcggcggcggcgacgataatgcatgaatcgtattctatcgagagcaggagacgtcgcgtggagaagtgctcgttggaatcaagttgaacagaacagagagacaatcaatgcagtcaaaataaagatagtgaagaggtaggggagtgaggatgtcaggggcggacggaaaggaatgactggtatgatgtaagtgaagctattttttctctctgcagcgacttttcttgggcccccccaatgccactcaaacagccgccagaccgagacagctcgacaggttccccagcg

SEQ ID NO: 13714 - DNA, 2553 bp, Muscodor strobelii
  misc_feature: SGI cDNA ID NO. 564502
  misc_feature: Encodes the peptide sequence at SEQ ID NO 13715
atgcctactcaagttcgtatttttgctatgccaaagtctcttggcgagactcttgcggcaacacccagttctccacctcgatctacaaaagatctcgtgaacgggacacacacaaactcgaaatcatcgactcagatttctatctcgcctgtcatggccgatgaacctaaagaaggcggcattaccttcgccggacaagatgatcttccaaagttgcctattcccgagctggattccacatgtcggaaataccttgctgccttaaagcctttgcaaggaccccgagagcatgctgaaactcaacgtgccgtagaggactttctgtcatcagacggcgccgaacttcaagaaaagctacaacaatatgctgctggcaagagtagttacatagagcaattctggtacgattcatatctgaattttgacaatcctgtcgtattaaatctgaatccattcttcttacttgaagatgatcccacaccagcgagaaacaaccaagttacccgagcagcatcccttgtagtatcagcgttagagtttgtgcgagccgtacgccgcgaggaactaccacccgacaagatcaaaggacagcctctcgacatgtatcaatattcgcgactctttggcacggcccgtgttccgacagatcacggttgtcaaatcgagcaggacccggaatcgaagcatgttgttgtcctttgtcatggacagttctactggttcgatgctctcgacgataactcagacctcatcatgaatgaacgcgatatctcattaaatctgcaaactattatcgacgatgctacacaaaccccgattcaggaggctgcaaagggagcacttgggatcctaagcacagaaaatcgcaagacatggtcgggtctcagagatgtgttgacgaaagacgaaggatccaacaatgcggaatgccttggcattgttgactctgctttattcgtgctgtgcctcgattacaccgagcccgccactgctgctgctctatgccagaacatgctttgtggaacaaacgacgtagtcaagggaatacaaatcggcacttgtgtcaatcggtggtatgataaactacaaattattgtttgcaagaatggaagcgctggaatcaactttgagcatacaggtgttgatggacacactgtgcttcgattcgctagcgacgtatacacagacacgatcctccgcttcgcaaggaccatcaacggtcaggcgccgagtctttggaaaacgacgagcccagaccccgccaagcgcgagccggaaagctttggcgacgtcaataccctgccgcacaagctcgagtgggacatgacaccggaacttaacgttgcagtgcgatttgctgagacgagactggccgatctcattagccaaaacgagtttgaatgcttggatttcagtggctatggcaagaacttcattacctctatgggatactcacccgatgctttcgtgcagatggcattccaagccgcatactatggtctatacggccgtgtcgaatgcacatacgagcccgccatgacgaaagcttatcttcacgggcgtacagaagccattcgatctgtgaccgaggaatccgtcaacttcgtccagactttctgggccgataaccctgcagagacaaaagtcgatgcgctacgaaaagcatgcgagcaacatgtcaagagcacgagggaatgcgctaagggagatggttgtgatcgtcatctatacgccttattctgcttgtggcaaagatttctagatgaggggaatagccgcccaactagcagtaccggatacaccagtccgtcagaagccgcaattgactcgcctgttggcagcccgcctaaggactctacgaactcgatggaaattgatattcaaccacgaaagcgtggcgacagcagtacatcacattcccgatcgcgggcagcggagctgcaccccgttcccgccttattcgcagacggaggctgggataaactcaaccaaacaatcctctcaacttcaaactgcggaaacccctcactcagacagttcggcttcggccccacatcaggcgatgggttcggtatgggatacatcatcaaagacgagagcataaatatctgtgtatcaagtaaacacagacaaacgaagcgcttcgtcgacgcgctcgagagctatctcctcgagatccgtcgcgtactacgcataacgggacggaaagcagcgaccgctaggcaaacaagggcgcgcgagattgaccctgcgaaagtgaagacgggccatagattgaaggcaagaggaaggatgatcacgggcacggaaccgagtttccgtatgccggctaagtcgagcgagggaacgagatcaccgactgatgagagtcttatgatgagtgaggatgatgaattgggtggttatggatttttcgacgcgggaatgttgttacaagctcttaaggccaggggcgaggcttttgatcagggagaatctaaggcttcggaaagagcggcggcgcaggcgaggaggagggatgtagggaagaagttgaggcttgttgagtattag

SEQ ID NO: 13715 - protein, 850 aa, Muscodor strobelii
  misc_feature: SGI Peptide ID NO. 564502
  misc_feature (68)..(728): Pfam Id: PF00755 Pfam Desc: Choline/Carnitine o-acyltransferase
  misc_feature (68)..(585): Pfam Id: PF00755 Pfam Desc: Choline/Carnitine o-acyltransferase
  misc_feature (649)..(728): Pfam Id: PF00755 Pfam Desc: Choline/Carnitine o-acyltransferase
  misc_feature (1)..(850): NCBI GI: 39978193 Blast Desc: MGG_06981 [Magnaporthe grisea 70-15] gi|145013443|gb|EDJ98084.1| MGG_06981 [Magnaporthe grisea 70-15]
  misc_feature (3)..(850): NCBI GI: 46107914 Blast Desc: FG00840.1 [Gibberella zeae PH-1]
  misc_feature (3)..(850): NCBI GI: 256735364 Blast Desc: [Nectria haematococca mpVI 77-13-4]
  misc_feature (3)..(850): NCBI GI: 154319077 Blast Desc: BC1G_02490 [Botryotinia fuckeliana B05.10] gi|150856921|gb|EDN32113.1| BC1G_02490 [Botryotinia fuckeliana B05.10]
  misc_feature (3)..(850): NCBI GI: 85080325 Blast Desc: NCU01611 [Neurospora crassa OR74A] gi|16416014|emb|CAB91364.2| carnitine acetyl transferase FacC [Neurospora crassa] gi|28917589|gb|EAA27286.1| NCU01611 crassa
  misc_feature (1)..(850): NCBI GI: 261356979 Blast Desc: carnitine O-palmitoyltransferase I [Verticillium albo-atrum VaMs.102]
  misc_feature (1)..(850): NCBI GI: 171689258 Blast Desc: protein product [Podospora anserina] gi|170944591|emb|CAP70702.1| protein product [Podospora anserina]
  misc_feature (5)..(849): NCBI GI: 70995696 Blast Desc: carnitine acetyl transferase [Aspergillus fumigatus Af293] gi|66850238|gb|EAL90565.1| carnitine acetyl transferase [Aspergillus fumigatus Af293] gi|159131357|gb|EDP56470.1| acetyl
  misc_feature (5)..(850): NCBI GI: 121701521 Blast Desc: carnitine acetyl transferase [Aspergillus clavatus NRRL 1] gi|119397168|gb|EAW07599.1| carnitine acetyl transferase [Aspergillus clavatus NRRL 1]
  misc_feature (5)..(849): NCBI GI: 119495487 Blast Desc: carnitine acetyl transferase [Neosartorya fischeri NRRL 181] gi|119412689|gb|EAW22630.1| carnitine acetyl transferase [Neosartorya fischeri NRRL 181]
  misc_feature (68)..(731): SWISSPROT Homolog: EC 2.3.1.7 Carnitine O-acetyltransferase
MPTQVRIFAMPKSLGETLAATPSSPPRSTKDLVNGTHTNSKSSTQISISPVMADEPKEGGITFAGQDDLPKLPIPELDSTCRKYLAALKPLQGPREHAETQRAVEDFLSSDGAELQEKLQQYAAGKSSYIEQFWYDSYLNFDNPVVLNLNPFFLLEDDPTPARNNQVTRAASLVVSALEFVRAVRREELPPDKIKGQPLDMYQYSRLFGTARVPTDHGCQIEQDPESKHVVVLCHGQFYWFDALDDNSDLIMNERDISLNLQTIIDDATQTPIQEAAKGALGILSTENRKTWSGLRDVLTKDEGSNNAECLGIVDSALFVLCLDYTEPATAAALCQNMLCGTNDVVKGIQIGTCVNRWYDKLQIIVCKNGSAGINFEHTGVDGHTVLRFASDVYTDTILRFARTINGQAPSLWKTTSPDPAKREPESFGDVNTLPHKLEWDMTPELNVAVRFAETRLADLISQNEFECLDFSGYGKNFITSMGYSPDAFVQMAFQAAYYGLYGRVECTYEPAMTKAYLHGRTEAIRSVTEESVNFVQTFWADNPAETKVDALRKACEQHVKSTRECAKGDGCDRHLYALFCLWQRFLDEGNSRPTSSTGYTSPSEAAIDSPVGSPPKDSTNSMEIDIQPRKRGDSSTSHSRSRAAELHPVPALFADGGWDKLNQTILSTSNCGNPSLRQFGFGPTSGDGFGMGYIIKDESINICVSSKHRQTKRFVDALESYLLEIRRVLRITGRKAATARQTRAREIDPAKVKTGHRLKARGRMITGTEPSFRMPAKSSEGTRSPTDESLMMSEDDELGGYGFFDAGMLLQALKARGEAFDQGESKASERAAAQARRRDVGKKLRLVEY

SEQ ID NO: 13716 - DNA, 4070 bp, Muscodor strobelii
  misc_feature: SGI EST ID NO. CUFF.32805.0
  misc_feature: Variant of the nucleotide sequence at SEQ ID NO 13714
caaccaaactccaccggccacccagattctggggtcgcatttcccaagagtttcattcgctgattcacaatattccatccatatcgctgccaagtgcaacggcagccgagttgcagcagctctccactatgccacagacagagcaggacgggacagagagggctgcatcgtcattgtcacaagggccagtcagcccgtgagttggttcgaacgggccatacaaattaatctggttctttcaatcccacaacatgactttctgagcataacaaccatgacaaacccaagactttgcgcgcattgattttgtattacatcgagattgaaaacccagaatagcgcgacgcgtatcatagcgctcggctcagtgacaggcagaagactaccgagtctcctcgcctttcacctccacgcctttcctccggtctgcccaaccagaggccatccacttgtccgaggagacccacgcgtagcatctcgcgattcatcgttttcacccattccagaccgtccaccaggccgaaccccacggggattcgctgttatttcgtcatttcctgtcggaacccagggcttgcatcaggtagatcagttttaacgttcagtggagcttcagctgtgccttgccatacgttcgaaagagcagagaaacagcagcattgacattggatccaacggctgccatctgtggcttattgttgtcgcagctggtcacgtttcagccgccgatttgtactagccttcctcgtcacaattcggtagcaaaacgtgtgttcaggtccatcgtgacctactgaatggggaggcggaagtcttgtgggctactcacacctaacatccgatcactgccgccattaccgatacaatactctttgcggcgttatactatcccccgaagcgagaatacatctgcatacagggtttgtgcttgactttgttacttgcttgctcgttgcatcctctgccccgtcctacaccacttgtccccatcgtgtggtctgagtgcattgtctcgcataagcaacaccttgcattcgactatacacttgctcgatagacagaaaccagatacccataccaagacagcaaagcatcaccaattataaagactttatcactgtgggattggttcggttgtcacatttcgagttcgtatttttgctatgccaaagtctcttggcgagactcttgcggcaacacccagttctccacctcgatctacaaaagatctcgtgaacgggacacacacaaactcgaaatcatcgactcagatttctatctcgcctgtcatggccgatgaacctaaagaaggcggcattaccttcgccggacaagatgatcttccaaagttgcctattcccgagctggattccacatgtcggaaataccttgctgccttaaagcctttgcaaggaccccgagagcatgctgaaactcaacgtgccgtagaggactttctgtcatcagacggcgccgaacttcaagaaaagctacaacaatatgctgctggcaagagtagttacatagagcaattctggtacgattcatatctgaattttgacaatcctgtcgtattaaatctgaatccattcttcttacttgaagatgatcccacaccagcgagaaacaaccaagttacccgagcagcatcccttgtagtatcagcgttagagtttgtgcgagccgtacgccgcgaggaactaccacccgacaagatcaaaggacagcctctcgacatgtatcaatattcgcgactctttggcacggcccgtgttccgacagatcacggttgtcaaatcgagcaggacccggaatcgaagcatgttgttgtcctttgtcatggacagttctactggttcgatgctctcgacgataactcagacctcatcatgaatgaacgcgatatctcattaaatctgcaaactattatcgacgatgctacacaaaccccgattcaggaggctgcaaagggagcacttgggatcctaagcacagaaaatcgcaagacatggtcgggtctcagagatgtgttgacgaaagacgaaggatccaacaatgcggaatgccttggcattgttgactctgctttattcgtgctgtgcctcgattacaccgagcccgccactgctgctgctctatgccagaacatgctttgtggaacaaacgacgtagtcaagggaatacaaatcggcacttgtgtcaatcggtggtatgataaactacaaattattgtttgcaagaatggaagcgctggaatcaactttgagcatacaggtgttgatggacacactgtgcttcgattcgctagcgacgtatacacagacacgatcctccgcttcgcaaggaccatcaacggtcaggcgccgagtctttggaaaacgacgagcccagaccccgccaagcgcgagccggaaagctttggcgacgtcaataccctgccgcacaagctcgagtgggacatgacaccggaacttaacgttgcagtgcgatttgctgagacgagactggccgatctcattagccaaaacgagtttgaatgcttggatttcagtggctatggcaagaacttcattacctctatgggatactcacccgatgctttcgtgcagatggcattccaagccgcatactatggtctatacggccgtgtcgaatgcacatacgagcccgccatgacgaaagcttatcttcacgggcgtacagaagccattcgatctgtgaccgaggaatccgtcaacttcgtccagactttctgggccgataaccctgcagagacaaaagtcgatgcgctacgaaaagcatgcgagcaacatgtcaagagcacgagggaatgcgctaagggagatggttgtgatcgtcatctatacgccttattctgcttgtggcaaagatttctagatgaggggaatagccgcccaactagcagtaccggatacaccagtccgtcagaagccgcaattgactcgcctgttggcagcccgcctaaggactctacgaactcgatggaaattgatattcaaccacgaaagcgtggcgacagcagtacatcacattcccgatcgcgggcagcggagctgcaccccgttcccgccttattcgcagacggaggctgggataaactcaaccaaacaatcctctcaacttcaaactgcggaaacccctcactcagacagttcggcttcggccccacatcaggcgatgggttcggtatgggatacatcatcaaagacgagagcataaatatctgtgtatcaagtaaacacagacaaacgaagcgcttcgtcgacgcgctcgagagctatctcctcgagatccgtcgcgtactacgcataacgggacggaaagcagcgaccgctaggcaaacaagggcgcgcgagattgaccctgcgaaagtgaagacgggccatagattgaaggcaagaggaaggatgatcacgggcacggaaccgagtttccgtatgccggctaagtcgagcgagggaacgagatcaccgactgatgagagtcttatgatgagtgaggatgatgaattgggtggttgtgagttttgcccccctttcatgtcacgagaggttgttggggtttgtgactaacatattggtgatagatggatttttcgacgcgggaatgttgttacaagctcttaaggccaggggcgaggcttttgatcagggagaatctaaggcttcggaaagagcggcggcgcaggcgaggaggagggatgtagggaagaagttgaggcttgttgagtattagatgggtgtttgtatatatgtttaaggtgtggcggtgggaactggaatggggagtttatgcgataggggtttatggtcgtgggatagcatattgcattttgagcgttgtataatttttgttgcattataccgacccgaatagaaacgacggcgatgagaattatttctcagatggcactacatcctagacataaagcgtttattcgtgctcttgctggaaagcgatggaaacgtctctagtcaaatgtgaagcagaaggacgaaggaagagctcagattccaggcaggactgttttcattgtcagtcgaatacgc

SEQ ID NO: 13717 - DNA, 1275 bp, Muscodor strobelii
  misc_feature: SGI cDNA ID NO. 564503
  misc_feature: Elevated expression when VOC is produced
  misc_feature: Encodes the peptide sequence at SEQ ID NO 13718
atgtcgaggttcttgactgctgcggtcttcgccaccgctgcccaagcttcagcattcgctggaaggccagctcgggcgactcaatctgtcatacctgatgccacattccagttgcctacggtcacagacggtcccgatctaagggaactgttgaggaagagggcagatggtgaacaagagattctgatcgcgcctgacaacacttgcggttttgtcgatggccgacctggtgcaccatacagctgcggtactgactacacctgcgaattggttccaacaaccataccaggcacatccactggttttgtcgcctgttgctctggagctgtctgtggtctgcgtgtgacctgtttagattacaatcagatctcctcctcgagtctttgcgacaacggctgtttcgcagatacctttactgctaaatgtaccgctaccggcgccccctattgtggtacggtcacattcttcgatggaatcatggattactactgcgattccaacagctactcttcagcacagcagctttacacaacatataatggagaagataccgattcggatcatcgcgtgtggtctacttatactgagacaacgtcgagcgatttcacttctcaaactgtcaccgactcaactgtcactggtgcacaaccaactcagactggccccttctcaggaggagatagcaacagtgacggcgatggcaacaacgacaacaataacagcgattcaggatcaaagtcgaagtcttctactccggttggtgcaattgtcggaggtgtcgttggtggtgtcgcagtcatcgccctcgtcggtctcggtatctttttcatcctccgtcataaaaagaaggccgctcccaccgccccaactcagccaatggagcaaaacaacctcaatgggccccctggaggcggtgctcccggccaatacccgcctcagcagcaatatgcttacaaccaagctccttacggacagcccagccctcaaggcggctattaccagcagaccccggatcaaaaagctactggtttcgtcgggttggcacctacacccgatcgccacgactccacgagtcctgtctctcaatataccgacaaccgcaatagcacgcatcctcacagcccgacctccacgctgcattcgaactggggccagcaaggtcaccagcagggcgttcctggcgtgccgcctactgtccatgaggcaggcggcaacgcagtcggctcgaacgattacaaccagaaccaccacggccaattccacgagctgggttaa

SEQ ID NO: 13718 - protein, 424 aa, Muscodor strobelii
  misc_feature: SGI Peptide ID NO. 564503
  misc_feature (1)..(278): NCBI GI: 85083808 Blast Desc: NCU01769 [Neurospora crassa OR74A] gi|7800867|emb|CAB91225.1| [Neurospora crassa] gi|28918279|gb|EAA27956.1| [Neurospora crassa OR74A]
  misc_feature (5)..(407): NCBI GI: 256735368 Blast Desc: NECHADRAFT_75126 [Nectria haematococca mpVI 77-13-4]
  misc_feature (52)..(187): NCBI GI: 261356978 Blast Desc: [Verticillium albo-atrum VaMs.102]
  misc_feature (64)..(316): NCBI GI: 46126307 Blast Desc: FG07531.1 [Gibberella zeae PH-1]
  misc_feature (42)..(289): NCBI GI: 256726190 Blast Desc: NECHADRAFT_81855 [Nectria haematococca mpVI 77-13-4]
  misc_feature (61)..(283): NCBI GI: 256731249 Blast Desc: NECHADRAFT_84544 [Nectria haematococca mpVI 77-13-4]
  misc_feature (1)..(283): NCBI GI: 171689278 Blast Desc: protein product [Podospora anserina] gi|170944601|emb|CAP70712.1| protein product [Podospora anserina]
  misc_feature (9)..(282): NCBI GI: 46139925 Blast Desc: FG11477.1 [Gibberella zeae PH-1]
  misc_feature (143)..(323): NCBI GI: 46111333 Blast Desc: FG02548.1 [Gibberella zeae PH-1]
  misc_feature (46)..(183): NCBI GI: 46127729 Blast Desc: FG08242.1 [Gibberella zeae PH-1]
  misc_feature: Useful for introducing or modulating the production of volatile compounds
MSRFLTAAVFATAAQASAFAGRPARATQSVIPDATFQLPTVTDGPDLRELLRKRADGEQEILIAPDNTCGFVDGRPGAPYSCGTDYTCELVPTTIPGTSTGFVACCSGAVCGLRVTCLDYNQISSSSLCDNGCFADTFTAKCTATGAPYCGTVTFFDGIMDYYCDSNSYSSAQQLYTTYNGEDTDSDHRVWSTYTETTSSDFTSQTVTDSTVTGAQPTQTGPFSGGDSNSDGDGNNDNNNSDSGSKSKSSTPVGAIVGGVVGGVAVIALVGLGIFFILRHKKKAAPTAPTQPMEQNNLNGPPGGGAPGQYPPQQQYAYNQAPYGQPSPQGGYYQQTPDQKATGFVGLAPTPDRHDSTSPVSQYTDNRNSTHPHSPTSTLHSNWGQQGHQQGVPGVPPTVHEAGGNAVGSNDYNQNHHGQFHELG

SEQ ID NO: 13719 - DNA, 2360 bp, Muscodor strobelii
  misc_feature: SGI EST ID NO. CUFF.32779.0
  misc_feature: Variant of the nucleotide sequence at SEQ ID NO 13717
gtcgcattcagcggctgatgtgtggaagcactgggacatttcagccgctccacgccattgacaacagaaaatcgtaatattggcggacagcttccctctcccgccatggccagactgttgctttatatccagcggacaccggtaatggtcgagatgttgaatttccagacggccaagacagccagaatcatcaccgagcaacgtgcatcaatgcctccttccggcctggctcgccttattccttctgtaggtcttcgggctaaagatgcccaaagtctcaccaaacttcaagggtcccgtggtgacgagacccatgcgagccatgatagcgtcttggcgagaacatcgacggtcttcagctacggtggagctggtgtagcttcccgagtcataattggttagctgaacccataaggcatgggttcaatatcatcttcatctttttcaacgcaaacaggtctagcctgtgcatatagtgcgtgcaagctgggctgtggcggagagatggtaaagggtccggatcgcccaagctttgaagagcgagtgtgaggatccagaaaaaaagtaccacaaggaggaatatgccttacgatctgctggggatggcctgcggtctcccgttatgttgccgtacggtctcttaaagctaccaagctttccatgtgccagaaagcctaggttcctttttccctcttgttccgtctctaccacgtttgcgtgctgtatcaaggtgtgaatcgccctacacctcgatcttaacattagccaagccttccaccggcttacacgctcacatttatgagatcgagttcaaataccacaatgtcgaggttcttgactgctgcggtcttcgccaccgctgcccaagcttcagcattcgctggaaggccagctcgggcgactcaatctgtcatacctgatgccacattccagttgcctacggtcacagacggtcccgatctaagggaactgttgaggaagagggcagatggtgaacaagagattctgatcgcgcctgacaacacttgcggttttgtcgatggccgacctggtgcaccatacagctgcggtactgactacacctgcgaattggttccaacaaccataccaggcacatccactggttttgtcgcctgttgctctggagctgtctgtggtctgcgtgtgacctgtttagattacaatcagatctcctcctcgagtctttgcgacaacggctgtttcgcagatacctttactgctaaatgtaccgctaccggcgccccctattgtggtacggtcacattcttcgatggaatcatggattactactgcgattccaacagctactcttcagcacagcagctttacacaacatataatggagaagataccgattcggatcatcgcgtgtggtctacttatactgagacaacgtcgagcgatttcacttctcaaactgtcaccgactcaactgtcactggtgcacaaccaactcagactggccccttctcaggaggagatagcaacagtgacggcgatggcaacaacgacaacaataacagcgattcaggatcaaagtcgaagtcttctactccggttggtgcaattgtcggaggtgtcgttggtggtgtcgcagtcatcgccctcgtcggtctcggtatctttttcatcctccgtcataaaaagaaggccgctcccaccgccccaactcagccaatggagcaaaacaacctcaatgggccccctggaggcggtgctcccggccaatacccgcctcagcagcaatatgcttacaaccaagctccttacggacagcccagccctcaaggcggctattaccagcagaccccggatcaaaaagctactggtttcgtcgggttggcacctacacccgatcgccacgactccacgagtcctgtctctcaatataccgacaaccgcaatagcacgcatcctcacagcccgacctccacgctgcattcgaactggggccagcaaggtcaccagcagggcgttcctggcgtgccgcctactgtccatgaggcaggcggcaacgcagtcggctcgaacgattacaaccagaaccaccacggccaattccacgagctgggttaaacaatacaaacgagcttgttggctgtagactgttgtgttttttcagcattgagtacggcgtttgagaggcaccgattcatgatttctggtgggattaaattgggatctgcttattgatctatacctgtttataatgggcttctgagtcgaggatttaaaattgcctatactatcaatggtccttgcaagggcttgtatatgcactatatctacataattagccatataaaagaaataaaatactcatcgtacttcgttgccag

SEQ ID NO: 13720 - DNA, 1479 bp, Muscodor strobelii
  misc_feature: SGI cDNA ID NO. 564504
  misc_feature: Encodes the peptide sequence at SEQ ID NO 13721
atgaccgatctgtcacgggtcctgccggacttcccaaccgccaaatatgcgcggttgctaccgaccatcgagaagcagcagctgacagtgactgatctgctcactctcgaggttccggagattgggaagcgcacccagctaccgctacttgacatcaagcgcctgtgcaatgctatccttgatgcaattcacgccgatttaggtgtggccgacgtagatacggatgacaaagggaagggaaaagagaccgcccggtcggacgtgagcgcgttgcgacaaaatggcgaggacctgttatcaaagccttggcacacaatcagcacactcgatacgtcacttgatgccgcactgggcggcggtatcccaacaggctatctaacggaaatcacgggagaaagcggcgcaggcaagacacaatttctactcacacttctcctatctgcccaactcccgccgccttatgggttaggacgcccagcactttacatatccaccgaggcagcactctccacaacccggctctcacagatcctctcgcatcacccgtttttcgcctccctggacccgtcaatctccagaccgtctcttgatggaatcatcagcacggtcacacctgatcttgagacccaagatcacatcctaacctaccaagtacccgtcgaagtctctcgccgcaatataggtctcatcatcttagactctgtagcagcaaactaccgagcggaattcgagcgcggaaacacgagctctaacatggccgcgcgcagcgccgaattagtccgtctcgggtccttattccgcgagttggcacgaaaacacaacctcgcggttgtagtcgcgaaccaagtcgcagacaggttttccggttctctgccctcttccgctaagtacggcagtagtgcaatactccagataactgcacagactcctggtccaaaaagatcattcaatttacaggatccattatcccaggaaagccccctcgcgtccaggagcaggcatgtcacggatcctgtgtcgcttgatgcggagccagcaagcagtatggccgatattgtcgtccgatcctcaatgcctgaacctgtgcccgaagagaccgtttctgagcctgccgcattgtcgctggatcatcagcaaagatggtttacgggttggggcgatgacccgacggctgagcactcaaatctcaagacgcctagtcttggacttgtgtggagcacgcagattgcagctagaatcgctctacttcgacgcccagtctatggtagaaaagaggttgttggtgatgatgagtacgaggaaacgggcgttgggtcttatgtaaaaacttctcgaaggttcatgaaggttgttttcgcgccgcatgtgccggaatcgagacaggggctagatggcgccgtggaattcgaggttacgatgggaggcttgagaagtgtggagcggaagagaaaggggaagaagaggaattcgattgaataa

SEQ ID NO: 13721 - protein, 492 aa, Muscodor strobelii
  misc_feature: SGI Peptide ID NO. 564504
  misc_feature (1)..(482): NCBI GI: 261356977 Blast Desc: DNA repair protein RAD57 [Verticillium albo-atrum VaMs.102]
  misc_feature (1)..(482): NCBI GI: 39978201 Blast Desc: MGG_06985 [Magnaporthe grisea 70-15] gi|145013439|gb|EDJ98080.1| MGG_06985 [Magnaporthe grisea 70-15]
  misc_feature (1)..(479): NCBI GI: 156062294 Blast Desc: SS1G_01263 [Sclerotinia sclerotiorum 1980] gi|154696599|gb|EDN96337.1| SS1G_01263 [Sclerotinia sclerotiorum 1980]
  misc_feature (1)..(483): NCBI GI: 171689280 Blast Desc: protein product [Podospora anserina] gi|170944602|emb|CAP70713.1| protein product [Podospora anserina]
  misc_feature (1)..(483): NCBI GI: 154319083 Blast Desc: BC1G_02493 [Botryotinia fuckeliana B05.10] gi|150856924|gb|EDN32116.1| BC1G_02493 [Botryotinia fuckeliana B05.10]
  misc_feature (1)..(487): NCBI GI: 46107922 Blast Desc: FG00844.1 [Gibberella zeae PH-1]
  misc_feature (1)..(292): NCBI GI: 164428179 Blast Desc: NCU01771 [Neurospora crassa OR74A] gi|16416086|emb|CAB91223.2| related to RAD57 protein [Neurospora crassa] gi|157072044|gb|EAA27958.2| conserved [Neurospora crassa
  misc_feature (1)..(483): NCBI GI: 169596921 Blast Desc: SNOG_01234 [Phaeosphaeria nodorum SN15] gi|160707401|gb|EAT90883.2| SNOG_01234 [Phaeosphaeria nodorum SN15]
  misc_feature (1)..(483): NCBI GI: 189195182 Blast Desc: DNA repair protein rhp57 [Pyrenophora tritici-repentis Pt-1C-BFP] gi|187979808|gb|EDU46434.1| DNA repair protein rhp57 [Pyrenophora tritici-repentis Pt-1C-BFP]
  misc_feature (1)..(476): NCBI GI: 116199387 Blast Desc: CHGG_07849 [Chaetomium globosum CBS 148.51] gi|88179128|gb|EAQ86596.1| CHGG_07849 [Chaetomium globosum CBS 148.51]
MTDLSRVLPDFPTAKYARLLPTIEKQQLTVTDLLTLEVPEIGKRTQLPLLDIKRLCNAILDAIHADLGVADVDTDDKGKGKETARSDVSALRQNGEDLLSKPWHTISTLDTSLDAALGGGIPTGYLTEITGESGAGKTQFLLTLLLSAQLPPPYGLGRPALYISTEAALSTTRLSQILSHHPFFASLDPSISRPSLDGIISTVTPDLETQDHILTYQVPVEVSRRNIGLIILDSVAANYRAEFERGNTSSNMAARSAELVRLGSLFRELARKHNLAVVVANQVADRFSGSLPSSAKYGSSAILQITAQTPGPKRSFNLQDPLSQESPLASRSRHVTDPVSLDAEPASSMADIVVRSSMPEPVPEETVSEPAALSLDHQQRWFTGWGDDPTAEHSNLKTPSLGLVWSTQIAARIALLRRPVYGRKEVVGDDEYEETGVGSYVKTSRRFMKVVFAPHVPESRQGLDGAVEFEVTMGGLRSVERKRKGKKRNSIE

SEQ ID NO: 13722 - DNA, 1943 bp, Muscodor strobelii
  misc_feature: SGI EST ID NO. CUFF.32790.0
  misc_feature: Variant of the nucleotide sequence at SEQ ID NO 13720
gatctcatcactgacgcgtcgatagcctctgctggacatcttgaggcaccggcctgcgcccggaggagtgttcgggaaagtgatttgtataagtgcagtggtggccaagtgtcgcgccgtctagacgaatccgacaaggacccgaacgtggcacagtcggtcgatcaaagagaattccgggactcacggcggcacagcaccgcttgagtaaccaccaaatgcagtcctcatgaccgatctgtcacgggtcctgccggacttcccaaccgccaaatatgcgcggttgctaccgaccatcgagaagcagcagctgacagtgactgatctgctcactctcgaggttccggagattgggaagcgcacccagctaccgctacttgacatcaagcgcctgtgcaatgctatccttgatgcaattcacgccgatttaggtgtggccgacgtagatacggatgacaaagggaagggaaaagagaccgcccggtcggacgtgagcgcgttgcgacaaaatggcgaggacctgttatcaaagccttggcacacaatcagcacactcgatacgtcacttgatgccgcactgggcggcggtatcccaacaggctatctaacggaaatcacgggagaaagcggcgcaggcaagacacaatttctactcacacttctcctatctgcccaactcccgccgccttatgggttaggacgcccagcactttacatatccaccgaggcagcactctccacaacccggctctcacagatcctctcgcatcacccgtttttcgcctccctggacccgtcaatctccagaccgtctcttgatggaatcatcagcacggtcacacctgatcttgagacccaagatcacatcctaacctaccaagtacccgtcgaagtctctcgccgcaatataggtctcatcatcttagactctgtagcagcaaactaccgagcggaattcgagcgcggaaacacgagctctaacatggccgcgcgcagcgccgaattagtccgtctcgggtccttattccgcgagttggcacgaaaacacaacctcgcggttgtagtcgcgaaccaagtcgcagacaggttttccggttctctgccctcttccgctaagtacggcagtagtgcaatactccagataactgcacagactcctggtccaaaaagatcattcaatttacaggatccattatcccaggaaagccccctcgcgtccaggagcaggcatgtcacggatcctgtgtcgcttgatgcggagccagcaagcagtatggccgatattgtcgtccgatcctcaatgcctgaacctgtgcccgaagagaccgtttctgagcctgccgcattgtcgctggatcatcagcaaagatggtttacgggttggggcgatgacccgacggctgagcactcaaatctcaagacgcctagtcttggacttgtgtggagcacgcagattgcagctagaatcgctctacttcgacgcccagtctatggtagaaaagaggttgttggtgatgatgagtacgaggaaacgggcgttgggtcttatgtaaaaacttctcgaaggttcatgaaggttgttttcgcgccgcatgtgccggaatcgagacaggggctagatggcgccgtggaattcgaggttacgatgggaggcttgagaagtgtggagcggaagagaaaggggaagaagaggaattcgattgaataaagaggtagatatggttatggactgtgaatgagatcggtggtgaattgtacatgttatgatgctatgaggaaataatacgatgcgtcacgggtacatgccttttcgcgcacgaggtgcttaacgatcccgcgaatttccaggtgttcgtgtatgcatcgagcagcttgtgaattgtcgttttttaggacaaatacctgcatcaaaccactcttgatcaatgcaagcttcaaaatat

SEQ ID NO: 13723 - DNA, 2142 bp, Muscodor strobelii
  misc_feature: SGI cDNA ID NO. 564505
  misc_feature: Encodes the peptide sequence at SEQ ID NO 13724
atgccgcgctgcgaatattgtgcgaagctgacaatcagtgccctggttgatcttaccaagatagaatttgagagcggttattttccccaaaaggcattttatcagcatcaaccttctttggtcaaccttgaggcctcggcggtccagggctgtgatctgtgtctcctgatactagactcgttgaggggtactgagggacgccattgggacggctggtttgggcattctctaccagttgaatactcagtttttgggcgcatgagtactctagagaagaacgatataaggctgtccattgatgccgggcatctggattactttggcagattcaaagaagttcaggtatttgacaccttgcggataagcgtgggcgtaggcccgaagccacgtacatcgagaatcaaaagtgtgccattacagatattcgtttcatctcctaatcagcaacctgagctagaagccttcagaattggtcgattgcacgacgatgttcgcgtaggctctgaggccagcctcggctttgcacgtcaatatctagatacatgtcaaaaaacccatgaagaatgcgttaaaagagttgattcgcgattaccatcgcgagtaattgatgtgcgttcgaaaaaaagcagaaacgattgccagctagtcgagactaaggaaaagagtggctcttatgtagccctaagctactgctggggcggtactgtgcctcttcgcctacttcgcgacaacctcaaagcttttgagaaagggatttcactagatgccctcccggccacatttcgggatgccgtcactattacccgtgctctaggtgttccgtatctttggatagacgccctttgcattatccaaaattcaaagaaagattgggaaatggagtccggaaagatgggctactattatagtaatgctgttttgactatacgtgcgtcattggcagatagcagtatcagtgggatgtttcctcagcacgatccaacacagaggaacgaaacatctccggtcttcctaagcctatctccaaaaacaagcgccaataagcagttattcgttaaattaccgggtggaggtgatgaacacctggcctcattagagggtggcagtcctttgagatatcgagggtgggcgatacaggaatcaatcatatcacgtcaacttctgtacgttggcaagcgtcaaatgtactggaaatgcctgcatggatatcagacatttgacggtcttccggagggcggacctaggtaccccatcgacgcgtatactgcactaagatctgttgtatcatctggcaatagtctagccggtccgatgaaagcatgtccaacaagacaacaaattctcaacgattactactcaattgtcgaagaatattcgggcacaaatttgtctttcgcatcagacaaactaccagcattttccgggattgcgcagcacattcgctcaagcattggaggccactatcttgctggcctctggagcaatgatatccacagaggtctttgctggcatgcaagttactaccattgtcaacccgtctccaagtaccgtgctccttcatggtcgtgggcagcgacggatcaacggatagacacttgtcctgtcgtcgtcgcgccgaacaggttcaagctccaggtgattagttatgaagtaacactcagtgaccaacgcaatccctacggcgcagtgaagggatgctatcttcacatcaaaggcttcgttaagcccctattgcgaagcaatcacgccataacaagttataaatctattgctaacattgcctatgacgagccgcggccaggggagggcaactgcgtcaccgcaaccgtcaacaacctcgagtgtcttgtgtcaatgttcagagagggttccagaactccaaatctgagtaaagacttagatgcctcactgctaaatgaacaagatgaacttactgtcctcttgataggtttgtttcgggtaacgggggagatggatgacgaaaatgactgcggagaaaaagttggtagggctaaagctcttgtcttgcgaaaagtagacaatagcaaggacaacgagttcgtaagaattggtgttctagaggtcgaagccgtgaggagctggtatgagacctgggaacagcgtgcgcttaagctagtttga

SEQ ID NO: 13724 - protein, 713 aa, Muscodor strobelii
  misc_feature: SGI Peptide ID NO. 564505
  misc_feature (225)..(380): Pfam Id: PF06985 Pfam Desc: Heterokaryon incompatibility protein (HET)
  misc_feature (3)..(713): NCBI GI: 171677566 Blast Desc: protein product [Podospora anserina] gi|170936851|emb|CAP61509.1| protein product [Podospora anserina]
  misc_feature (82)..(713): NCBI GI: 145604236 Blast Desc: MGG_08449 [Magnaporthe grisea 70-15] gi|145012271|gb|EDJ96927.1| MGG_08449 [Magnaporthe grisea 70-15]
  misc_feature (3)..(597): NCBI GI: 256724255 Blast Desc: NECHADRAFT_87557 [Nectria haematococca mpVI 77-13-4]
  misc_feature (4)..(713): NCBI GI: 256720830 Blast Desc: NECHADRAFT_85535 [Nectria haematococca mpVI 77-13-4]
  misc_feature (144)..(570): NCBI GI: 154304664 Blast Desc: BC1G_08071 [Botryotinia fuckeliana B05.10] gi|150853971|gb|EDN29163.1| BC1G_08071 [Botryotinia fuckeliana B05.10]
  misc_feature (197)..(578): NCBI GI: 256722781 Blast Desc: NECHADRAFT_5039 [Nectria haematococca mpVI 77-13-4]
  misc_feature (2)..(577): NCBI GI: 171677825 Blast Desc: protein product [Podospora anserina] gi|170936981|emb|CAP61639.1| protein product [Podospora anserina]
  misc_feature (115)..(581): NCBI GI: 256728092 Blast Desc: NECHADRAFT_83551 [Nectria haematococca mpVI 77-13-4]
  misc_feature (174)..(574): NCBI GI: 256726009 Blast Desc: NECHADRAFT_81484 [Nectria haematococca mpVI 77-13-4]
  misc_feature (166)..(533): NCBI GI: 46115468 Blast Desc: FG03576.1 [Gibberella zeae PH-1]
MPRCEYCAKLTISALVDLTKIEFESGYFPQKAFYQHQPSLVNLEASAVQGCDLCLLILDSLRGTEGRHWDGWFGHSLPVEYSVFGRMSTLEKNDIRLSIDAGHLDYFGRFKEVQVFDTLRISVGVGPKPRTSRIKSVPLQIFVSSPNQQPELEAFRIGRLHDDVRVGSEASLGFARQYLDTCQKTHEECVKRVDSRLPSRVIDVRSKKSRNDCQLVETKEKSGSYVALSYCWGGTVPLRLLRDNLKAFEKGISLDALPATFRDAVTITRALGVPYLWIDALCIIQNSKKDWEMESGKMGYYYSNAVLTIRASLADSSISGMFPQHDPTQRNETSPVFLSLSPKTSANKQLFVKLPGGGDEHLASLEGGSPLRYRGWAIQESIISRQLLYVGKRQMYWKCLHGYQTFDGLPEGGPRYPIDAYTALRSVVSSGNSLAGPMKACPTRQQILNDYYSIVEEYSGTNLSFASDKLPAFSGIAQHIRSSIGGHYLAGLWSNDIHRGLCWHASYYHCQPVSKYRAPSWSWAATDQRIDTCPVVVAPNRFKLQVISYEVTLSDQRNPYGAVKGCYLHIKGFVKPLLRSNHAITSYKSIANIAYDEPRPGEGNCVTATVNNLECLVSMFREGSRTPNLSKDLDASLLNEQDELTVLLIGLFRVTGEMDDENDCGEKVGRAKALVLRKVDNSKDNEFVRIGVLEVEAVRSWYETWEQRALKLV

SEQ ID NO: 13725 - DNA, 675 bp, Muscodor strobelii
  misc_feature: SGI EST ID NO. CUFF.32793.0
  misc_feature: Variant of the nucleotide sequence at SEQ ID NO 13723
gagatttcgagtttattgctcagcaacaatcatccaacgatgccgcgctgcgaatattgtgcgaagctgacaatcagtgccctggttgatcttaccaagatagaatttgagagcggttattttccccaaaaggcattttatcagcatcaaccttctttggtcaaccttgaggcctcggcggtccagggctgtgatctgtgtctcctgatactagactcgttgaggggtactgagggacgccattgggacggctggtttgggcattctctaccagttgaatactcagtttttgggcgcatgagtactctagagaagaacgatataaggctgtccattgatgccgggcatctggattactttggcagattcaaagaagttcaggtatttgacaccttgcggataagcgtgggcgtaggcccgaagccacgtacatcgagaatcaaaagtgtgccattacagatattcgtttcatctcctaatcagcaacctgagctagaagccttcagaattggtcgattgcacgacgatgttcgcgtaggctctgaggccagcctcggctttgcacgtcaatatctagatacatgtcaaaaaacccatgaagaatgcgttaaaagagttgattcgcgattaccatcgcgagtaattgatgtgcgttcgaaaaaaagcagaaacgat

SEQ ID NO: 13726 - DNA, 489 bp, Muscodor strobelii
  misc_feature: SGI cDNA ID NO. 564506
  misc_feature: Encodes the peptide sequence at SEQ ID NO 13727
atgctgttctttgcattgaatacgggaactgactcacgcgctcctgccggctcagccaatactgtcttgagcgcagaggcacctactaacagtggtgaagacaagccccccgagcctcccaagcccccgcccggctggtgtgaagcgccacatgccgccattcagggccgaagagaccgtcgtcgccatgcgtgccctcactgtgaccatcttgctagccagctccacgagcactgtcggcttgtgcatatcggcacgatttgccgatggtccgcccaggttggtggtgccgcgtgcgagtacattaccgccaacgaggaagagatggtcacccatctgaaggaagctcatccggccacccaggatgggagcggatgggcggtgaactggcctggctgtcctaatacttcggacaagaaatcggctgagagatctgcacgtaaggcgcagtataaggccttttgggaatttgcccagcattacgagtag

SEQ ID NO: 13727 - protein, 162 aa, Muscodor strobelii
  misc_feature: SGI Peptide ID NO. 564506
MLFFALNTGTDSRAPAGSANTVLSAEAPTNSGEDKPPEPPKPPPGWCEAPHAAIQGRRDRRRHACPHCDHLASQLHEHCRLVHIGTICRWSAQVGGAACEYITANEEEMVTHLKEAHPATQDGSGWAVNWPGCPNTSDKKSAERSARKAQYKAFWEFAQHYE

SEQ ID NO: 13728 - DNA, 615 bp, Muscodor strobelii
  misc_feature: SGI cDNA ID NO. 564507
  misc_feature: Encodes the peptide sequence at SEQ ID NO 13729
atggctggcgaaccaactcctgtggctcagcctccccacaccccaacattcattctcgtcaagttcatccatcgagatgacttgtccacggacattgagcaatactgcccggaaacacaaatcatacatgatagttggtactggaaagtggaaacagagaactgggctatcctcgagacagtccgtccctgcccaggatataattgtgcagagttggattccaccccattcttcgagaatggcgattctcgaaaagtcaacagcaatcgcgaagctgctttcaccctctggaagaacaccatccgcaaaggcgctcgagaggatttcgctgcaaagcaccctcaatgcacgcagggtgtgagagttcagatttacggtcgtgaacaagttgtttatcggtctgtgaagcctcttggtcctaacacttcgaagggtgaaacgaagaagattgaggagaaccgactgcatagtacgagagcgactctgggacatcttgcgcattcggagaatattgatcatattgttgtgacttattataccgagcctggcagagagagaccggatgctgagactttgcctgttactccttattttggatcagttcatacacaataa

SEQ ID NO: 13729 - protein, 204 aa, Muscodor strobelii
  misc_feature: SGI Peptide ID NO. 564507
MAGEPTPVAQPPHTPTFILVKFIHRDDLSTDIEQYCPETQIIHDSWYWKVETENWAILETVRPCPGYNCAELDSTPFFENGDSRKVNSNREAAFTLWKNTIRKGAREDFAAKHPQCTQGVRVQIYGREQVVYRSVKPLGPNTSKGETKKIEENRLHSTRATLGHLAHSENIDHIVVTYYTEPGRERPDAETLPVTPYFGSVHTQ

SEQ ID NO: 13730 - DNA, 1605 bp, Muscodor strobelii
  misc_feature: SGI cDNA ID NO. 564508
  misc_feature: Reduced expression when VOC is produced
  misc_feature: Encodes the peptide sequence at SEQ ID NO 13731
atggagaccgacaatggcgcccgcgtcgtcgcaaatgcccggacgagtctggtgccgaaacacgagcgagagaaacgacgacgcgccaaagaggctcagaggcaatacggtcgcggaaagggtgtcaataccaagaacataaaagacaagaagctgcggaggaatctacaggccctcgaatcaaaataccaggaagccagcttaaaggccaaggatgctgagattctccttgaggagacgtcaggttaccttgagccagagacagagttggagcgcacatacaaagttagacaagcagagatacaggacagcgtctcggttgcgacagcacagaagcgcttcgacttgactctcaacgagttggggccaaactttgaagctgacgaagttgctgcagtcgcgtcaatggactggcggcggggcaagttaaactgcgagtttcaagtcaacgagactgtccgcgatgtgaggtggctacattcaaatcagtacatggcggtagcgcagaagaagaacgtctacatatatgaccaccacggtgttgagttacattgcttgaatcagcaccgtgaggtgtcgcacttggagtttttgccattccacttcctcttaacgacgttaggagctagcggacacttgaaataccaggatgtatcgacgggacagttagtcagcgagattgcgacgaaactagggcctccgacatcactagcccaaaatccatacaacgccatctgtttcaccggccacactaacggccagatccagctgtggtcgccaaattgctcatcctcagacggtcctcttgtcaaattattagcacataaaggcccagtacgggccatgtcaattgacagagaaggaagatatatggtttccacaggccaggactgcaagatggccgtctgggacgttcgccagttcaaggtggtaaacgagtactttacacgccaaccagcatcatcagtcgcgatatcggatcgaggcgtaacagcagtgggatggggaacctcgacgacgatgtggcagggcctgttcaacaagcatgtagcagagcaggtcaaggtacaaagtccatatctgacatggggtggtgagggcaagagagtagagcgcgtgcggtggtgccccttagaagatattctaggtatcggccatgacgagggtttcagctccatcatagtacccggtgccggcgaacccaacatggatgtaatggaagtcaaccccttcgagacgaagaaggagagacaagataacgaagttcgctcactactcaacaagctgcagccggagatgatcgcactagacccgacattcatcggaaatctcgacctgcggtctgatgcacagcggagagcagagaaggatctcgatgctaagccagtagatctagagacagagatcaggaatagggcaagagggaagaactcagcactaaagaaatatctgaagaagcagaggaggaagaatgtcattgatgagaagagactcaaggttgatgagatctggaaggaaacacagcagcagagacgagaggagaagcagaaggagagggaggttgagttgggtcctgcgttgtcgaggtttgctaagagggattag

SEQ ID NO: 13731 - protein, 534 aa, Muscodor strobelii
  misc_feature: SGI Peptide ID NO. 564508
  misc_feature (266)..(304): Pfam Id: PF00400 Pfam Desc: WD domain, G-beta repeat
  misc_feature (359)..(438): Pfam Id: PF08149 Pfam Desc: BING4CT (NUC141) domain
  misc_feature (2)..(534): NCBI GI: 39973507 Blast Desc: MGG_01100 [Magnaporthe grisea 70-15] gi|145017935|gb|EDK02214.1| MGG_01100 [Magnaporthe grisea 70-15]
  misc_feature (4)..(534): NCBI GI: 256729280 Blast Desc: [Nectria haematococca mpVI 77-13-4]
  misc_feature (4)..(534): NCBI GI: 46117124 Blast Desc: FG04404.1 [Gibberella zeae PH-1]
  misc_feature (5)..(534): NCBI GI: 116199629 Blast Desc: CHGG_07970 [Chaetomium globosum CBS 148.51] gi|88179249|gb|EAQ86717.1| CHGG_07970 [Chaetomium globosum CBS 148.51]
  misc_feature (2)..(534): NCBI GI: 85082632 Blast Desc: NCU01502 [Neurospora crassa OR74A] gi|7801048|emb|CAB91444.1| conserved [Neurospora crassa] gi|28918033|gb|EAA27715.1| NCU01502 [Neurospora crassa OR74A]
  misc_feature (5)..(534): NCBI GI: 171688690 Blast Desc: protein product [Podospora anserina] gi|170944307|emb|CAP70417.1| protein product [Podospora anserina]
  misc_feature (5)..(533): NCBI GI: 154310497 Blast Desc: BC1G_07169 [Botryotinia fuckeliana B05.10] gi|150851500|gb|EDN26693.1| BC1G_07169 [Botryotinia fuckeliana B05.10]
  misc_feature (23)..(532): NCBI GI: 239610594 Blast Desc: small nucleolar ribonucleoprotein complex subunit [Ajellomyces dermatitidis ER-3]
  misc_feature (23)..(532): NCBI GI: 261195280 Blast Desc: small nucleolar ribonucleoprotein complex subunit [Ajellomyces dermatitidis SLH14081] gi|239587916|gb|EEQ70559.1| small nucleolar ribonucleoprotein complex subunit [Ajellomyces
  misc_feature (1)..(531): NCBI GI: 154281731 Blast Desc: HCAG_03776 [Ajellomyces capsulatus NAm1] gi|150411857|gb|EDN07245.1| HCAG_03776 [Ajellomyces capsulatus NAm1]
  misc_feature: Useful for introducing or modulating the production of volatile compounds
METDNGARVVANARTSLVPKHEREKRRRAKEAQRQYGRGKGVNTKNIKDKKLRRNLQALESKYQEASLKAKDAEILLEETSGYLEPETELERTYKVRQAEIQDSVSVATAQKRFDLTLNELGPNFEADEVAAVASMDWRRGKLNCEFQVNETVRDVRWLHSNQYMAVAQKKNVYIYDHHGVELHCLNQHREVSHLEFLPFHFLLTTLGASGHLKYQDVSTGQLVSEIATKLGPPTSLAQNPYNAICFTGHTNGQIQLWSPNCSSSDGPLVKLLAHKGPVRAMSIDREGRYMVSTGQDCKMAVWDVRQFKVVNEYFTRQPASSVAISDRGVTAVGWGTSTTMWQGLFNKHVAEQVKVQSPYLTWGGEGKRVERVRWCPLEDILGIGHDEGFSSIIVPGAGEPNMDVMEVNPFETKKERQDNEVRSLLNKLQPEMIALDPTFIGNLDLRSDAQRRAEKDLDAKPVDLETEIRNRARGKNSALKKYLKKQRRKNVIDEKRLKVDEIWKETQQQRREEKQKEREVELGPALSRFAKRD

SEQ ID NO: 13732 - DNA, 2057 bp, Muscodor strobelii
  misc_feature: SGI EST ID NO. CUFF.32928.1
  misc_feature: Variant of the nucleotide sequence at SEQ ID NO 13730
agggagtcaccttcttgacaaaacggttacttacttgtcgcgtgacgatttaaaagcgcctttcgtgtcatatagtcctacattgaacatcctaaggtcttggcagccaacaaatagccactctccaccatggagaccgacaatggcgcccgcgtcgtcgcaaatgcccggacgagtctggtgccgaaacacgagcgagagaaacgacgacgcgccaaagaggctcagaggcaatacggtcgcggaaagggtgtcaataccaagaacataaaagacaagaagctgcggaggaatctacaggccctcgaatcaaaataccaggaagccagcttaaaggccaaggatgctgagattctccttgaggagacgtcaggttaccttgagccagagacagagttggagcgcacatacaaagttagacaagcagagatacaggacagcgtctcggttgcgacagcacagaagcgcttcgacttgactctcaacgagttggggccgtatgtcttcgattatagcaagaatggccgcgatctgctgttgggagggagaaaaaggacacagtacgtgcgatacaggtctcatttgccactcgaagaaactttgaagctgacgaagttgctgcagtcgcgtcaatggactggcggcggggcaagttaaactgcgagtttcaagtcaacgagactgtccgcgatgtgaggtggctacattcaaatcagtacatggcggtagcgcagaagaagaacgtctacatatatgaccaccacggtgttgagttacattgcttgaatcagcaccgtgaggtgtcgcacttggagtttttgccattccacttcctcttaacgacgttaggagctagcggacacttgaaataccaggatgtatcgacgggacagttagtcagcgagattgcgacgaaactagggcctccgacatcactagcccaaaatccatacaacgccatctgtttcaccggccacactaacggccagatccagctgtggtcgccaaattgctcatcctcagacggtcctcttgtcaaattattagcacataaaggcccagtacgggccatgtcaattgacagagaaggaagatatatggtttccacaggccaggactgcaagatggccgtctgggacgttcgccagttcaaggtggtaaacgagtactttacacgccaaccagcatcatcagtcgcgatatcggatcgaggcgtaacagcagtgggatggggaacctcgacgacgatgtggcagggcctgttcaacaagcatgtagcagagcaggtcaaggtacaaagtccatatctgacatggggtggtgagggcaagagagtagagcgcgtgcggtggtgccccttagaagatattctaggtatcggccatgacgagggtttcagctccatcatagtacccggtgccggcgaacccaacatggatgtaatggaagtcaaccccttcgagacgaagaaggagagacaagataacgaagttcgctcactactcaacaagctgcagccggagatgatcgcactagacccgacattcatcggaaatctcgacctgcggtctgatgcacagcggagagcagagaaggatctcgatgctaagccagtagatctagagacagagatcaggaatagggcaagagggaagaactcagcactaaagaaatatctgaagaagcagaggaggaagaatgtcattgatgagaagagactcaaggttgatgagatctggaaggaaacacagcagcagagacgagaggagaagcagaaggagagggaggttgagttgggtcctgcgttgtcgaggtttgctaagagggattaggatcagatagaggagagcacgtggcatatgaatgatataccctttcacatatactttgattttgtgcgtcattactgcgacgtccctgtcttgctacgtctaaatctaggtgcagattgaggtttaaagagttacgagctatatggattatatcgatgagagtttagatacagtttcaatgctctttagcagttttgtagaaggacgcaagttgtgtaggtagat

SEQ ID NO: 13733 - DNA, 2418 bp, Muscodor strobelii
  misc_feature: SGI cDNA ID NO. 564509
  misc_feature: Encodes the peptide sequence at SEQ ID NO 13734
atgccttctgcaacccactcccaccggccaaccaccaaagtggtgcacaagtctttcaagtcgagaaaagccaccaagggctctcttagagacgaagcgaaaggcaaagtacccaacgagagacgaaagaccccccaccaacaagtcatgtccaagttcgatcgccgaaaccaggccaagcagcgccagttgacaaaacaccgagagcaccagaaggaagcctccattttcaatggtcgagacggcgccccgaggatagttgccgtcgtccccctttgcgccgacagcgatgcctctaccgccatccagagcctcaacggcagcctcgatatcaacgccgacgtcaccactacccagttgaccgtctccgtcgaccgcttcaaacagaaactccagtacattcccatgaagagggatctgtcagcctgcatggacgccgccagagtcgctgattttgtcatatttgttctctcagccgagacagaagtcgacccgttgggcgaactcatcatccgaagtattgagaatcagggcatgtccaccctgtttaccgttgttcagaatctagacaaggtcgaacccgcaaaagccaggccagatgttgtcaagtcgcttgtctccttcatgacacacttccaccccggtcaggacaggatatatagtcttgacgcgaggcaagagtgctccaatctcatgagatcgctgtgcagcaacatgcccaagggtgtcaactggagggaccagagatcgtggatgttggtagacgaggttcaatggccatcctctgagaccgagtctaccgtgctcacaggagtggttcggggcaaaggtcttaaagccgaccgattggtgacagtcggagaatggggtactttccagatcgaaaaaatcacagccgccccacttccttctaagaagaggaaggaggatggtatggccgtggacgagactagagaagaaaatgtgctagagacgccaaacgaggaccaggaggaccttgccgaactagctcccgaggaggtgataatgaacgatgcagtcgacagcaccactgatgctggtgcacccacaagcaaaaagggtgtcctccttgacgaccaccattatttcgaagagaccgagctggagagatatgaagcaccaaagaagctgcccaagggaacatccgaataccaagcaaaatggatactagatgacgtttcagattcagaggacgagttcgacgaggagatggttgacgcacaggaggaacccacagaagctcgcccagaggacgggatggaaggcctcgtaggccgagaacctaccgaagccgccatgtcggagtatccccagtccgaaggcttcgttgaactcgaagaggacgaaaacgcagaacagctggctgcatacagaaagcgcaggagagacgaggctgaggacgacaaggaattcccagatgaaattgaattgcaccctaatgtgctggctcgtgaaagactggccaaatatcgcggtctcaagagtctacgatcgagtccttggaaccaagaagaagacaccccttaccagcccgaagaatggacaagattattgcaaatctcagactacaagtcttctcggaacgtatgccttcgtgaggctctggttggtggcgtgaagccaggaactcgggttcacgtccacctcaaggctgtccctacagagcttcagcagtcttacgatccttccgtacccctcagtcttttctctcttctcagacatgagaacaagaagaccgtagtcaatttcgatgtcacgcacaaggaagactacgagaaatctattaaggcaaaagaagagttgatcgttcaatgtggtcctcggcgattcgtcatcaacccccttttctccactggtagcaacaccgaaaacgacgtccacaagtattgtcgatacctccacccaggccagtctgccgtagcaacatttatgggcccggtaacatggggtgccgttccgacgctattcttcaagcgcgtcatgccagaagcaggcgaagacggaccaacactcccattacaactcgtagcaacaggtacaacgcgagcaccttcaacttcccgcgtcatcgccaagcgagccattctcaccggccacccataccatattcacaagaaggtcgtcactattcgatatatgttcttcaacagggaagacgtcgattggttcaaagccatgccgttatggacgaagcgtgggcggggtggttatatcaaggaggcgttgggtacgcatggctactttaaggctaactttgatggaaggattaatccgcaggattcggtcggtattagtttgtataagagggtgtggcctagaaatgctacgccgtttgggggcaagttgttggatgagactgctgtggggaatgaggcgatggatgaggatatactgtaa

SEQ ID NO: 13734 - protein, 805 aa, Muscodor strobelii
  misc_feature: SGI Peptide ID NO. 564509
  misc_feature (227)..(304): Pfam Id: PF08142 Pfam Desc: AARP2CN (NUC121) domain
  misc_feature (480)..(777): Pfam Id: PF04950 Pfam Desc: Domain of function (DUF663)
  misc_feature (1)..(805): NCBI GI: 85082636 Blast Desc: NCU01503 [Neurospora crassa OR74A] gi|7801047|emb|CAB91443.1| conserved [Neurospora crassa] gi|28918034|gb|EAA27716.1| NCU01503 [Neurospora crassa OR74A]
  misc_feature (1)..(801): NCBI GI: 116199631 Blast Desc: CHGG_07971 [Chaetomium globosum CBS 148.51] gi|88179250|gb|EAQ86718.1| CHGG_07971 [Chaetomium globosum CBS 148.51]
  misc_feature (1)..(802): NCBI GI: 256729471 Blast Desc: [Nectria haematococca mpVI 77-13-4]
  misc_feature (2)..(782): NCBI GI: 154310499 Blast Desc: BC1G_07170 [Botryotinia fuckeliana B05.10] gi|150851501|gb|EDN26694.1| BC1G_07170 [Botryotinia fuckeliana B05.10]
  misc_feature (1)..(804): NCBI GI: 39973533 Blast Desc: MGG_01087 [Magnaporthe grisea 70-15] gi|145017954|gb|EDK02233.1| MGG_01087 [Magnaporthe grisea 70-15]
  misc_feature (6)..(782): NCBI GI: 156055496 Blast Desc: SS1G_05100 [Sclerotinia sclerotiorum 1980] gi|154702884|gb|EDO02623.1| SS1G_05100 [Sclerotinia sclerotiorum 1980]
  misc_feature (1)..(791): NCBI GI: 46117122 Blast Desc: FG04403.1 [Gibberella zeae PH-1]
  misc_feature (1)..(803): NCBI GI: 171688692 Blast Desc: protein product [Podospora anserina] gi|170944308|emb|CAP70418.1| protein product [Podospora anserina]
  misc_feature (5)..(782): NCBI GI: 169609438 Blast Desc: SNOG_07811 [Phaeosphaeria nodorum SN15] gi|160701844|gb|EAT85277.2| SNOG_07811 [Phaeosphaeria nodorum SN15]
  misc_feature (5)..(782): NCBI GI: 115384128 Blast Desc: conserved [Aspergillus terreus NIH2624] gi|114196303|gb|EAU38003.1| conserved [Aspergillus terreus NIH2624]
MPSATHSHRPTTKVVHKSFKSRKATKGSLRDEAKGKVPNERRKTPHQQVMSKFDRRNQAKQRQLTKHREHQKEASIFNGRDGAPRIVAVVPLCADSDASTAIQSLNGSLDINADVTTTQLTVSVDRFKQKLQYIPMKRDLSACMDAARVADFVIFVLSAETEVDPLGELIIRSIENQGMSTLFTVVQNLDKVEPAKARPDVVKSLVSFMTHFHPGQDRIYSLDARQECSNLMRSLCSNMPKGVNWRDQRSWMLVDEVQWPSSETESTVLTGVVRGKGLKADRLVTVGEWGTFQIEKITAAPLPSKKRKEDGMAVDETREENVLETPNEDQEDLAELAPEEVIMNDAVDSTTDAGAPTSKKGVLLDDHHYFEETELERYEAPKKLPKGTSEYQAKWILDDVSDSEDEFDEEMVDAQEEPTEARPEDGMEGLVGREPTEAAMSEYPQSEGFVELEEDENAEQLAAYRKRRRDEAEDDKEFPDEIELHPNVLARERLAKYRGLKSLRSSPWNQEEDTPYQPEEWTRLLQISDYKSSRNVCLREALVGGVKPGTRVHVHLKAVPTELQQSYDPSVPLSLFSLLRHENKKTVVNFDVTHKEDYEKSIKAKEELIVQCGPRRFVINPLFSTGSNTENDVHKYCRYLHPGQSAVATFMGPVTWGAVPTLFFKRVMPEAGEDGPTLPLQLVATGTTRAPSTSRVIAKRAILTGHPYHIHKKVVTIRYMFFNREDVDWFKAMPLWTKRGRGGYIKEALGTHGYFKANFDGRINPQDSVGISLYKRVWPRNATPFGGKLLDETAVGNEAMDEDIL

SEQ ID NO: 13735 - DNA, 2696 bp, Muscodor strobelii
  misc_feature: SGI EST ID NO. CUFF.32931.0
  misc_feature: Variant of the nucleotide sequence at SEQ ID NO 13733
caaccctgcccctccaactttcaggaagccgtatcttatgggtcgacctcgaaaaaggaacaaaatttagaagtcgatctcgaacagccagaggataggcaacagatatcctagtcaccaaacgactcatttaataccttgttattgagcgtaccatctgcaaagtggcttctttacccttcagattcaaagctgggggtgacggcaagatgccttctgcaacccactcccaccggccaaccaccaaagtggtgcacaagtctttcaagtcgagaaaagccaccaagggctctcttagagacgaagcgaaaggcaaagtacccaacgagagacgaaagaccccccaccaacaagtcatgtccaagttcgatcgccgaaaccaggccaagcagcgccagttgacaaaacaccgagagcaccagaaggaagcctccattttcaatggtcgagacggcgccccgaggatagttgccgtcgtccccctttgcgccgacagcgatgcctctaccgccatccagagcctcaacggcagcctcgatatcaacgccgacgtcaccactacccagttgaccgtctccgtcgaccgcttcaaacagaaactccagtacattcccatgaagagggatctgtcagcctgcatggacgccgccagagtcgctgattttgtcatatttgttctctcagccgagacagaagtcgacccgttgggcgaactcatcatccgaagtattgagaatcagggcatgtccaccctgtttaccgttgttcagaatctagacaaggtcgaacccgcaaaagccaggccagatgttgtcaagtcgcttgtctccttcatgacacacttccaccccggtcaggacaggatatatagtcttgacgcgaggcaagagtgctccaatctcatgagatcgctgtgcagcaacatgcccaagggtgtcaactggagggaccagagatcgtggatgttggtagacgaggttcaatggccatcctctgagaccgagtctaccgtgctcacaggagtggttcggggcaaaggtcttaaagccgaccgattggtgacagtcggagaatggggtactttccagatcgaaaaaatcacagccgccccacttccttctaagaagaggaaggaggatggtatggccgtggacgagactagagaagaaaatgtgctagagacgccaaacgaggaccaggaggaccttgccgaactagctcccgaggaggtgataatgaacgatgcagtcgacagcaccactgatgctggtgcacccacaagcaaaaagggtgtcctccttgacgaccaccattatttcgaagagaccgagctggagagatatgaagcaccaaagaagctgcccaagggaacatccgaataccaagcaaaatggatactagatgacgtttcagattcagaggacgagttcgacgaggagatggttgacgcacaggaggaacccacagaagctcgcccagaggacgggatggaaggcctcgtaggccgagaacctaccgaagccgccatgtcggagtatccccagtccgaaggcttcgttgaactcgaagaggacgaaaacgcagaacagctggctgcatacagaaagcgcaggagagacgaggctgaggacgacaaggaattcccagatgaaattgaattgcaccctaatgtgctggctcgtgaaagactggccaaatatcgcggtctcaagagtctacgatcgagtccttggaaccaagaagaagacaccccttaccagcccgaagaatggacaagattattgcaaatctcagactacaagtcttctcggaacgtatgccttcgtgaggctctggttggtggcgtgaagccaggaactcgggttcacgtccacctcaaggctgtccctacagagcttcagcagtcttacgatccttccgtacccctcagtcttttctctcttctcagacatgagaacaagaagaccgtagtcaatttcgatgtcacgcacaaggaagactacgagaaatctattaaggcaaaagaagagttgatcgttcaatgtggtcctcggcgattcgtcatcaacccccttttctccactggtagcaacaccgaaaacgacgtccacaagtattgtcgatacctccacccaggccagtctgccgtagcaacatttatgggcccggtaacatggggtgccgttccgacgctattcttcaagcgcgtcatgccagaagcaggcgaagacggaccaacactcccattacaactcgtagcaacaggtacaacgcgagcaccttcaacttcccgcgtcatcgccaagcgagccattctcaccggccacccataccatattcacaagaaggtcgtcactattcgatatatgttcttcaacagggaagacgtcgattggttcaaagccatgccgttatggacgaagcgtgggcggggtggttatatcaaggaggcgttgggtacgcatggctactttaaggctaactttgatggaaggattaatccgcaggattcggtcggtattagtttgtataagagggtgtggcctagaaatgctacgccgtttgggggcaagttgttggatgagactgctgtggggaatgaggcgatggatgaggatatactgtaaaagggttgaagggttgggggtgtttatgaattatgagataaatagatggatatcggttcgatgctctca

SEQ ID NO: 13736 - DNA, 786 bp, Muscodor strobelii
  misc_feature: SGI cDNA ID NO. 564510
  misc_feature: Encodes the peptide sequence at SEQ ID NO 13737
atgcgtttcctccaaaaggaccccgcgggcaactacagcctcacagatggcaagcttggcgatgccgacaccgcaccaagatatgcgatattatcacacgtatggggcgcagaggaggtggccttgaaggatgttgaaaacggaactgctacgacgaaaattgggtatgaaaaaattgaattctgcggaaaacaagcctgcagcgatggcttattgctgtggtgggttgatacgtgctgcattgataagacctcaagcgccgagctgtccgaggcgatcaactccatgtacaagtggtaccagaactcggtcaagtgctatgtcttcctctctgatgtttcggttcccaagaatgaagcgctaagggagggtcaatgggaaccgcaatttatggcaagccgatggttcactcggggctggactttgcaagagcttctcgcgccccgaatagtcgagttcttctcaagagagggtcgtctgctaggtagcaaagaatccctcgaatacctcattcaccaagaaaccggaatcgcagttcgagcactccagggagccccaccaagcgaattcagcgttggcgatcggttaaactgggccagaagtcgtcaaactacaaagaaggaggactgggcctactcgctgtttggaattttcggtatatgcatgccattactatatggcgaggggcgtatgaacgcggagcggcgtctaatgcaaggtatcgaggaagcatcgatcattcgagctagctcgacactcaccgcaggtaagtcgctgattatctag

SEQ ID NO: 13737 - protein, 261 aa, Muscodor strobelii
  misc_feature: SGI Peptide ID NO. 564510
  misc_feature (28)..(144): Pfam Id: PF06985 Pfam Desc: Heterokaryon incompatibility protein (HET)
  misc_feature (1)..(242): NCBI GI: 156051486 Blast Desc: SS1G_07150 [Sclerotinia sclerotiorum 1980] gi|154704928|gb|EDO04667.1| SS1G_07150 [Sclerotinia sclerotiorum 1980]
  misc_feature (1)..(244): NCBI GI: 154312957 Blast Desc: BC1G_05480 [Botryotinia fuckeliana B05.10] gi|150849565|gb|EDN24758.1| BC1G_05480 [Botryotinia fuckeliana B05.10]
  misc_feature (1)..(245): NCBI GI: 154936832 Blast Desc: HNWD3 [Podospora anserina]
  misc_feature (1)..(245): NCBI GI: 171685532 Blast Desc: protein product [Podospora anserina] gi|170942727|emb|CAP68380.1| protein product [Podospora anserina]
  misc_feature (1)..(243): NCBI GI: 171693331 Blast Desc: protein product [Podospora anserina] gi|170946614|emb|CAP73416.1| protein product [Podospora anserina]
  misc_feature (1)..(243): NCBI GI: 154936840 Blast Desc: HET-D [Podospora anserina]
  misc_feature (1)..(241): NCBI GI: 171677728 Blast Desc: protein product [Podospora anserina] gi|154936838|emb|CAL30215.1| HET-E [Podospora anserina] gi|170936932|emb|CAP61591.1| protein product [Podospora anserina]
  misc_feature (1)..(246): NCBI GI: 156056268 Blast Desc: SS1G_05486 [Sclerotinia sclerotiorum 1980] gi|154703270|gb|EDO03009.1| SS1G_05486 [Sclerotinia sclerotiorum 1980]
  misc_feature (1)..(243): NCBI GI: 154294222 Blast Desc: BC1G_13797 [Botryotinia fuckeliana B05.10] gi|150844807|gb|EDN20000.1| BC1G_13797 [Botryotinia fuckeliana B05.10]
  misc_feature (1)..(246): NCBI GI: 156048486 Blast Desc: SS1G_08974 [Sclerotinia sclerotiorum 1980] gi|154693371|gb|EDN93109.1| SS1G_08974 [Sclerotinia sclerotiorum 1980]
MRFLQKDPAGNYSLTDGKLGDADTAPRYAILSHVWGAEEVALKDVENGTATTKIGYEKIEFCGKQACSDGLLLWWVDTCCIDKTSSAELSEAINSMYKWYQNSVKCYVFLSDVSVPKNEALREGQWEPQFMASRWFTRGWTLQELLAPRIVEFFSREGRLLGSKESLEYLIHQETGIAVRALQGAPPSEFSVGDRLNWARSRQTTKKEDWAYSLFGIFGICMPLLYGEGRMNAERRLMQGIEEASIIRASSTLTAGKSLII

SEQ ID NO: 13738 - DNA, 499 bp, Muscodor strobelii
  misc_feature: SGI EST ID NO. CUFF.32829.0
  misc_feature: Variant of the nucleotide sequence at SEQ ID NO 13736
gaggaggtggccttgaaggatgttgaaaacggaactgctacgacgaaaattgggtatgaaaaaattgaattctgcggaaaacaagcctgcagcgatggcttattgctgtggtgggttgatacgtgctgcattgataagacctcaagcgccgagctgtccgaggcgatcaactccatgtacaagtggtaccagaactcggtcaagtgctatgtcttcctctctgatgtttcggttcccaagaatgaagcgctaagggagggtcaatgggaaccgcaatttatggcaagccgatggttcactcggggctggactttgcaagagcttctcgcgccccgaatagtcgagttcttctcaagagagggtcgtctgctaggtagcaaagaatccctcgaatacctcattcaccaagaaaccggaatcgcagttcgagcactccagggagccccaccaagcgaattcagcgttggcgatcggttaaactgggccagaagtcgtcaaa

SEQ ID NO: 13739 - DNA, 810 bp, Muscodor strobelii
  misc_feature: SGI cDNA ID NO. 564511
  misc_feature: Elevated expression when VOC is produced
  misc_feature: Encodes the peptide sequence at SEQ ID NO 13740
atgtcgcattcccacgacggcgcaagccactcccactctcacgacagcatcatcgagcacggacattcgcatgagatcctcgatggacctggctcctatcttggacgcgagatgccgatagtggagggaagaaattgggctgagcgagctttcactgttggtatcggaggaccagtggggtccggcaaaaccgccctaatgctacaactctgcaaagccctccgagactcctactccatcgcggcagtaacaaacgatatcttcacacgcgaagacgccgaattcctgacaaagaacctcgccctccccgcccctcgcatccgcgcgatcgagactggtggttgtccacacgcagccgtgcgggaagatatatcagccaacttagcagcgttagaagatctgcacagtgaattcaagacagatatcctcctcatcgagtcaggtggcgataacttagctgcgaactactcccgcgagctcgcggatttcatcatatatgtcattgatgtttcgggcggcgacaaagtgccgcgaaaaggaggtccagggataacgcaaagtgatttgttggttgtgaataaaacggatctcgcagaagcagttggcgcggatctgggcgttatggaaagggacgcgagaaagatgagagagggcggtccgacggtctttgcgcaggttaagaagggtgttgctgtggatcatattgtgaatttgattacgagtgcatggaccgcaagtggtgctgaggaggttgtgaagaagcatggaggtccgaggacgacggagggtttggacactttggggaagtag

SEQ ID NO: 13740 - protein, 269 aa, Muscodor strobelii
  misc_feature: SGI Peptide ID NO. 564511
  misc_feature (51)..(223): Pfam Id: PF02492 Pfam Desc: CobW/HypB/UreG, nucleotide-binding domain
  misc_feature (1)..(267): NCBI GI: 156055492 Blast Desc: urease accessory protein [Sclerotinia sclerotiorum 1980] gi|154702882|gb|EDO02621.1| urease accessory protein [Sclerotinia sclerotiorum 1980]
  misc_feature (1)..(267): NCBI GI: 154310495 Blast Desc: conserved [Botryotinia fuckeliana B05.10] gi|150851499|gb|EDN26692.1| conserved [Botryotinia fuckeliana B05.10]
  misc_feature (2)..(267): NCBI GI: 58257411 Blast Desc: urease accessory protein-like protein [Magnaporthe grisea]
  misc_feature (2)..(267): NCBI GI: 171688694 Blast Desc: protein product [Podospora anserina] gi|170944309|emb|CAP70419.1| protein product [Podospora anserina]
  misc_feature (1)..(267): NCBI GI: 256729279 Blast Desc: [Nectria haematococca mpVI 77-13-4]
  misc_feature (10)..(267): NCBI GI: 85082664 Blast Desc: urease accessory protein ureG [Neurospora crassa OR74A] gi|7801036|emb|CAB91432.1| Ni-binding urease accessory protein (UreG) [Neurospora crassa] gi|28918042|gb|EAA27724.1|
  misc_feature (2)..(267): NCBI GI: 39973535 Blast Desc: conserved [Magnaporthe grisea 70-15] gi|145017955|gb|EDK02234.1| conserved [Magnaporthe grisea 70-15]
  misc_feature (1)..(267): NCBI GI: 46117120 Blast Desc: FG04402.1 [Gibberella zeae PH-1]
  misc_feature (2)..(265): NCBI GI: 71001880 Blast Desc: urease accessory protein UreG [Aspergillus fumigatus Af293] gi|66853259|gb|EAL93583.1| urease accessory protein UreG, [Aspergillus fumigatus Af293] gi|159129678|gb|EDP54792.1| urease
  misc_feature (2)..(265): NCBI GI: 115384132 Blast Desc: urease accessory protein ureG [Aspergillus terreus NIH2624] gi|114196305|gb|EAU38005.1| urease accessory protein ureG [Aspergillus terreus NIH2624]
  misc_feature: Useful for introducing or modulating the production of volatile compounds
MSHSHDGASHSHSHDSIIEHGHSHEILDGPGSYLGREMPIVEGRNWAERAFTVGIGGPVGSGKTALMLQLCKALRDSYSIAAVTNDIFTREDAEFLTKNLALPAPRIRAIETGGCPHAAVREDISANLAALEDLHSEFKTDILLIESGGDNLAANYSRELADFIIYVIDVSGGDKVPRKGGPGITQSDLLVVNKTDLAEAVGADLGVMERDARKMREGGPTVFAQVKKGVAVDHIVNLITSAWTASGAEEVVKKHGGPRTTEGLDTLGK

SEQ ID NO: 13741 - DNA, 1272 bp, Muscodor strobelii
  misc_feature: SGI EST ID NO. CUFF.32842.0
  misc_feature: Variant of the nucleotide sequence at SEQ ID NO 13739
cgcagatctatcttcaaagctgaccatcaaggtgcgcggggtgtatactgccccgcatcagctccgaatgcccctcagcacacttacagaacgcgaagctccaacgaagttgatctgagtttggaaagttttagtcacaaatacatcacactgacacattgaatctctaacttgaacctttccacagcctgaagcacaaggctgaacatttatatcatagtttcaacctctcaacatgtcgcattcccacgacggcgcaagccactcccactctcacgacagcatcatcgagcacggacattcgcatgagatcctcgatggacctggctcctatcttggacgcgagatgccgatagtggagggaagaaattgggctgagcgagctttcactgttggtatcggaggaccagtggggtccggcaaaaccgccctaatgctacaactctgcaaagccctccgagactcctactccatcgcggcagtaacaaacgatatcttcacacgcgaagacgccgaattcctgacaaagaacctcgccctccccgcccctcgcatccgcgcgatcgagactggtggttgtccacacgcagccgtgcgggaagatatatcagccaacttagcagcgttagaagatctgcacagtgaattcaagacagatatcctcctcatcgagtcaggtggcgataacttagctgcgaactactcccgcgagctcgcggatttcatcatatatgtcattgatgtttcgggcggcgacaaagtgccgcgaaaaggaggtccagggataacgcaaagtgatttgttggttgtgaataaaacggatctcgcagaagcagttggcgcggatctgggcgttatggaaagggacgcgagaaagatgagagagggcggtccgacggtctttgcgcaggttaagaagggtgttgctgtggatcatattgtgaatttgattacgagtgcatggaccgcaagtggtgctgaggaggttgtgaagaagcatggaggtccgaggacgacggagggtttggacactttggggaagtaggatgagtatggcattgagattgcattgaggttgtctggcagcgcgttgtcctcaagtgctacttgaaatcatgtatattagtatatacttgttgatatgtaggttgcctatgtcgcatcgttaccattggcagccactgtagcaactataggctagcttttaacgcgcgactaagtgtaatacacatagaactgaagaattaaagcaatgggtcgtttgttggcgat

SEQ ID NO: 13742 - DNA, 1200 bp, Muscodor strobelii
  misc_feature: SGI cDNA ID NO. 564512
  misc_feature: Encodes the peptide sequence at SEQ ID NO 13743
atgcagcttaccatgagctatgtgaatgagatgacgaatgcggttgcaaagagtgagccgcctcggccagtcaaggtagacatggcgaagaatcaagtcagaaaacaggggagggcacatccgaagtcaacaccacctgatgcagatgagctacggcgaagactatacgtagtaatagccgaacgagaagcgcacaaagatatgagaagccgagaacgggtgaattcgttgcatgcaaaagagggacagattcgaagagaaaatagcgtgaaagaattgcgtgtcgagagtcgggccaatgcgaccacagcgcagatcctatcacacacgaacttgcctccagcccgaactgcatcaacagctagacaccggtccaaaccgtccttgcaagacaaattacgccataaatcatccaagagctttgctgttgccggaagagatgaaaagagtggcactggtgcctgggacgagaagcacggatatgtgcctagtcaagcagctacacagtttgcccgtacaacgacatccgaaaacatgcgtaccgagtcacacattcacagcttgtcacgttcagctcttgattactacttacaaggtagctcaacagcagatcgcgaagcacttgactcaacaactacaccagcgaagcaaagagggttgctcaagttggtgcagcatcgcaaagaacatctacatgagcgaaacaatttccaagacccgaattttcaaggcaatatactagagaagggcctacgacgaacgaaatccgttgggaggagagggtcaggtggtttgaatccagccatcgaagctgcgattctcgaggacgaaccagagttgcctgtgcaccgcgaaaggacaggctcccattcagaagaggagagatatgtcgatcccataacagcgaatgaatacagggtcgactggacgcaaagagatcagatgttgccacacgagaagaaaggctcaaatctactgcgaaagacaagctcgatatggacgctaaagagcaagttgaggcattcgagaacgaatagtagtgagaaagcgcggccaaacgagaacaagttcggcattgtgacgatacgtgagaattacgatgaggcagctgagatagacgatggttctacgcctgtgagtccaaactctgggagtagtttgacggcgaaattgggcctcttcaggaggctgaagatgtag

SEQ ID NO: 13743 - protein, 399 aa, Muscodor strobelii
  misc_feature: SGI Peptide ID NO. 564512
  misc_feature (47)..(238): NCBI GI: 116199407 Blast Desc: CHGG_07859 [Chaetomium globosum CBS 148.51] gi|88179138|gb|EAQ86606.1| CHGG_07859 [Chaetomium globosum CBS 148.51]
  misc_feature (159)..(339): NCBI GI: 145605629 Blast Desc: [Magnaporthe grisea 70-15] gi|145013433|gb|EDJ98074.1| [Magnaporthe grisea 70-15]
MQLTMSYVNEMTNAVAKSEPPRPVKVDMAKNQVRKQGRAHPKSTPPDADELRRRLYVVIAEREAHKDMRSRERVNSLHAKEGQIRRENSVKELRVESRANATTAQILSHTNLPPARTASTARHRSKPSLQDKLRHKSSKSFAVAGRDEKSGTGAWDEKHGYVPSQAATQFARTTTSENMRTESHIHSLSRSALDYYLQGSSTADREALDSTTTPAKQRGLLKLVQHRKEHLHERNNFQDPNFQGNILEKGLRRTKSVGRRGSGGLNPAIEAAILEDEPELPVHRERTGSHSEEERYVDPITANEYRVDWTQRDQMLPHEKKGSNLLRKTSSIWTLKSKLRHSRTNSSEKARPNENKFGIVTIRENYDEAAEIDDGSTPVSPNSGSSLTAKLGLFRRLKM

SEQ ID NO: 13744 - DNA, 3512 bp, Muscodor strobelii
  misc_feature: SGI EST ID NO. CUFF.32862.0
  misc_feature: Variant of the nucleotide sequence at SEQ ID NO 13742
cctacatgtaaacgccgtttccctctttcaactgtgacgtttgcgtcagctttttaataattcatatcttgacttggccccgattgtacgtactcttctacggacggatcggacgacctcgtaatcaaatgtacttcatcgtacgtctttaagttaccgacggtgccatcagttccgaccaccgattttaaactctaatctcacgacttgtaacaaccgtttgttcctacctaaatctgggcttcactcctataagccactcccacactctcactctatttcatatatcttccaaatcactatcgcgccgctcgatcctgacagctaaatatctgcctcgggtgatctccgtcattttttgatccggcttccgcaagctaggcgcatctcttttgaaccagggccttgtggactctgcccgacctagaacaccagacagttgcataaccacctcacatgttttgcctgcctagatggtctactcgaattgataagacccgagaccgcttggctctgttctttgtaaggctcagcgagtaacgagccagccaactacgacgtgacatgggatagctgcatacatgtactccaactgcagctgcatttgcaaactacccggccagtcagtgcacaaggaactcgggcaaattcccacatactacgacgttatccacatccccagctcctacctttgccgccaacggcattgttacttacatagaacccttgtcacttcaacacatacttactttataatcttcaacagcctcaccgctcagggtctgcctgactggttgccctactttgcacttttcacctttgaagccgtacggttctggtcaaaatgcagcttaccatgagctatgtgaatgagatgacgaatgcggttgcaaagagtgagccgcctcggccagtcaaggtagacatggcgaagaatcaagtcagaaaacaggggagggcacatccgaagtcaacaccacctgatgcagatgagctacggcgaagactatacgtagtaatagccgaacgagaagcgcacaaagatatgagaagccgagaacgggtgaattcgttgcatgcaaaagagggacagattcgaagagaaaatagcgtgaaagaattgcgtgtcgagagtcgggccaatgcgaccacagcgcagatcctatcacacacgaacttgcctccagcccgaactgcatcaacagctagacaccggtccaaaccgtccttgcaagacaaattacgccataaatcatccaagagctttgctgttgccggaagagatgaaaagagtggcactggtgcctgggacgagaagcacggatatgtgcctagtcaagcagctacacagtttgcccgtacaacgacatccgaaaacatgcgtaccgagtcacacattcacagcttgtcacgttcagctcttgattactacttacaaggtagctcaacagcagatcgcgaagcacttgactcaacaactacaccagcgaagcaaagagggttgctcaagttggtgcagcatcgcaaagaacatctacatgagcgaaacaatttccaagacccgaattttcaaggcaatatactagagaagggcctacgacgaacgaaatccgttgggaggagagggtcaggtggtttgaatccagccatcgaagctgcgattctcgaggacgaaccagagttgcctgtgcaccgcgaaaggacaggctcccattcagaagaggagagatatgtcgatcccataacagcgaatgaatacagggtcgactggacgcaaagagatcagatgttgccacacgagaagaaaggctcaaatctactgcgaaagacaagctcgatatggacgctaaagagcaagttgaggcattcgagaacgaatagtagtgagaaagcgcggccaaacgagaacaagttcggcattgtgacgatacgtgagaattacgatgaggcagctgagatagacgatggttctacgcctgtgagtccaaactctgggagtagtttgacggcgaaattgggcctcttcaggaggctgaagatgtagcattcaattgagtagcatcgtgtagatcagaattgcattgatagaggaaagcgagcgttttgacttttcacaatgacatctccaatgaatttgcatgttcaatactgttgatattgtgaggctgtgtccctggctacagatgtcctctgggtacccaatccgagggcttgtcatgcagcttccagctgtcaatgaatcggtggctctcccatccgctgagacaggtctgtaccccagccttacgttaattctcatctcatccactgcttatccatcttcccacaactcatggctctccgaccaagtctcctctcatctgtttctcttcgtacaccatcgttcatcaatttgtattcgagcctatcaagcatattatacgcgtcttgttaccatgtggcttattaatacagaaacactgaagctgaagttcttccatagccacctggatgtcccttacgccatcttatcccacacctgggaagacggagaggaggtatccttccaagagtttgctgatctcgccacggctcggctcaagaacggatttcagaagattgaaaagacatacgtcgagcgctgagctatccgaggcgatcaattccatgttcaaattttacgaacattcccaaatctgcttcgctcatcttgcagacgtagatctcagcgcttcgtacacccaggcgaatatggaagcaggcgatctgtttgagacccggcttcgtacatctcgctgggtgactcgcggctggactctccaggaactgattgcgccctggactcttgaattttatgactcgtcctggacctatttgggattgaagagcgactacgttgctcagatagctaccgttactggtatcgccaaggatgtgttatccaagaaatactggcttaacatgtggtcggttgcacagcgcctgtcttgggcttcgaggcgtgaaactactagacttgaagatagggcatattgtctctttggtctcttcgatgtgaacatgccactgctgtatggggagggattcaaatccttcatcaggctccaagaggaaatcgccaaggatacaagcgacctctctctctttgcctggagacacaaagacccatctatcgaggctgcaggagtactggccacgaatctagattacttcgacggtagcggaagcattgaatctagtgtccgtagcaatcggcgatgctatgagcttctgagcaccagtatgggtctctgtatgaatgggtacttgtgtttcccccctgacctacgcgccgacgtgaatgggttcgatccagattgtgtttggaatctcgaattgaaaggcaataaaagtcctgagcccgaacatgcagctgggaaaaattggcgaatcggcctgtatttggccaaaacgccaaggggatacgtccgagtaaagccccaggcattttacctagcaagtaacaacgatgactctcccctcacgtatatcca

SEQ ID NO: 13745 - DNA, 1704 bp, Muscodor strobelii
  misc_feature: SGI cDNA ID NO. 564513
  misc_feature: Encodes the peptide sequence at SEQ ID NO 13746
atgtggcttattaatacagaaacactgaagctgaagttcttccatagccacctggatgtcccttacgccatcttatcccacacctgggaagacggagaggaggtatccttccaagagtttgctgatctcgccacggctcggctcaagaacggatttcagaagattgaaaagacatgtgagctagctcgctctcgcgatctatcttgggcatgggttgacacatgctgcattgataagacgtcgagcgctgagctatccgaggcgatcaattccatgttcaaattttacgaacattcccaaatctgcttcgctcatcttgcagacgtagatctcagcgcttcgtacacccaggcgaatatggaagcaggcgatctgtttgagacccggcttcgtacatctcgctgggtgactcgcggctggactctccaggaactgattgcgccctggactcttgaattttatgactcgtcctggacctatttgggattgaagagcgactacgttgctcagatagctaccgttactggtatcgccaaggatgtgttatccaagaaatactggcttaacatgtggtcggttgcacagcgcctgtcttgggcttcgaggcgtgaaactactagacttgaagatagggcatattgtctctttggtctcttcgatgtgaacatgccactgctgtatggggagggattcaaatccttcatcaggctccaagaggaaatcgccaaggatacaagcgacctctctctctttgcctggagacacaaagacccatctatcgaggctgcaggagtactggccacgaatctagattacttcgacggtagcggaagcattgaatctagtgtccgtagcaatcggcgatgctatgagcttctgagcaccagtatgggtctctgtatgaatgggtacttgtgtttcccccctgacctacgcgccgacgtgaatgggttcgatccagattgtgtttggaatctcgaattgaaaggcaataaaagtcctgagcccgaacatgcagctgggaaaaattggcgaatcggcctgtatttggccaaaacgccaaggggatacgtccgagtaaagccccaggcattttacctagcaagtaacaacgatgactctcccctcacgtatatccatcaacgggaaaaactactcttgcgcaagactatctctgaaaatcttgaaaaagacaacttcagattagttcggagcaggttccgtggggctgttgaagttaggtcaatgctacctgatctcatccgaacatccccctcgactctctggatcgacaggttatggagattcttagatcctagtagtaaggttgatggagtcaatgctttcatgcattttgatctcaagagcatcctaggtgttggctctactcaggggaactcgtactcgattatagtcgtacttacaaccacccatagacacgcctgtggcatctggaagccggacgacaccgagtggcaggcaattgaagcgttcatagaccacgaaaaagatgccatacattctgactttgcgctctctacatatacccgccagcttcttcgtgagaagtcgaacacggcccgaatcgttattaagacgcctcgagggcgcattgaagtatgggcggagatttcatccattatggcggagcgtcacgagccgaggttcttgttaacgataaagcaccgaaggctgaagaagtga

SEQ ID NO: 13746 - protein, 567 aa, Muscodor strobelii
  misc_feature: SGI Peptide ID NO. 564513
  misc_feature (22)..(144): Pfam Id: PF06985 Pfam Desc: Heterokaryon incompatibility protein (HET)
  misc_feature (1)..(397): NCBI GI: 46126619 Blast Desc: FG07687.1 [Gibberella zeae PH-1]
  misc_feature (1)..(392): NCBI GI: 256720984 Blast Desc: NECHADRAFT_82249 [Nectria haematococca mpVI 77-13-4]
  misc_feature (1)..(257): NCBI GI: 145605569 Blast Desc: MGG_09177 [Magnaporthe grisea 70-15] gi|145013388|gb|EDJ98029.1| MGG_09177 [Magnaporthe grisea 70-15]
  misc_feature (1)..(256): NCBI GI: 256722404 Blast Desc: NECHADRAFT_44368 [Nectria haematococca mpVI 77-13-4]
  misc_feature (1)..(253): NCBI GI: 256720642 Blast Desc: NECHADRAFT_28132 [Nectria haematococca mpVI 77-13-4]
  misc_feature (1)..(254): NCBI GI: 256726184 Blast Desc: NECHADRAFT_94537 [Nectria haematococca mpVI 77-13-4]
  misc_feature (1)..(279): NCBI GI: 256722053 Blast Desc: NECHADRAFT_16940 [Nectria haematococca mpVI 77-13-4]
  misc_feature (1)..(273): NCBI GI: 171689682 Blast Desc: protein product [Podospora anserina] gi|170944803|emb|CAP70915.1| protein product [Podospora anserina]
  misc_feature (21)..(286): NCBI GI: 145235123 Blast Desc: An03g03270 [Aspergillus niger] gi|134057890|emb|CAK38231.1| protein product [Aspergillus niger]
  misc_feature (1)..(253): NCBI GI: 256720831 Blast Desc: NECHADRAFT_28122 [Nectria haematococca mpVI 77-13-4]
MWLINTETLKLKFFHSHLDVPYAILSHTWEDGEEVSFQEFADLATARLKNGFQKIEKTCELARSRDLSWAWVDTCCIDKTSSAELSEAINSMFKFYEHSQICFAHLADVDLSASYTQANMEAGDLFETRLRTSRWVTRGWTLQELIAPWTLEFYDSSWTYLGLKSDYVAQIATVTGIAKDVLSKKYWLNMWSVAQRLSWASRRETTRLEDRAYCLFGLFDVNMPLLYGEGFKSFIRLQEEIAKDTSDLSLFAWRHKDPSIEAAGVLATNLDYFDGSGSIESSVRSNRRCYELLSTSMGLCMNGYLCFPPDLRADVNGFDPDCVWNLELKGNKSPEPEHAAGKNWRIGLYLAKTPRGYVRVKPQAFYLASNNDDSPLTYIHQREKLLLRKTISENLEKDNFRLVRSRFRGAVEVRSMLPDLIRTSPSTLWIDRLWRFLDPSSKVDGVNAFMHFDLKSILGVGSTQGNSYSIIVVLTTTHRHACGIWKPDDTEWQAIEAFIDHEKDAIHSDFALSTYTRQLLREKSNTARIVIKTPRGRIEVWAEISSIMAERHEPRFLLTIKHRRLKK

SEQ ID NO: 13747 - DNA, 3512 bp, Muscodor strobelii; identical to SEQ ID NO: 13744
  misc_feature: SGI EST ID NO. CUFF.32862.0
  misc_feature: Variant of the nucleotide sequence at SEQ ID NO 13745

SEQ ID NO: 13748 - DNA, 1686 bp, Muscodor strobelii
  misc_feature: SGI cDNA ID NO. 564514
  misc_feature: Encodes the peptide sequence at SEQ ID NO 13749
atgtcatgcacctaccgcgacctaataaaagccatcccacccaaatacaatctttcgaacatcgctaacacaccagccagcccaccatgtaccttctgcgccaagctggtgcccgatcgtcgcggagctaagaacaatgtcatccggactgaatatgaagtcatagacacatttccagattttccggtactagatgacttaagcagaataggatgctcgctttgcggcttgattcgggatacgatccggagctcatggggtgtttcgctccggccgatggaagaggagggcatcgggacgttatcggacaaagacgggatctgggatgaattgcttagtatgaaatgggatcacaaagtcaaaatccatcatgcgcggttcatactccagaaacacgtgtcattcggcactgaagatggtgctgaatcgaccgagtttctgcaatggcttatcttgcggtttggaccggagacactgcctgatgaagcggatgggagaagtcctctgagacctatataccaggagctccagtttcaggtttttgattccgccgatgagatcgaagctggagaagttggcaaaagtggcgttccatcaagagctattccagacaccgaagtactcacagaccgtaacgtaggcctcattaaaacttggatacatgaatgcaatacaagacatccagaatgccgtccttcgtctgccgagtcatggttacccacacgactactccatatctcaggctcgccacaagagaacaacctcaccatcagactcgttgagactcagctgaagcagtcacgagatgtcaagttcttggccttgagccacatgtggggagatacctccaagttcccaccccttcgagccctcagattcaactacgagcgcatgaaacaagaaatacctaactgggatttcccgcaaagcttttgggacgcgataaaaatctgcgtcgtcctgaatgtgcggtatctatggattgactctctttgcataatccaggatagtgatgaggactggaccaaagaggctggaactatgcatctcgtttataaacacgcggaggctactatcgttgcagcagcatcgacatccacgcgcggcggctttctaaagcgcaacacacgcatgacacccgccgcaaagatatcctacactctcacttcaccccaagatcacacttcctctcccccttcttatccacaaacactgacaatctacccgtacaacgaagaaacagaatccctcttcacttaccaatcaacaccttggcacacacggggctggacattccaagagcgtttcctatcctctcgtctgctctacttctgcaccaacacgctctccttcgaatgccgccgtctgcacgccacggaagaaggcgaagcgcgacttctcccctcaacacatagtctctggcctcgcggcgttgatttgcctgaggaggaatggttcagattatggcgggacgcagtccaaaagtatactacgaggaaattgagctttcccaaggataaactgatagccatacaaagcatcgccaacgaaatgcttaacattacagctgctctggcggcctttcggcggcctggcatcacctatccgcgacagtcaagaaccaagttggtcatgggctgccctagaatgcgggataagcttccctacctccgcacccggagatga

SEQ ID NO: 13749 - protein, 561 aa, Muscodor strobelii
  misc_feature: SGI Peptide ID NO. 564514
  misc_feature (272)..(434): Pfam Id: PF06985 Pfam Desc: Heterokaryon incompatibility protein (HET)
  misc_feature (306)..(522): NCBI GI: 256727565 Blast Desc: NECHADRAFT_76523 [Nectria haematococca mpVI 77-13-4]
  misc_feature (210)..(515): NCBI GI: 154302410 Blast Desc: BC1G_09989 [Botryotinia fuckeliana B05.10] gi|150855477|gb|EDN30669.1| BC1G_09989 [Botryotinia fuckeliana B05.10]
  misc_feature (211)..(521): NCBI GI: 189206854 Blast Desc: conserved [Pyrenophora tritici-repentis Pt-1C-BFP] gi|187975854|gb|EDU42480.1| conserved [Pyrenophora tritici-repentis Pt-1C-BFP]
  misc_feature (205)..(518): NCBI GI: 261354960 Blast Desc: conserved [Verticillium albo-atrum VaMs.102]
  misc_feature (219)..(516): NCBI GI: 256724492 Blast Desc: NECHADRAFT_88127 [Nectria haematococca mpVI 77-13-4]
  misc_feature (163)..(515): NCBI GI: 256723734 Blast Desc: NECHADRAFT_86704 [Nectria haematococca mpVI 77-13-4]
  misc_feature (215)..(524): NCBI GI: 256720306 Blast Desc: NECHADRAFT_89173 [Nectria haematococca mpVI 77-13-4]
  misc_feature (208)..(516): NCBI GI: 256732396 Blast Desc: NECHADRAFT_80919 [Nectria haematococca mpVI 77-13-4]
  misc_feature (162)..(516): NCBI GI: 40882307 Blast Desc: related to tol protein [Neurospora crassa]
  misc_feature (216)..(515): NCBI GI: 256722671 Blast Desc: NECHADRAFT_87199 [Nectria haematococca mpVI 77-13-4]
MSCTYRDLIKAIPPKYNLSNIANTPASPPCTFCAKLVPDRRGAKNNVIRTEYEVIDTFPDFPVLDDLSRIGCSLCGLIRDTIRSSWGVSLRPMEEEGIGTLSDKDGIWDELLSMKWDHKVKIHHARFILQKHVSFGTEDGAESTEFLQWLILRFGPETLPDEADGRSPLRPIYQELQFQVFDSADEIEAGEVGKSGVPSRAIPDTEVLTDRNVGLIKTWIHECNTRHPECRPSSAESWLPTRLLHISGSPQENNLTIRLVETQLKQSRDVKFLALSHMWGDTSKFPPLRALRFNYERMKQEIPNWDFPQSFWDAIKICVVLNVRYLWIDSLCIIQDSDEDWTKEAGTMHLVYKHAEATIVAAASTSTRGGFLKRNTRMTPAAKISYTLTSPQDHTSSPPSYPQTLTIYPYNEETESLFTYQSTPWHTRGWTFQERFLSSRLLYFCTNTLSFECRRLHATEEGEARLLPSTHSLWPRGVDLPEEEWFRLWRDAVQKYTTRKLSFPKDKLIAIQSIANEMLNITAALAAFRRPGITYPRQSRTKLVMGCPRMRDKLPYLRTRR

SEQ ID NO: 13750 - DNA, 3571 bp, Muscodor strobelii
  misc_feature: SGI EST ID NO. CUFF.32911.0
  misc_feature: Variant of the nucleotide sequence at SEQ ID NO 13748
cgaagctggagaagttggcaaaagtggcgttccatcaagagctattccagacaccgaagtactcacagaccgtaacgtaggcctcattaaaacttggatacatgaatgcaatacaagacatccagaatgccgtccttcgtctgccgagtcatggttacccacacgactactccatatctcaggctcgccacaagagaacaacctcaccatcagactcgttgagactcagctgaagcagtcacgagatgtcaagttcttggccttgagccacatgtggggagatacctccaagttcccaccccttcgagccctcagattcaactacgagcgcatgaaacaagaaatacctaactgggatttcccgcaaagcttttgggacgcgataaaaatctgcgtcgtcctgaatgtgcggtatctatggattgactctctttgcataatccaggatagtgatgaggactggaccaaagaggctggaactatgcatctcgtttataaacacgcggaggctactatcgttgcagcagcatcgacatccacgcgcggcggctttctaaagcgcaacacacgcatgacacccgccgcaaagatatcctacactctcacttcaccccaagatcacacttcctctcccccttcttatccacaaacactgacaatctacccgtacaacgaagaaacagaatccctcttcacttaccaatcaacaccttggcacacacggggctggacattccaagagcgtttcctatcctctcgtctgctctacttctgcaccaacacgctctccttcgaatgccgccgtctgcacgccacggaagaaggcgaagcgcgacttctcccctcaacacatagtctctggcctcgcggcgttgatttgcctgaggaggaatggttcagattatggcgggacgcagtccaaaagtatactacgaggaaattgagctttcccaaggataaactgatagccatacaaagcatcgccaacgaaatgcttaacattagtgggaagcacttgggcaactatataagctgggcaggaacatgggagaatgacatcaaaaagcagctgctctggcggcctttcggcggcctggcatcacctatccgcgacagtcaagaaccaagttggtcatgggctgccctagaatgcgggataagcttccctacctccgcacccggagatgagcgatggtatggagaagaaatgaaatcctgccgacacgtatatagagggccaggaacttatccttacctaagtatccaagcacatatgcgttggatagacgacatcgttgagatcccgcgggacagtctgtgggatgatgcggaatttggcactttcccacttacactacatgaaatccctggaccttttaatgataatcggatggaggaagagcggaaagaaggtaggaaggctttcgcgagaggaagactagatattgagactgcagagcgtattaatgatgtgataatctcgacggggccgcgggggcaccgtttcatttatcttcatgttagtaataattgcgaacctacgggtttggtgcttaggcggaggagaggggttgagatgtctacacaatttttcccagaacgtaaggaacctgataggaagttgattggtagctgggagagagttggtactgcgacggtttttaaggatcttgggaagactaggattgttgatgagccgtttaagaaggcgggtgagggtatgcggattgtttttttggtttaagcagaatgtagaacggtgggtaagtggtggtttcgttgatgacagacgatcctgaaggaggtctgagatttggtaaagacatcaaagtctcctcatgcgctttgttgccttgcgtgctcatttgttacactagtgataaatccccaaagcgagtctccgtccgcgggtatatgttcgtaaatccaaatcgaagccaacttccgagctctctgctcgagagtgacgcagggccacagaacaaccatgcatgggatattcggttcagtgtcagagcgcatttagcttgttcggtgatgatgcacaaacttttcgctggctcggttgtttgatctcatatttccacctcgtttcacgctcatcttcacagctatctgaaccagaagaaatggatatgtagcacgatcatgtcatgttattttgtttcagatatctacaccatcttttccctctttaccaactttgtacccatgtgctcgggtatcgaacataccaagcgatgcagaattttctcatcgcaaacatccgaactcttcagagctagtactcaatgcactcaactccgtcaaagttggtacaagatgacatcctgatataggaattgtcatcgacacggcgatctcgatggtcccctgttcgtgaattttcatattatcagcagaggcgtggatgcctccatagaggattagtggtagtaggtccaaatcgtctcatcctcttgagccctcgtcatgtataagtccaacagtgcacacacgtgagacagcagccatggggacattccacgcgtctttaacactcctgtgctcaagtcagtattgacctcggatcaagcaatcatgaatgcaaaaatatgactcacaaacgcccaaagaccaaaatctcacattttcccctcatcacatcaccaatccaggcgtcgatcgcgagcacgagccgcaacccgaaatcaactcttctcctcactaattaacttccgcagcaccctaacatcatcctcggcggccttcttctccctctcccgtttttcctcctcattcttcaggatcctctgtttatacagtcccaccagcaggctaaactccctgacagcatctctaacatcgccaggactcgccttataccgctggacaaggcccaccgccttattcatgccgacttctttggtccagacgccgttcttactgggctgctgctggccgggcttaggaggatcggtggctctggctatgtcccagagtgtcttttctaaggtgggatattgctggatgagacgggcgtactctggtgtgtcgactatgtcgctcatgcgcatgctttgctccggttccgatgtggtcaggtcaatggttgtgggttgaggactggcgggaggaagtatgggtgtgggtttctcctcaacggcgggatggttgtcccgatgctcacgagaacatgctacggagcagctgatttacttgtcaatacaactgctagaatagacggtaggcgaaccatgagatgagaattggtatgagactcacgtataggactcgcaccgaggacatttgtacttcccctcgaccgccttgcaaataaggcaagggggtcgagtagccggcatattgggtgatctggcctcagtaacagaaaaacttgctgttgatcactccgtaatagactggcagtatcgtgatatatgaaccgccaagacagccttgatggaggaccaacagaggggtcggattgtgcgtgtagacagacgcaaggtagtgagaactcaaaagggcgtggtgagcgtcgttgttgagtcgatgttgatctcagatccaactttaggacttggtaaat

SEQ ID NO: 13751 - DNA, 579 bp, Muscodor strobelii
  misc_feature: SGI cDNA ID NO. 564515
  misc_feature: Encodes the peptide sequence at SEQ ID NO 13752
atgccggctactcgacccccttgccttatttgcaaggcggtcgaggggaagtacaaatgtcctcggtgcgagtcctatacctgctccgtagcatgttctcgtgagcatcgggacaaccatcccgccgttgaggagaaacccacacccatacttcctcccgccagtcctcaacccacaaccattgacctgaccacatcggaaccggagcaaagcatgcgcatgagcgacatagtcgacacaccagagtacgcccgtctcatccagcaatatcccaccttagaaaagacactctgggacatagccagagccaccgatcctcctaagcccggccagcagcagcccagtaagaacggcgtctggaccaaagaagtcggcatgaataaggcggtgggccttgtccagcggtataaggcgagtcctggcgatgttagagatgctgtcagggagtttagcctgctggtgggactgtataaacagaggatcctgaagaatgaggaggaaaaacgggagagggagaagaaggccgccgaggatgatgttagggtgctgcggaagttaattagtgaggagaagagttga

SEQ ID NO: 13752 - protein, 192 aa, Muscodor strobelii
  misc_feature: SGI Peptide ID NO. 564515
  misc_feature (4)..(34): Pfam Id: PF04438 Pfam Desc: HIT zinc finger
  misc_feature (8)..(191): NCBI GI: 46107540 Blast Desc: FG00653.1 [Gibberella zeae PH-1]
  misc_feature (5)..(190): NCBI GI: 145605627 Blast Desc: MGG_06992 [Magnaporthe grisea 70-15] gi|145013432|gb|EDJ98073.1| MGG_06992 [Magnaporthe grisea 70-15]
  misc_feature (8)..(150): NCBI GI: 85083850 Blast Desc: NCU01780 [Neurospora crassa OR74A] gi|18376132|emb|CAD21197.1| [Neurospora crassa] gi|28918290|gb|EAA27967.1| [Neurospora crassa OR74A]
  misc_feature (1)..(137): NCBI GI: 238486386 Blast Desc: HIT finger domain protein, [Aspergillus flavus NRRL3357] gi|220699310|gb|EED55649.1| HIT finger domain protein, [Aspergillus flavus NRRL3357]
  misc_feature (8)..(154): NCBI GI: 261358614 Blast Desc: conserved [Verticillium albo-atrum VaMs.102]
  misc_feature (8)..(191): NCBI GI: 154291185 Blast Desc: [Botryotinia fuckeliana B05.10] gi|150847080|gb|EDN22273.1| [Botryotinia fuckeliana B05.10]
  misc_feature (8)..(172): NCBI GI: 67516333 Blast Desc: AN0448.2 [Aspergillus nidulans FGSC A4] gi|40747391|gb|EAA66547.1| AN0448.2 [Aspergillus nidulans FGSC A4] gi|259489305|tpe|CBF89465.1| TPA: HIT finger domain protein,
  misc_feature (8)..(139): NCBI GI: 240111091 Blast Desc: HIT zinc finger family protein [Coccidioides posadasii C735 delta SOWgp]
  misc_feature (8)..(139): NCBI GI: 226282491 Blast Desc: conserved [Paracoccidioides brasiliensis Pb01]
  misc_feature (25)..(191): NCBI GI: 256734651 Blast Desc: NECHADRAFT_75134 [Nectria haematococca mpVI 77-13-4]
MPATRPPCLICKAVEGKYKCPRCESYTCSVACSREHRDNHPAVEEKPTPILPPASPQPTTIDLTTSEPEQSMRMSDIVDTPEYARLIQQYPTLEKTLWDIARATDPPKPGQQQPSKNGVWTKEVGMNKAVGLVQRYKASPGDVRDAVREFSLLVGLYKQRILKNEEEKREREKKAAEDDVRVLRKLISEEKS

SEQ ID NO: 13753 - DNA, 3090 bp, Muscodor strobelii
  misc_feature: SGI EST ID NO. CUFF.32912.1
  misc_feature: Variant of the nucleotide sequence at SEQ ID NO 13751
cgggttttgtttgataaggcgtcgtctcatcacatcgcatccaaaggactcgtgacgagacggactttataagtcaattcctaaagttggatctgagatcaacatcgactcaacaacgacgctcaccacgcccttttgagttctcactaccttgcgtctgtctacacgcacaatccgacccctctgttggtcctccatcaaggctgtcttggcggttcatatatcacgatactgccagtctattacggagtgatcaacagcaagtttttctgttactgaggccagatcacccaatatgccggctactcgacccccttgccttatttgcaaggcggtcgaggggaagtacaaatgtcctcggtgcgagtcctatacctgctccgtagcatgttctcgtgagcatcgggacaaccatcccgccgttgaggagaaacccacacccatacttcctcccgccagtcctcaacccacaaccattgacctgaccacatcggaaccggagcaaagcatgcgcatgagcgacatagtcgacacaccagagtacgcccgtctcatccagcaatatcccaccttagaaaagacactctgggacatagccagagccaccgatcctcctaagcccggccagcagcagcccagtaagaacggcgtctggaccaaagaagtcggcatgaataaggcggtgggccttgtccagcggtataaggcgagtcctggcgatgttagagatgctgtcagggagtttagcctgctggtgggactgtataaacagaggatcctgaagaatgaggaggaaaaacgggagagggagaagaaggccgccgaggatgatgttagggtgctgcggaagttaattagtgaggagaagagttgatttcgggttgcggctcgtgctcgcgatcgacgcctggattggtgatgtgatgaggggaaaatgtgagattttggtctttgggcgtttgagtgttaaagacgcgtggaatgtccccatggctgctgtctcacgtgtgtgcactgttggacttatacatgacgagggctcaagaggatgagacgatttggacctactaccactaatcctctatggaggcatccacgcctctgctgataatatgaaaattcacgaacaggggaccatcgagatcgccgtgtcgatgacaattcctatatcaggatgtcatcttgtaccaactttgacggagttgagtgcattgagtactagctctgaagagttcggatgtttgcgatgagaaaattctgcatcgcttggtatgttcgatacccgagcacatgggtacaaagttggtaaagagggaaaagatggtgtagatatctgaaacaaaataacatgacatgatcgtgctacatatccatttcttctggttcagatagctgtgaagatgagcgtgaaacgaggtggaaatatgagatcaaacaaccgagccagcgaaaagtttgtgcatcatcaccgaacaagctaaatgcgctctgacactgaaccgaatatcccatgcatggttgttctgtggccctgcgtcactctcgagcagagagctcggaagttggcttcgatttggatttacgaacatatacccgcggacggagactcgctttggggatttatcactagtgtaacaaatgagcacgcaaggcaacaaagcgcatgaggagactttgatgtctttaccaaatctcagacctccttcaggatcgtctgtcatcaacgaaaccaccacttacccaccgttctacattctgcttaaaccaaaaaaacaatccgcataccctcacccgccttcttaaacggctcatcaacaatcctagtcttcccaagatccttaaaaaccgtcgcagtaccaactctctcccagctaccaatcaacttcctatcaggttccttacgttctgggaaaaattgtgtagacatctcaacccctctcctccgcctaagcaccaaacccgtaggttcgcaattattactaacatgaagataaatgaaacggtgcccccgcggccccgtcgagattatcacatcattaatacgctctgcagtctcaatatctagtcttcctctcgcgaaagccttcctaccttctttccgctcttcctccatccgattatcattaaaaggtccagggatttcatgtagtgtaagtgggaaagtgccaaattccgcatcatcccacagactgtcccgcgggatctcaacgatgtcgtctatccaacgcatatgtgcttggatacttaggtaaggataagttcctggccctctatatacgtgtcggcaggatttcatttcttctccataccatcgctcatctccgggtgcggaggtagggaagcttatcccgcattctagggcagcccatgaccaacttggttcttgactgtcgcggataggtgatgccaggccgccgaaaggccgccagagcagctgctttttgatgtcattctcccatgttcctgcccagcttatatagttgcccaagtgcttcccactaatgttaagcatttcgttggcgatgctttgtatggctatcagtttatccttgggaaagctcaatttcctcgtagtatacttttggactgcgtcccgccataatctgaaccattcctcctcaggcaaatcaacgccgcgaggccagagactatgtgttgaggggagaagtcgcgcttcgccttcttccgtggcgtgcagacggcggcattcgaaggagagcgtgttggtgcagaagtagagcagacgagaggataggaaacgctcttggaatgtccagccccgtgtgtgccaaggtgttgattggtaagtgaagagggattctgtttcttcgttgtacgggtagattgtcagtgtttgtggataagaagggggagaggaagtgtgatcttggggtgaagtgagagtgtaggatatctttgcggcgggtgtcatgcgtgtgttgcgctttagaaagccgccgcgcgtggatgtcgatgctgctctgtttcccccatggtatcagcaagatgatggaagctaatcgctgtctgtagtacagctagggatggcatgttgccacgctacatgcatcacgaggagacggagacaat

SEQ ID NO: 13754 - DNA, 951 bp, Muscodor strobelii
  misc_feature: SGI cDNA ID NO. 564516
  misc_feature: Reduced expression when VOC is produced
  misc_feature: Encodes the peptide sequence at SEQ ID NO 13755
atgacaacgagactcctccgtcccgcgacagggctcctctcgcgacagctccgaccagagcgatgtagtcgcctctccaaagccgcaacagcggcagcaacccgaagcacacacagcagctcgcggacattaaacctcacgtcacaagcccgtccaacgcctcacccacaacccttcagctctcccatcgttgcgataccgcgcggcgtgcggagcatattcatccagaccgaaaacacgcccaacccagacgccctcaaattcctcccgaaccaccgggtcatcccgccagagatcaacgtccccttcatcgaatacatgagcgcgcgctccactatctcacccccttacacctcacagctcgccgcccagctcatgaacaccgacggcgtgacctcagtcttctatggcgcagacttcatcaccgtgaccaaggccgccgatgcgaaatgggcacacatccggcccgatatcttcagtctcatcactgaggccataaccgctgggcagcagctcgtgactgtcaaagaagccgctgctggtggggagcaaggacaggaggttgagaaggacagcttagcttatgatgagaatgacgatgaggttgtgggcatgatcaaggagctgcttgagacgcgcatccgccccgctatacaagaggacggcggcgatatcgagttccgcggcttcgaggacgggtttgtgaacttgaaattgaggggcgcttgccggacttgcgatagcagtaccgtcacgcttaagaacggcattgagggcatgttgatgcactatatcgaggaagttaaaggcgtgaaccaggtgctagacgaagaagaagaggtctcggcgagggaattcgccaagttcgaggaaaagcttagagcgcagaaggggcccgatgcggcgccttcgactgtggggaagggcactatagactctgttcctggataa

SEQ ID NO: 13755 - protein, 316 aa, Muscodor strobelii
  misc_feature: SGI Peptide ID NO. 564516
  misc_feature (75)..(169): Pfam Id: PF08712 Pfam Desc: Scaffold protein Nfu/NifU N terminal
  misc_feature (206)..(274): Pfam Id: PF01106 Pfam Desc: NifU-like domain
  misc_feature (3)..(316): NCBI GI: 145605625 Blast Desc: NifU-related protein [Magnaporthe grisea 70-15] gi|145013431|gb|EDJ98072.1| NifU-related protein [Magnaporthe grisea 70-15]
  misc_feature (35)..(316): NCBI GI: 85083846 Blast Desc: HIRA-interacting protein 5 [Neurospora crassa OR74A] gi|18376131|emb|CAD21196.1| conserved [Neurospora crassa] gi|28918289|gb|EAA27966.1| HIRA-interacting protein 5 [Neurospora
  misc_feature (2)..(316): NCBI GI: 154291187 Blast Desc: NifU-like protein [Botryotinia fuckeliana B05.10] gi|150847081|gb|EDN22274.1| NifU-like protein [Botryotinia fuckeliana B05.10]
  misc_feature (2)..(316): NCBI GI: 116199405 Blast Desc: CHGG_07858 [Chaetomium globosum CBS 148.51] gi|88179137|gb|EAQ86605.1| CHGG_07858 [Chaetomium globosum CBS 148.51]
  misc_feature (47)..(316): NCBI GI: 171689560 Blast Desc: protein product [Podospora anserina] gi|170944742|emb|CAP70853.1| protein product [Podospora anserina]
  misc_feature (2)..(306): NCBI GI: 156044806 Blast Desc: SS1G_10507 [Sclerotinia sclerotiorum 1980] gi|154694895|gb|EDN94633.1| SS1G_10507 [Sclerotinia sclerotiorum 1980]
  misc_feature (41)..(302): NCBI GI: 46107542 Blast Desc: FG00654.1 [Gibberella zeae PH-1]
  misc_feature (12)..(315): NCBI GI: 145228927 Blast Desc: An01g03410 [Aspergillus niger] gi|134054866|emb|CAK36880.1| protein product [Aspergillus niger]
  misc_feature (12)..(315): NCBI GI: 121702857 Blast Desc: NifU-related protein [Aspergillus clavatus NRRL 1] gi|119397836|gb|EAW08267.1| NifU-related protein [Aspergillus clavatus NRRL 1]
  misc_feature (2)..(315): NCBI GI: 119496847 Blast Desc: NifU-related protein [Neosartorya fischeri NRRL 181] gi|119413359|gb|EAW23300.1| NifU-related protein [Neosartorya fischeri NRRL 181]
  misc_feature: Useful for introducing or modulating the production of volatile compounds
MTTRLLRPATGLLSRQLRPERCSRLSKAATAAATRSTHSSSRTLNLTSQARPTPHPQPFSSPIVAIPRGVRSIFIQTENTPNPDALKFLPNHRVIPPEINVPFIEYMSARSTISPPYTSQLAAQLMNTDGVTSVFYGADFITVTKAADAKWAHIRPDIFSLITEAITAGQQLVTVKEAAAGGEQGQEVEKDSLAYDENDDEVVGMIKELLETRIRPAIQEDGGDIEFRGFEDGFVNLKLRGACRTCDSSTVTLKNGIEGMLMHYIEEVKGVNQVLDEEEEVSAREFAKFEEKLRAQKGPDAAPSTVGKGTIDSVPG

SEQ ID NO: 13756 - DNA, 1212 bp, Muscodor strobelii
  misc_feature: SGI EST ID NO. CUFF.32881.0
  misc_feature: Variant of the nucleotide sequence at SEQ ID NO 13754
ctatcttatcacgcatctttgaaccaacaattacatttacgacaaccaccaacacctgctttaaccctcaattgctttcactgtagaacaatcaatccatttagagctgatatataaacgtaagcctgatgacaacgagactcctccgtcccgcgacagggctcctctcgcgacagctccgaccagagcgatgtagtcgcctctccaaagccgcaacagcggcagcaacccgaagcacacacagcagctcgcggacattaaacctcacgtcacaagcccgtccaacgcctcacccacaacccttcagctctcccatcgttgcgataccgcgcggcgtgcggagcatattcatccagaccgaaaacacgcccaacccagacgccctcaaattcctcccgaaccaccgggtcatcccgccagagatcaacgtccccttcatcgaatacatgagcgcgcgctccactatctcacccccttacacctcacagctcgccgcccagctcatgaacaccgacggcgtgacctcagtcttctatggcgcagacttcatcaccgtgaccaaggccgccgatgcgaaatgggcacacatccggcccgatatcttcagtctcatcactgaggccataaccgctgggcagcagctcgtgactgtcaaagaagccgctgctggtggggagcaaggacaggaggttgagaaggacagcttagcttatgatgagaatgacgatgaggttgtgggcatgatcaaggagctgcttgagacgcgcatccgccccgctatacaagaggacggcggcgatatcgagttccgcggcttcgaggacgggtttgtgaacttgaaattgaggggcgcttgccggacttgcgatagcagtaccgtcacgcttaagaacggcattgagggcatgttgatgcactatatcgaggaagttaaaggcgtgaaccaggtgctagacgaagaagaagaggtctcggcgagggaattcgccaagttcgaggaaaagcttagagcgcagaaggggcccgatgcggcgccttcgactgtggggaagggcactatagactctgttcctggataacgtacctacatagtcaaaagcaacccatagcgcataattgcgttgtaaaatcacactgtttgaataccttgagcacttctcctgcgcgcagtgcttcagtaatggcaatcaaagcgaaaacggcaaaccccgt

SEQ ID NO: 13757 - DNA, 2637 bp, Muscodor strobelii
  misc_feature: SGI cDNA ID NO. 564517
  misc_feature: Encodes the peptide sequence at SEQ ID NO 13758
atgagcgctagtaacgtcaaggcgaacaccatatcgaaagccggccagagcgccattggtagccttgctccgagcaatcagtccattcttctggacaagctcaacgtccgccgatcaaccccggattccgaggctcttgctagctctgacgacgagactgatcctcatcgccaagacgctcctcaagctgcggttcatcctcaaagacccgttcggcgtgcttcgtggctgaacgacacttcgcagccaacgctccctcatcctaggaaaggatcatttgctagcagcagcatgtcaccaacggcttctcaccccaccaccccgtcgacagaggcgggcgccggggcgtgggcagcacatccaccacccgcacgcacgcatcaagcaccaccctccttcccatggggaaccggcatctggactaatgagcgcaaagagccgccttcacgattgacagaagtcttgccttcgccaacttctacggttccggcggctcagagcttcttcaatagtgagaactccctttcacagcagacgtctccgacgccacgtgaccagggcaccagctcgcagattccatttgccatcccccttcatccgactcccaaaacctaccgctcccagtcttattcggttggccagctggatccggaatcgactggccccgttcccaccacaactgctatgcctggacgcacccgtccgcttggtcatccgggtcttcagcaccgtccctctcggcctagcatgctgagtgaaatgtcgaacgatggtatgctgggtaaagtcaatgaagccgaggacgatgaagaaagcaccagtgactctaccccatcaacccagcaacagcagactgccgatgccaagaccattgagatgctcacccgtgaaaatgcccttctgcgacaacaacagtaccagagtgctcgactgagacctcgtgcttcaacgacatatggaatgggtaatggctacagtgtccacgatccagttcctgaggaatctgactacgcggttgacgaactcgacgagctcaatgatggacagaatcccgcttcgaagcgtgcctttgctcgacgcatgagtgaatatgctgctggcacttacggtggcacttatcccgagaataggaagctcgagaatgtgaaaagagcaatttggcagagttcattgggatttggcggccttggagacatcccgcagagccgacgacactcgttcgccgatgtgcccacccgacaggcttccatcggctcacttggtgaagcagtggccttacatgaagcgacttcgcctgatgtggctcaaggccaggatttcagcggcttctctgaaaccgctggattcaacgcgagcagtccagtatcatattatcctactggtgctcaccaagctatggcgccatctgcctaccctaatccatatcaggctgcatcgtttggaatggctcccggatatgcaaatcggcctccatcgccccaccgaaacatgtatgggatgggacagccaagacacaatcaacttcttcacattgttcttttcaaatgctcccgagccgatgttttctatatccaagagggaactggcttaactgttaagcctggcgacttggtcattgtcgaagcagatcgtggaacggatcttggaactgtggctcgcgacaatgtagactggcagactgccaaggagtcgaaggaacactatgccgaagagcattataaatggctgatgatgtattcgcaaaatgccgcagcagcgcaagatggtacgggcgcgggtctcatggccgcgtccaatggtcttcaaggaagcgccattggtgggatgggtcctcccagtggtcaccacatgcaagagcccagctcaggcgagttgaagcccaagatgatcaaacgtcttgcgcaaagccatgaaattcatggtcttcgtgataaggagggcaacgaggctaaggccaagcgaatgtgcatgcagaaagtcaaagagcatggtctcaacatggagattctagatgctgagttccaaatggattggaaaaaattgaccttctactactttgctgactcgtatatcaacttcaattcccttgttactgatctgttcaagatctacaagacgagaatttggatgtcagcgatcaatccggcttctttcgcaagcccgacactcggcctacaagcaccaagtggcatcggacctggcgctgttgctggaccgggaggaagaggaggcggttcgaacactgatagacgagccaaccaagcccaagagccacagagtgcatttgccaatgctaacccgactcctcgctctttccagccaacattcacttccccattcaatgctgcggatagaccagcggtcgccggatctgcctatcccgcagccactttcccgtattcaggatatggtgcgtatggtggcgctccgagggcatcaggctacataccaggcgtgatgcaaaccatggatgcctatgccggattcccacagaatggcgagtttcccgcaacaatgcgagctcgatttccaagcccgcatgatgctcctgccccccacgagcaaacaccgaccagcctggcggtgtccaacgaatgggccgctgcgttccaggggctctcactcaacactcgctaa

SEQ ID NO: 13758 - protein, 878 aa, Muscodor strobelii
  misc_feature: SGI Peptide ID NO. 564517
  misc_feature (626)..(713): Pfam Id: PF04468 Pfam Desc: PSP1 C-terminal conserved region
  misc_feature (1)..(877): NCBI GI: 18376129 Blast Desc: related to suppressor protein PSP1 [Neurospora crassa]
  misc_feature (1)..(878): NCBI GI: 171689558 Blast Desc: protein product [Podospora anserina] gi|170944741|emb|CAP70852.1| protein product [Podospora anserina]
  misc_feature (1)..(877): NCBI GI: 46107926 Blast Desc: FG00846.1 [Gibberella zeae PH-1]
  misc_feature (1)..(877): NCBI GI: 256735371 Blast Desc: [Nectria haematococca mpVI 77-13-4]
  misc_feature (1)..(878): NCBI GI: 116199401 Blast Desc: CHGG_07856 [Chaetomium globosum CBS 148.51] gi|88179135|gb|EAQ86603.1| CHGG_07856 [Chaetomium globosum CBS 148.51]
  misc_feature (61)..(877): NCBI GI: 164428182 Blast Desc: NCU01777 [Neurospora crassa OR74A] gi|157072045|gb|EAA27964.2| conserved [Neurospora crassa OR74A]
  misc_feature (1)..(878): NCBI GI: 156044812 Blast Desc: SS1G_10510 [Sclerotinia sclerotiorum 1980] gi|154694898|gb|EDN94636.1| SS1G_10510 [Sclerotinia sclerotiorum 1980]
  misc_feature (16)..(878): NCBI GI: 261358612 Blast Desc: PSP1 domain-containing protein [Verticillium albo-atrum VaMs.102]
  misc_feature (25)..(875): NCBI GI: 258565757 Blast Desc: conserved [Uncinocarpus reesii 1704] gi|237907324|gb|EEP81725.1| conserved [Uncinocarpus reesii 1704]
  misc_feature (25)..(875): NCBI GI: 119189825 Blast Desc: CIMG_04960 [Coccidioides immitis RS]
MSASNVKANTISKAGQSAIGSLAPSNQSILLDKLNVRRSTPDSEALASSDDETDPHRQDAPQAAVHPQRPVRRASWLNDTSQPTLPHPRKGSFASSSMSPTASHPTTPSTEAGAGAWAAHPPPARTHQAPPSFPWGTGIWTNERKEPPSRLTEVLPSPTSTVPAAQSFFNSENSLSQQTSPTPRDQGTSSQIPFAIPLHPTPKTYRSQSYSVGQLDPESTGPVPTTTAMPGRTRPLGHPGLQHRPSRPSMLSEMSNDGMLGKVNEAEDDEESTSDSTPSTQQQQTADAKTIEMLTRENALLRQQQYQSARLRPRASTTYGMGNGYSVHDPVPEESDYAVDELDELNDGQNPASKRAFARRMSEYAAGTYGGTYPENRKLENVKRAIWQSSLGFGGLGDIPQSRRHSFADVPTRQASIGSLGEAVALHEATSPDVAQGQDFSGFSETAGFNASSPVSYYPTGAHQAMAPSAYPNPYQAASFGMAPGYANRPPSPHRNMYGMGQPRHNQLLHIVLFKCSRADVFYIQEGTGLTVKPGDLVIVEADRGTDLGTVARDNVDWQTAKESKEHYAEEHYKWLMMYSQNAAAAQDGTGAGLMAASNGLQGSAIGGMGPPSGHHMQEPSSGELKPKMIKRLAQSHEIHGLRDKEGNEAKAKRMCMQKVKEHGLNMEILDAEFQMDWKKLTFYYFADSYINFNSLVTDLFKIYKTRIWMSAINPASFASPTLGLQAPSGIGPGAVAGPGGRGGGSNTDRRANQAQEPQSAFANANPTPRSFQPTFTSPFNAADRPAVAGSAYPAATFPYSGYGAYGGAPRASGYIPGVMQTMDAYAGFPQNGEFPATMRARFPSPHDAPAPHEQTPTSLAVSNEWAAAFQGLSLNTR

SEQ ID NO: 13759 - DNA, 4625 bp, Muscodor strobelii
  misc_feature: SGI EST ID NO. CUFF.33164.1
  misc_feature: Variant of the nucleotide sequence at SEQ ID NO 13757
tggaaatacatggcctaaggagcgtgtactgtatgcatgctgcttgatggtgcgcatcgctgggcacatacatagtaggtagcttgctcggtttgtcgaggtccagtgtcatcgtttacacgcctgttcgtttacgtttacatgaccttgcggcctggctccccatcatctccagtcgccaatcgccagttcacggccaacacttacaaccaccccataacccataacccataacccatcccaacccatcccatccttcccaagcctgtccagtctcaactctgtgtgggttccccgctctcaacatcttttcttgctcttaacccttcctccctccgactccgtcttcgacttcgactttacccttttctccgtccactctctcctctggtcgcatctcccagctgccctcgtcccaacacatctggaccatacccgcgtgctcgcgctgcattgccggtgctgtcacccacgcccccccatcacacccctgacgacgacccgactccctcccctgacgaccatgggccgctgcgagtagtcgcgtcgcggtatttcgaattttgtcaaacgaagagtcaaagcagagaaagagatcagaagagacgtgaagaagaaagtcgtgaaagagacggagagttgcccgacccagaaacacgcacccaaccccgcggcctattcgacggccgttgtactttttttgtttggaattcgccttggccgccaattgtcagactgagaatcgcattcgctgcgctccccggtccgtcctacgtgagacacgtgaagccaaatcacctgcggcctggccctcgcagctgacacgttcctccgcatctgcttcgacttctgtgtcttaggcctcggagaggggtccctgtggtggcgttctcgcagccttgagtcgtccactgaagacattggtccccgacccgaagctctctcagtctctgcagaaagtcgttgctggcgaatttgtttgattttcttttcccgcattccattattcagctcttagaacggatccttcgatacccaatcaatagacatagtaatacttcagaacggctcggcagattcactaaaacccgtgggatactatacaaacgctcaagacgctcaaaatttgactcacagacatactcatctcattagaaaccaacaccaaaatcattgaatcatttttgcgatcccgttttggtgtgatttcctcgattgcaagcaacgctgaagcatagccgtcttgaagtatatgacctgatgtgaggattgaggttcgaatcaagtcgaaggaatcgtgatcatgagcgctagtaacgtcaaggcgaacaccatatcgaaagccggccagagcgccattggtagccttgctccgagcaatcagtccattcttctggacaagctcaacgtccgccgatcaaccccggattccgaggctcttgctagctctgacgacgagactgatcctcatcgccaagacgctcctcaagctgcggttcatcctcaaagacccgttcggcgtgcttcgtggctgaacgacacttcgcagccaacgctccctcatcctaggaaaggatcatttgctagcagcagcatgtcaccaacggcttctcaccccaccaccccgtcgacagaggcgggcgccggggcgtgggcagcacatccaccacccgcacgcacgcatcaagcaccaccctccttcccatggggaaccggcatctggactaatgagcgcaaagagccgccttcacgattgacagaagtcttgccttcgccaacttctacggttccggcggctcagagcttcttcaatagtgagaactccctttcacagcagacgtctccgacgccacgtgaccagggcaccagctcgcagattccatttgccatcccccttcatccgactcccaaaacctaccgctcccagtcttattcggttggccagctggatccggaatcgactggccccgttcccaccacaactgctatgcctggacgcacccgtccgcttggtcatccgggtcttcagcaccgtccctctcggcctagcatgctgagtgaaatgtcgaacgatggtatgctgggtaaagtcaatgaagccgaggacgatgaagaaagcaccagtgactctaccccatcaacccagcaacagcagactgccgatgccaagaccattgagatgctcacccgtgaaaatgcccttctgcgacaacaacagtaccagagtgctcgactgagacctcgtgcttcaacgacatatggaatgggtaatggctacagtgtccacgatccagttcctgaggaatctgactacgcggttgacgaactcgacgagctcaatgatggacagaatcccgcttcgaagcgtgcctttgctcgacgcatgagtgaatatgctgctggcacttacggtggcacttatcccgagaataggaagctcgagaatgtgaaaagagcaatttggcagagttcattgggatttggcggccttggagacatcccgcagagccgacgacactcgttcgccgatgtgcccacccgacaggcttccatcggctcacttggtgaagcagtggccttacatgaagcgacttcgcctgatgtggctcaaggccaggatttcagcggcttctctgaaaccgctggattcaacgcgagcagtccagtatcatattatcctactggtgctcaccaagctatggcgccatctgcctaccctaatccatatcaggctgcatcgtttggaatggctcccggatatgcaaatcggcctccatcgccccaccgaaacatgtatgggatgggacagccaagacacaatcaacttcttcacattgttcttttcaaatgctcccgagccgatgttttctatatccaagagggaactggcttaactgttaagcctggcgacttggtcattgtcgaagcagatcgtggaacggatcttggaactgtggctcgcgacaatgtagactggcagactgccaaggagtcgaaggaacactatgccgaagagcattataaatggctgatgatgtattcgcaaaatgccgcagcagcgcaagatggtacgggcgcgggtctcatggccgcgtccaatggtcttcaaggaagcgccattggtgggatgggtcctcccagtggtcaccacatgcaagagcccagctcaggcgagttgaagcccaagatgatcaaacgtcttgcgcaaagccatgaaattcatggtcttcgtgataaggagggcaacgaggctaaggccaagcgaatgtgcatgcagaaagtcaaagagcatggtctcaacatggagattctagatgctgagttccaaatggattggaaaaaattgaccttctactactttgctgactcgtatatcaacttcaattcccttgttactgatctgttcaagatctacaagacgagaatttggatgtcagcgatcaatccggcttctttcgcaagcccgacactcggcctacaagcaccaagtggcatcggacctggcgctgttgctggaccgggaggaagaggaggcggttcgaacactgatagacgagccaaccaagcccaagagccacagagtgcatttgccaatgctaacccgactcctcgctctttccagccaacattcacttccccattcaatgctgcggatagaccagcggtcgccggatctgcctatcccgcagccactttcccgtattcaggatatggtgcgtatggtggcgctccgagggcatcaggctacataccaggcgtgatgcaaaccatggatgcctatgccggattcccacagaatggcgagtttcccgcaacaatgcgagctcgatttccaagcccgcatgatgctcctgccccccacgagcaaacaccgaccagcctggcggtgtccaacgaatgggccgctgcgttccaggggctctcactcaacactcgctaatccctcgttgactctacgaatcgcattcacttctcgtatcatacttcacgcatatcacatagcaactttgtcactctctcgcaagaagtcagctggcccgcatacgaatgctggctgcccaaagagtggcggtggtcttagggacatataaaattgacaaataagattttggcgttggccggactagggcttatactgtttcaatgatgctggatttcttccgagaacggcggctcgctcccgttccggcacgactcacttgacttacgacgatcgcataagattgggcaataagattaaaagcactggatcaagggagacgactatagacttgagatggcagcacggcatccgtgtactctgatatgaaaaagggagtacatttgttttgttttcttgtgtcggttggttcctacacggtaaaggaacggagttttttcatgtacgaacaagggggggctttcagactggataatgggctgcaatgttgctaggacaagatgcttgtactttcggctggctgctgcttcgaattgtaaggaggaggataatgtttgggtggttccgcaaagatggctggctgtcttccatacaggtaatttccacttgccttagtcagagatcggcttagtttatgagggaaatgatggttaatataggcatttactgctgtttcctgaggtca

SEQ ID NO: 13760 - DNA, 897 bp, Muscodor strobelii
  misc_feature: SGI cDNA ID NO. 564518
  misc_feature: Encodes the peptide sequence at SEQ ID NO 13761
atgcctcgggccgctgccaagagggcgctcgaagatgcagacggtatgcctttgtccatatcctgtgcttttagagattttatactgagcagagactcgccacaagaagacgattcggacggcctcttcgttcctgagaacactcctgccaaggacaaaaagccacagagtaaaaagaaaactaagcaccttgctcgactcgaggagtatgatgaggatcagggccgagctgggagccaaagcttccagaaatgggccaagatcttcgaaaattgcaccgagggcgaggctcagaagtcgagactctatttcaatgatttttgcaaggaagtgaagaaagagagggcagcgttgagagctctggtcacaaagcggagagacgagcctgacgaggaccaagagggagggatgacagcgtttgaagaactctgctccacctcagcagccgctatcacccaaagagaagatcatcctcttttcgcgagaacccagaccgttatgggtaacatccattcactcacatcacatatgaagaaggtggaaaaggagctcaggcgagacgcggatatggacaaccccgcgacggaatgggagcaagacaagcaagaattgaagattctgctagacgatgcgggccagcgggggcagaagctcatcgagggaatgctaaatgcggacgcctgcccttcgccagagagagatgacgataaaaccgaccatactcagcggctggccaagagtctgtatctcgacgctcacaaagttctggggggacagacctggggccacgtcgctgctgagcaggtgcacaagctcactagcatgattgctgcggcggtgcaggaagagaagccggtgcagaagcagaagtatcgcagcggctatgacaccacttga

SEQ ID NO: 13761 - protein, 298 aa, Muscodor strobelii
  misc_feature: SGI Peptide ID NO. 564518
  misc_feature (98)..(276): NCBI GI: 116199399 Blast Desc: CHGG_07855 [Chaetomium globosum CBS 148.51] gi|88179134|gb|EAQ86602.1| CHGG_07855 [Chaetomium globosum CBS 148.51]
MPRAAAKRALEDADGMPLSISCAFRDFILSRDSPQEDDSDGLFVPENTPAKDKKPQSKKKTKHLARLEEYDEDQGRAGSQSFQKWAKIFENCTEGEAQKSRLYFNDFCKEVKKERAALRALVTKRRDEPDEDQEGGMTAFEELCSTSAAAITQREDHPLFARTQTVMGNIHSLTSHMKKVEKELRRDADMDNPATEWEQDKQELKILLDDAGQRGQKLIEGMLNADACPSPERDDDKTDHTQRLAKSLYLDAHKVLGGQTWGHVAAEQVHKLTSMIAAAVQEEKPVQKQKYRSGYDTT

SEQ ID NO: 13762 - DNA, 612 bp, Muscodor strobelii
  misc_feature: SGI cDNA ID NO. 564519
  misc_feature: Reduced expression when VOC is produced
  misc_feature: Encodes the peptide sequence at SEQ ID NO 13763
atgggtgccctcaagtacgtcgaagagcttcagaagaagaagcagtctgatgttctgcaattcctcctccgcgtccgctgctgggaactgcgtcagttgaacgtcatccaccgcgccagccgcccctcgcgccccgacaaggcccgccgcctcggctacaaggccaagcagggctatgtcatctaccgtgtccgcgtccgccgcggaggccgcaagcgacccgtccccaagggtgccacctacggcaagcccaccaaccagggtgtgaaccagctcaagtaccagcgctccctcaaggccaccgccgaggagcgtgtcggccaccgctgcgccaacttgcgcgtcctcaactcgtactggatcaaccaggactcgacctacaagtactacgaggtcatcctcgtcgacccccagcacaaggccatccgccaggacccccgcatcaactggatcgtcaaccccgtccacaagcaccgcgaggcctgtggtctcaccgccaccggcaagaagtcccgcggtctcaacaagggccaccgctacaacaagacccgcgccggccgcagaaagacctggaagagacacaacaccctctctctctggcgctaccgataa

SEQ ID NO: 13763 - protein, 203 aa, Muscodor strobelii
  misc_feature: SGI Peptide ID NO. 564519
  misc_feature (2)..(192): Pfam Id: PF00827 Pfam Desc: Ribosomal L15
  misc_feature (1)..(203): NCBI GI: 85083835 Blast Desc: 60S ribosomal protein L15 [Neurospora crassa OR74A] gi|30316252|sp|Q8X034.1|RL15_NEUCR RecName: Full=60S ribosomal protein L15 gi|18376127|emb|CAD21192.1| ribosomal protein crassa]
  misc_feature (1)..(203): NCBI GI: 225680675 Blast Desc: 60S ribosomal protein L15 [Paracoccidioides brasiliensis Pb03] gi|226282482|gb|EEH38048.1| 60S ribosomal protein L15 [Paracoccidioides brasiliensis Pb01] 60S ribosomal
  misc_feature (1)..(203): NCBI GI: 145605633 Blast Desc: 60S ribosomal protein L15 [Magnaporthe grisea 70-15] gi|145013435|gb|EDJ98076.1| 60S ribosomal protein L15 [Magnaporthe grisea 70-15]
  misc_feature (1)..(203): NCBI GI: 169771091 Blast Desc: [Aspergillus oryzae RIB40] gi|83767874|dbj|BAE58013.1| protein product [Aspergillus oryzae]
  misc_feature (1)..(203): NCBI GI: 171689556 Blast Desc: protein product [Podospora anserina] gi|170944740|emb|CAP70851.1| protein product [Podospora anserina]
  misc_feature (1)..(203): NCBI GI: 145228935 Blast Desc: cytoplasmic ribosomal protein of the large subunit L15 rpl15-Aspergillus niger gi|3122672|sp|O13418.1|RL15_ASPNG RecName: Full=60S ribosomal protein L15 ribosomal protein L15 of
  misc_feature (1)..(203): NCBI GI: 115390875 Blast Desc: 60S ribosomal protein L15 [Aspergillus terreus NIH2624] gi|114193866|gb|EAU35566.1| 60S ribosomal protein L15 [Aspergillus terreus NIH2624]
  misc_feature (1)..(203): NCBI GI: 46107924 Blast Desc: RL15_NEUCR 60S ribosomal protein L15 [Gibberella zeae PH-1]
  misc_feature (1)..(203): NCBI GI: 116199397 Blast Desc: 60S ribosomal protein L15 [Chaetomium globosum CBS 148.51] gi|88179133|gb|EAQ86601.1| 60S ribosomal protein L15 [Chaetomium globosum CBS 148.51]
  misc_feature (1)..(203): NCBI GI: 255940930 Blast Desc: Pc16g09160 [Penicillium chrysogenum Wisconsin 54-1255] gi|211585857|emb|CAP93586.1| Pc16g09160 [Penicillium chrysogenum Wisconsin 54-1255]
  misc_feature: Useful for introducing or modulating the production of volatile compounds
MGALKYVEELQKKKQSDVLQFLLRVRCWELRQLNVIHRASRPSRPDKARRLGYKAKQGYVIYRVRVRRGGRKRPVPKGATYGKPTNQGVNQLKYQRSLKATAEERVGHRCANLRVLNSYWINQDSTYKYYEVILVDPQHKAIRQDPRINWIVNPVHKHREACGLTATGKKSRGLNKGHRYNKTRAGRRKTWKRHNTLSLWRYR

SEQ ID NO: 13764 - DNA, 1092 bp, Muscodor strobelii
  misc_feature: SGI EST ID NO. CUFF.32915.0
  misc_feature: Variant of the nucleotide sequence at SEQ ID NO 13762
cgattgggaaagtttgcgcatccctcattctcacgacttcacacccgaccacgacgacgcccgaccatccattgttgcaggcttctctccataagctgtcaagatgggtgccctcaagtacgtcgaagagcttcagaagaagaagcagtctgatgttctgcaattcctcctccgcgtccgctgctgggaactgcgtcagttgaacgtcatccaccgcgccagccgcccctcgcgccccgacaaggcccgccgcctcggctacaaggccaagcagggctatgtcatctaccgtgtccgcgtccgccgcggaggccgcaagcgacccgtccccaagggtgccacctacggcaagcccaccaaccagggtgtgaaccagctcaagtaccagcgctccctcaaggccaccgccgaggagcgtgtcggccaccgctgcgccaacttgcgcgtcctcaactcgtactggatcaaccaggactcgacctacaagtactacgaggtcatcctcgtcgacccccagcacaaggccatccgccaggacccccgcatcaactggatcgtcaaccccgtccacaagcaccgcgaggcctgtggtctcaccgccaccggcaagaagtcccgcggtctcaacaagggccaccgctacaacaagacccgcgccggccgcagaaagacctggaagagacacaacaccctctctctctggcgctaccgataagcgtccgctgctgctaggtgtggtagccgcagtggccacgacgcttgaggggatggtgatgatggtcacggacttgacaaaaatgatgagaggaaaatggtttcgtgagtttagggatcatggacgggatatctacggtggtgtttccgctgtgtcatgcttcacggttcttttccggtcataagagcaaatagggcaaataatgcgatacgtctgtcctcatatatgatgagttctgcttcttctgcatggagttacgctacgtagtggaaagggaacgaatttctttggtcaccatatgtgttctgtccctcttgatttgccctctagtgttgatatggtgatttgccttgggctgatacttagacatagtggcg

SEQ ID NO: 13765 - DNA, 564 bp, Muscodor strobelii
  misc_feature: SGI cDNA ID NO. 564520
  misc_feature: Encodes the peptide sequence at SEQ ID NO 13766
atggctgatcgacagcctgacttcgcccgcgctgctgatgcgctgcatggtgttgcggatgagctcgctctctgccagaacctcgttggttggcagcaagatcagcaggttcagacacagcagttcgagctagtgatcgcacgactggacaagattgagcagaatctgcaggtaatgattgagcagatggctcagatgaataagcgtcttgagcgtattgaggagctcgttactgagaccaatggccgcgcgcgtctcaaggatgggcctaacgatcgacaagagcaccgaggcaaggagccatttctaagcatcaacgcatctgcccgtgcagcgaataagcttgtacagtaccccagcagccagaaacttacgccgctcgtcaactttgcaacgggcaagtgtctgcatggatttcctcgaacacatgaggaattttttgagatgtgggataaagatcttatcgtcaatatgcttggggaactcggtatcgatgctgttggtacgtgcgacgtcttgtggaagcgtctgggagtggctatcggctatattcacgacggatga

SEQ ID NO: 13766 - protein, 187 aa, Muscodor strobelii
  misc_feature: SGI Peptide ID NO. 564520
MADRQPDFARAADALHGVADELALCQNLVGWQQDQQVQTQQFELVIARLDKIEQNLQVMIEQMAQMNKRLERIEELVTETNGRARLKDGPNDRQEHRGKEPFLSINASARAANKLVQYPSSQKLTPLVNFATGKCLHGFPRTHEEFFEMWDKDLIVNMLGELGIDAVGTCDVLWKRLGVAIGYIHDG

SEQ ID NO: 13767 - DNA, 488 bp, Muscodor strobelii
  misc_feature: SGI EST ID NO. CUFF.32918.0
  misc_feature: Variant of the nucleotide sequence at SEQ ID NO 13765
ctattcgttacggacacttctgaagctagagggaaggcaggagtttagattgaatgttgcccactgcgactgccaggacatgctccaagcgaggtcagttggcgaggcgatagaggtgtaccctactcatcgaatttcaggcagctgtcagggtgcccacagagtcacttcttctacacctccgacacgacttggtatctaaatgtacctcagcccgtggagggaacaaaacaacaccaattcatacaccactcgatcgcggtcgctcgcacggtagtgatcatggctgatcgacagcctgacttcgcccgcgctgctgatgcgctgcatggtgttgcggatgagctcgctctctgccagaacctcgttggttggcagcaagatcagcaggttcagacacagcagttcgagctagtgatcgcacgactggacaagattgagcagaatctgcaggtaatgattgagcagatggctcagatgaataagcg

SEQ ID NO: 13768 - DNA, 660 bp, Muscodor strobelii
  misc_feature: SGI cDNA ID NO. 564521
  misc_feature: Encodes the peptide sequence at SEQ ID NO 13769
atgggtctcagatatggtccttaccccaaggatgacgagtccgaagaagaatgtgctatagatcctcctatccctgctacacaggcgttcgattctcaatttgaattaatatcaaccataaccagtcagaaccaagttcaggaacaacttggtcaagccacaagtgaaaatatcgcatccgcgcacccagaacagcagacaaacttggaaacatcaagcacgaacatggaccaccagatagttctccctcggtttccagtcacaagggaagaagcatatgcatattacttttgggacaggggcgaatacaccagcagcaagttgatattcctacacctttataaatattttccgcccctaaccgcaatcatgatggtagccgaactcttacagctcgttccgggagctagggcatacattgaggcgttattcgcaccgcctgtcgtagaaccccctcagagcgaaatcccgatagctagtcaaatcgaggaggactttgctcaagtgctgcagcatgtgcagcagcgagaaggacggcaggaggaagtacggcgatatccgcaagtaccgagagaccttcaagagagagtacgccgatacaccgagcgagtcagccaaatccaagaggcaaaggatgaagatgacgaggaagatgactag

SEQ ID NO: 13769 - protein, 219 aa, Muscodor strobelii
  misc_feature: SGI Peptide ID NO. 564521
MGLRYGPYPKDDESEEECAIDPPIPATQAFDSQFELISTITSQNQVQEQLGQATSENIASAHPEQQTNLETSSTNMDHQIVLPRFPVTREEAYAYYFWDRGEYTSSKLIFLHLYKYFPPLTAIMMVAELLQLVPGARAYIEALFAPPVVEPPQSEIPIASQIEEDFAQVLQHVQQREGRQEEVRRYPQVPRDLQERVRRYTERVSQIQEAKDEDDEEDD

SEQ ID NO: 13770 - DNA, 3162 bp, Muscodor strobelii
  misc_feature: SGI cDNA ID NO. 564522
  misc_feature: Reduced expression when VOC is produced
  misc_feature: Encodes the peptide sequence at SEQ ID NO 13771
atggacgattaccgatttcgctcgcagcagtctccgcggaacgagaccacgatgaattcttttgtctcaccccagcgaaacggcaggccgatgcctcaagccacctcgcaagacctccgatccactttgcctcgacgattcaccaccgactcggggcgtgtaccaacattgtccaccatatcgagcacttcgctgctccccgagccacaagactatgctcccaccaaccctactcagtataaagtccaactgctagagaagaaaaagagagagtatgagagggttcgagaacagaagcggcgtttcgaggccgaaatgcaaaggctggaccagcagcaacggcaagatgaaatggaactgcaagcgctgcacgaagatctcagcaacctgggtcgaggggctgtgatgggtttgacagggcatcagtcggagccgacgacacctcctgagtaccgggagacaaacaatggcttcccgaccatgttttctcggcccaaccgttattcgatgtccagcctggtctcgcccccgggactcttcactaatatgggcagtcgtgctagtcgctccggctcggttctccagtccccgcagtccaacgttatgccatccaggtttccggacgagcatccaatgccgtaccgctctgtgccgggaagtcgacgaaacagtgacgacgacgagaaggaggaagctcttcgccaggaccctactagccatcgatccaccaatgctctcaacaggtactctttgcctgtgactaagcgaggaaacctttacgacaacatcgatcaaaccaacacgactggcttcctcttcagggacgacgacgcaaccatggagtcgggcaactacgtcagcattgatggaggtgaagatcgcttccctcagctccatgctcagaaaggcaaccctcatgtgttgtctgccacttccgcagctgctgacttggcttctcaactgaacggtggtgaaactgctgtttccaacggctggggcaacatttctcgtcaccgccagcagcaaagcctgtccactatcccttcttcccagatgccctcttctgactcaatttcttctgagtcgaacgccattggatctcgtccctatcgtcactccatcgacatgaacggtcagtacaaggacaccagtggagagactactcccactgcaagcatgtcgcctgccaacaaccaagctctggctactcctcccaagctgcagagttccttctcagccaatgacattcctaccatgaagaacatgtctaccggtggaggtgcccctgccaacgctgccaacgcacatgctcagcagcacttccataaccacaatgctagcatgggtcgcattcctcccggagctgtccccaaacgtcatagccgtgagctttccggcgacagccaccccactgtcacccaagctggcgccttcccttccattcagtcacagttgcatgccagtgcaccctcttttgcactccctactactcaaggccccgctgcacaatctcccatctcgcccacgagcggtggctctgtcgcctctcctggtggttaccagtactacaatggctacaaccccgctggccccaatggcacctacggcaacaatggtaacatgggtgccttaactatgggcatgcagcacatgaacatgaacggtatgaacggcatgaatggcatgaatggcatgaatggcatgagtgctatgaatgctatgaacggcgtcggcatcaatggttacgctatgcccggtaatcagcagtacactggctacgctggccagtatcagccttccattcagcctcgggattcccaacagcgtgtgatcgcccaacgtcgcgctcagaacgacgagactatgaaccgctttgcgaactgcacccttgacgacgttcagggtcagatctacagcctctgcaaggaccaatatggatgtcgattccttcagaagcagctcgagaaccgcaaccctgatgacactcgcaagatttggcttgagactaatcagcacgttgttgagcttatgacggatcccttcggcaattatttgtgccagaagctcttggaatactgcacgaacgatgagcgcacgaccctcattcggaacgctgccacggatatggtccgcatcgccctgaaccagcatggcactcgcgctcttcagaagatgattgaacatgtgtctacacccacccatgtccaaattatcattgacgctcttcgtcaccaggtcgtcgcactcattcaggatttgaacggtaatcatgtcatccagaagtgcctcaacaagctcagctctgccgacgctgagttcatcttcgaggccgttggtcgcgagtgtattggcgttggcactcatcgtcacggatgctgtgttctccaacgatgcattgatcatgctgatggtcagcaaaagatcaatctggtgactgccattacgaagcatgctttgcgtctcgttcaagacccttttggcaactatgtcgttcagtacatcatcgatttgaatgatcccctcttcacggaacctctggtccagcagtttcagggcagaatctgcggtctctcccgtcacaagttcagttccaatgtagttgaaaagtgtcttcgctgtgcttctgagcaatccaaagagatgatgatcaatgagcttcttgctcccggagagactgatcgtcttctgagagactcttatggcaattacgtcattcagacagcgctggatcattcgtctcagcaaatgaagcatcagctgatggagacaattcgacctctcctgcctggcatccgaggaactccttacgggcgacgactcggagctaaggtcgcgcagttcgacagtgctagcagcaaccccaccaccgccaccactaatggacagaagacgcctacagatatcactcagggtcagatcggggccatcaatgacccgcatcgcgctatggcttcgcaatcgatcctcgcccctactgtctacaccaatggactcaatcccactcgagcctcgatgacctatcccagcacggccaacattgccaccacaatgctgaaccagaatcaatccaacccgcctcctcagccaccccgtatgaactcctaccatacctaccctggcaatggcaacagtcataccaacggtgagggcgccttcttctag

SEQ ID NO: 13771 - protein, 1053 aa, Muscodor strobelii
  misc_feature: SGI Peptide ID NO. 564522
  misc_feature (668)..(702): Pfam Id: PF00806 Pfam Desc: Pumilio-family RNA binding repeat
  misc_feature (741)..(775): Pfam Id: PF00806 Pfam Desc: Pumilio-family RNA binding repeat
  misc_feature (632)..(666): Pfam Id: PF00806 Pfam Desc: Pumilio-family RNA binding repeat
  misc_feature (849)..(883): Pfam Id: PF00806 Pfam Desc: Pumilio-family RNA binding repeat
  misc_feature (813)..(847): Pfam Id: PF00806 Pfam Desc: Pumilio-family RNA binding repeat
  misc_feature (777)..(811): Pfam Id: PF00806 Pfam Desc: Pumilio-family RNA binding repeat
  misc_feature (787)..(811): Pfam Id: PF00806 Pfam Desc: Pumilio-family RNA binding repeat
  misc_feature (712)..(739): Pfam Id: PF00806 Pfam Desc: Pumilio-family RNA binding repeat
  misc_feature (895)..(921): Pfam Id: PF00806 Pfam Desc: Pumilio-family RNA binding repeat
  misc_feature (1)..(991): NCBI GI: 261356789 Blast Desc: pumilio domain-containing protein [Verticillium albo-atrum VaMs.102]
  misc_feature (1)..(1053): NCBI GI: 116199395 Blast Desc: CHGG_07853 [Chaetomium globosum CBS 148.51] gi|88179132|gb|EAQ86600.1| CHGG_07853 [Chaetomium globosum CBS 148.51]
  misc_feature (1)..(1001): NCBI GI: 156059478 Blast Desc: SS1G_03751 [Sclerotinia sclerotiorum 1980] gi|154701538|gb|EDO01277.1| SS1G_03751 [Sclerotinia sclerotiorum 1980]
  misc_feature (1)..(998): NCBI GI: 154316386 Blast Desc: BC1G_04124 [Botryotinia fuckeliana B05.10] gi|150845924|gb|EDN21117.1| BC1G_04124 [Botryotinia fuckeliana B05.10]
  misc_feature (242)..(1000): NCBI GI: 256734650 Blast Desc: NECHADRAFT_65753 [Nectria haematococca mpVI 77-13-4]
  misc_feature (242)..(1001): NCBI GI: 46107916 Blast Desc: FG00841.1 [Gibberella zeae PH-1]
  misc_feature (10)..(1053): NCBI GI: 189195174 Blast Desc: mRNA binding protein Pumilio 2 [Pyrenophora tritici-repentis Pt-1C-BFP] gi|187979804|gb|EDU46430.1| mRNA binding protein Pumilio 2 [Pyrenophora tritici-repentis
  misc_feature (344)..(973): NCBI GI: 85083831 Blast Desc: NCU01775 [Neurospora crassa OR74A] gi|18376126|emb|CAD21191.1| conserved [Neurospora crassa] gi|28918285|gb|EAA27962.1| conserved [Neurospora crassa OR74A]
  misc_feature (26)..(965): NCBI GI: 169596899 Blast Desc: SNOG_01219 [Phaeosphaeria nodorum SN15] gi|160707392|gb|EAT90868.2| SNOG_01219 [Phaeosphaeria nodorum SN15]
  misc_feature (1)..(973): NCBI GI: 242808097 Blast Desc: RNA-binding protein, [Talaromyces stipitatus ATCC 10500] gi|218715717|gb|EED15139.1| RNA-binding protein, [Talaromyces stipitatus ATCC 10500]
  misc_feature: Useful for introducing or modulating the production of volatile compounds
MDDYRFRSQQSPRNETTMNSFVSPQRNGRPMPQATSQDLRSTLPRRFTTDSGRVPTLSTISSTSLLPEPQDYAPTNPTQYKVQLLEKKKREYERVREQKRRFEAEMQRLDQQQRQDEMELQALHEDLSNLGRGAVMGLTGHQSEPTTPPEYRETNNGFPTMFSRPNRYSMSSLVSPPGLFTNMGSRASRSGSVLQSPQSNVMPSRFPDEHPMPYRSVPGSRRNSDDDEKEEALRQDPTSHRSTNALNRYSLPVTKRGNLYDNIDQTNTTGFLFRDDDATMESGNYVSIDGGEDRFPQLHAQKGNPHVLSATSAAADLASQLNGGETAVSNGWGNISRHRQQQSLSTIPSSQMPSSDSISSESNAIGSRPYRHSIDMNGQYKDTSGETTPTASMSPANNQALATPPKLQSSFSANDIPTMKNMSTGGGAPANAANAHAQQHFHNHNASMGRIPPGAVPKRHSRELSGDSHPTVTQAGAFPSIQSQLHASAPSFALPTTQGPAAQSPISPTSGGSVASPGGYQYYNGYNPAGPNGTYGNNGNMGALTMGMQHMNMNGMNGMNGMNGMNGMSAMNAMNGVGINGYAMPGNQQYTGYAGQYQPSIQPRDSQQRVIAQRRAQNDETMNRFANCTLDDVQGQIYSLCKDQYGCRFLQKQLENRNPDDTRKIWLETNQHVVELMTDPFGNYLCQKLLEYCTNDERTTLIRNAATDMVRIALNQHGTRALQKMIEHVSTPTHVQIIIDALRHQVVALIQDLNGNHVIQKCLNKLSSADAEFIFEAVGRECIGVGTHRHGCCVLQRCIDHADGQQKINLVTAITKHALRLVQDPFGNYVVQYIIDLNDPLFTEPLVQQFQGRICGLSRHKFSSNVVEKCLRCASEQSKEMMINELLAPGETDRLLRDSYGNYVIQTALDHSSQQMKHQLMETIRPLLPGIRGTPYGRRLGAKVAQFDSASSNPTTATTNGQKTPTDITQGQIGAINDPHRAMASQSILAPTVYTNGLNPTRASMTYPSTANIATTMLNQNQSNPPPQPPRMNSYHTYPGNGNSHTNGEGAFF

SEQ ID NO: 13772 - DNA, 4425 bp, Muscodor strobelii
  misc_feature: SGI EST ID NO. CUFF.32969.0
  misc_feature: Variant of the nucleotide sequence at SEQ ID NO 13770
gtccacttgcagagaccagtcaccagcttcccagcggctttctggcgactgggctccatctggtggtccatttgctggtgcgtctgcagtcgatgaattgaaacattgaccttcttccacctcgcacaactccactcgctttttgttctgccattttgcaacttcctttcccctctgctgccgcccctggctacccagggctgtgtttgcacaggttgtaactttttagctctccgaaatctcttatagatagcgacgactgccaattcggcttgtacgaaagaaccggtgttgtaacaacaggaagcatggacgattaccgatttcgctcgcagcagtctccgcggaacgagaccacgatgaattcttttgtctcaccccagcgaaacggcaggccgatgcctcaagccacctcgcaagacctccgatccactttgcctcgacgattcaccaccgactcggggcgtgtaccaacattgtccaccatatcgagcacttcgctgctccccgagccacaagactatgctcccaccaaccctactcagtataaagtccaactgctagagaagaaaaagagagagtatgagagggttcgagaacagaagcggcgtttcgaggccgaaatgcaaaggctggaccagcagcaacggcaagatgaaatggaactgcaagcgctgcacgaagatctcagcaacctgggtcgaggggctgtgatgggtttgacagggcatcagtcggagccgacgacacctcctgagtaccgggagacaaacaatggcttcccgaccatgttttctcggcccaaccgttattcgatgtccagcctggtctcgcccccgggactcttcactaatatgggcagtcgtgctagtcgctccggctcggttctccagtccccgcagtccaacgttatgccatccaggtttccggacgagcatccaatgccgtaccgctctgtgccgggaagtcgacgaaacagtgacgacgacgagaaggaggaagctcttcgccaggaccctactagccatcgatccaccaatgctctcaacaggtactctttgcctgtgactaagcgaggaaacctttacgacaacatcgatcaaaccaacacgactggcttcctcttcagggacgacgacgcaaccatggagtcgggcaactacgtcagcattgatggaggtgaagatcgcttccctcagctccatgctcagaaaggcaaccctcatgtgttgtctgccacttccgcagctgctgacttggcttctcaactgaacggtggtgaaactgctgtttccaacggctggggcaacatttctcgtcaccgccagcagcaaagcctgtccactatcccttcttcccagatgccctcttctgactcaatttcttctgagtcgaacgccattggatctcgtccctatcgtcactccatcgacatgaacggtcagtacaaggacaccagtggagagactactcccactgcaagcatgtcgcctgccaacaaccaagctctggctactcctcccaagctgcagagttccttctcagccaatgacattcctaccatgaagaacatgtctaccggtggaggtgcccctgccaacgctgccaacgcacatgctcagcagcacttccataaccacaatgctagcatgggtcgcattcctcccggagctgtccccaaacgtcatagccgtgagctttccggcgacagccaccccactgtcacccaagctggcgccttcccttccattcagtcacagttgcatgccagtgcaccctcttttgcactccctactactcaaggccccgctgcacaatctcccatctcgcccacgagcggtggctctgtcgcctctcctggtggttaccagtactacaatggctacaaccccgctggccccaatggcacctacggcaacaatggtaacatgggtgccttaactatgggcatgcagcacatgaacatgaacggtatgaacggcatgaatggcatgaatggcatgaatggcatgagtgctatgaatgctatgaacggcgtcggcatcaatggttacgctatgcccggtaatcagcagtacactggctacgctggccagtatcagccttccattcagcctcgggattcccaacagcgtgtgatcgcccaacgtcgcgctcagaacgacgagactatgaaccgctttgcgaactgcacccttgacgacgttcagggtcagatctacagcctctgcaaggaccaatatggatgtcgattccttcagaagcagctcgagaaccgcaaccctgatgacactcgcaagatttggcttgagactaatcagcacgttgttgagcttatgacggatcccttcggcaattatttgtgccagaagctcttggaatactgcacgaacgatgagcgcacgaccctcattcggaacgctgccacggatatggtccgcatcgccctgaaccagcatggcactcgcgctcttcagaagatgattgaacatgtgtctacacccacccatgtccaaattatcattgacgctcttcgtcaccaggtcgtcgcactcattcaggatttgaacggtaatcatgtcatccagaagtgcctcaacaagctcagctctgccgacgctgagttcatcttcgaggccgttggtcgcgagtgtattggcgttggcactcatcgtcacggatgctgtgttctccaacgatgcattgatcatgctgatggtcagcaaaagatcaatctggtgactgccattacgaagcatgctttgcgtctcgttcaagacccttttggcaactatgtcgttcagtacatcatcgatttgaatgatcccctcttcacggaacctctggtccagcagtttcagggcagaatctgcggtctctcccgtcacaagttcagttccaatgtagttgaaaagtgtcttcgctgtgcttctgagcaatccaaagagatgatgatcaatgagcttcttgctcccggagagactgatcgtcttctgagagactcttatggcaattacgtcattcagacagcgctggatcattcgtctcagcaaatgaagcatcagctgatggagacaattcgacctctcctgcctggcatccgaggaactccttacgggcgacgactcggagctaaggtcgcgcagttcgacagtgctagcagcaaccccaccaccgccaccactaatggacagaagacgcctacagatatcactcagggtcagatcggggccatcaatgacccgcatcgcgctatggcttcgcaatcgatcctcgcccctactgtctacaccaatggactcaatcccactcgagcctcgatgacctatcccagcacggccaacattgccaccacaatgctgaaccagaatcaatccaacccgcctcctcagccaccccgtatgaactcctaccatacctaccctggcaatggcaacagtcataccaacggtgagggcgccttcttctagacgagctgggatgaggcacaatcggtgttgtagagttacgatacacgatctcgacgacaaatttcggcggcattttatccttctaggtttttatgtcctttcgatagcatgaatagatgctctctacgacgttgacgactttttacgacgactcagtacttggacatttgattccttgacactagttggtctacactatagagcctcctgattggcggacacatctggaaaaggccgccttgtacattagccgctctatagtggtcagcaccttttacaccttgagtccccgtcttgctgaatcgttgggtacttggttttgaccatttacgacatcagcaccaatcttatacggtgatctcaggctacttcgtgtacttggatcactcctcggtctcgatttagacttgccttcttttccttatcttccttattcggacttttcgcgacattgcagacattatcacggtatctcgcgcaggctcggcccacacgcgggaccttttccttgcgtgtaacaaaagtgtctacatctaatgtaggctcctcatgggctttcttcgcatcccgctggcagtcatgatatcggtgcacctggggaaggatgaggaggaagtgcagtctggaacgataacaagtgctgtgcttgttttctgttcataggcacgaaaaacacttctactcgacggaacggctttgctatttgcgatggtttctcctgtgttttcctatttctcttctgatggctggtagatgaatctgaccctgatctcacaaaacgaagtgagatggaggatgtctaccgatgcgatgccacactacgctctgtacttttgcagataccttaccgtagctagcttaatagacttcggtcttcaatattctgtttcgcttttggttcatacctgtgatttgtatggtaggcagtgcgcagggaacattatattactctgtg

SEQ ID NO: 13773 - DNA, 3165 bp, Muscodor strobelii
  misc_feature: SGI cDNA ID NO. 564523
  misc_feature: Encodes the peptide sequence at SEQ ID NO 13774
atggacgattaccgatttcgctcgcagcagtctccgcggaacgagaccacgatgaattcttttgtctcaccccagcgaaacggcaggccgatgcctcaagccacctcgcaagacctccgatccactttgcctcgacgattcaccaccgactcggggcgtgtaccaacattgtccaccatatcgagcacttcgctgctccccgagccacaagactatgctcccaccaaccctactcagtataaagtccaactgcagctagagaagaaaaagagagagtatgagagggttcgagaacagaagcggcgtttcgaggccgaaatgcaaaggctggaccagcagcaacggcaagatgaaatggaactgcaagcgctgcacgaagatctcagcaacctgggtcgaggggctgtgatgggtttgacagggcatcagtcggagccgacgacacctcctgagtaccgggagacaaacaatggcttcccgaccatgttttctcggcccaaccgttattcgatgtccagcctggtctcgcccccgggactcttcactaatatgggcagtcgtgctagtcgctccggctcggttctccagtccccgcagtccaacgttatgccatccaggtttccggacgagcatccaatgccgtaccgctctgtgccgggaagtcgacgaaacagtgacgacgacgagaaggaggaagctcttcgccaggaccctactagccatcgatccaccaatgctctcaacaggtactctttgcctgtgactaagcgaggaaacctttacgacaacatcgatcaaaccaacacgactggcttcctcttcagggacgacgacgcaaccatggagtcgggcaactacgtcagcattgatggaggtgaagatcgcttccctcagctccatgctcagaaaggcaaccctcatgtgttgtctgccacttccgcagctgctgacttggcttctcaactgaacggtggtgaaactgctgtttccaacggctggggcaacatttctcgtcaccgccagcagcaaagcctgtccactatcccttcttcccagatgccctcttctgactcaatttcttctgagtcgaacgccattggatctcgtccctatcgtcactccatcgacatgaacggtcagtacaaggacaccagtggagagactactcccactgcaagcatgtcgcctgccaacaaccaagctctggctactcctcccaagctgcagagttccttctcagccaatgacattcctaccatgaagaacatgtctaccggtggaggtgcccctgccaacgctgccaacgcacatgctcagcagcacttccataaccacaatgctagcatgggtcgcattcctcccggagctgtccccaaacgtcatagccgtgagctttccggcgacagccaccccactgtcacccaagctggcgccttcccttccattcagtcacagttgcatgccagtgcaccctcttttgcactccctactactcaaggccccgctgcacaatctcccatctcgcccacgagcggtggctctgtcgcctctcctggtggttaccagtactacaatggctacaaccccgctggccccaatggcacctacggcaacaatggtaacatgggtgccttaactatgggcatgcagcacatgaacatgaacggtatgaacggcatgaatggcatgaatggcatgaatggcatgagtgctatgaatgctatgaacggcgtcggcatcaatggttacgctatgcccggtaatcagcagtacactggctacgctggccagtatcagccttccattcagcctcgggattcccaacagcgtgtgatcgcccaacgtcgcgctcagaacgacgagactatgaaccgctttgcgaactgcacccttgacgacgttcagggtcagatctacagcctctgcaaggaccaatatggatgtcgattccttcagaagcagctcgagaaccgcaaccctgatgacactcgcaagatttggcttgagactaatcagcacgttgttgagcttatgacggatcccttcggcaattatttgtgccagaagctcttggaatactgcacgaacgatgagcgcacgaccctcattcggaacgctgccacggatatggtccgcatcgccctgaaccagcatggcactcgcgctcttcagaagatgattgaacatgtgtctacacccacccatgtccaaattatcattgacgctcttcgtcaccaggtcgtcgcactcattcaggatttgaacggtaatcatgtcatccagaagtgcctcaacaagctcagctctgccgacgctgagttcatcttcgaggccgttggtcgcgagtgtattggcgttggcactcatcgtcacggatgctgtgttctccaacgatgcattgatcatgctgatggtcagcaaaagatcaatctggtgactgccattacgaagcatgctttgcgtctcgttcaagacccttttggcaactatgtcgttcagtacatcatcgatttgaatgatcccctcttcacggaacctctggtccagcagtttcagggcagaatctgcggtctctcccgtcacaagttcagttccaatgtagttgaaaagtgtcttcgctgtgcttctgagcaatccaaagagatgatgatcaatgagcttcttgctcccggagagactgatcgtcttctgagagactcttatggcaattacgtcattcagacagcgctggatcattcgtctcagcaaatgaagcatcagctgatggagacaattcgacctctcctgcctggcatccgaggaactccttacgggcgacgactcggagctaaggtcgcgcagttcgacagtgctagcagcaaccccaccaccgccaccactaatggacagaagacgcctacagatatcactcagggtcagatcggggccatcaatgacccgcatcgcgctatggcttcgcaatcgatcctcgcccctactgtctacaccaatggactcaatcccactcgagcctcgatgacctatcccagcacggccaacattgccaccacaatgctgaaccagaatcaatccaacccgcctcctcagccaccccgtatgaactcctaccatacctaccctggcaatggcaacagtcataccaacggtgagggcgccttcttctag

SEQ ID NO: 13774 - protein, 1054 aa, Muscodor strobelii
  misc_feature: SGI Peptide ID NO. 564523
  misc_feature (669)..(703): Pfam Id: PF00806 Pfam Desc: Pumilio-family RNA binding repeat
  misc_feature (742)..(776): Pfam Id: PF00806 Pfam Desc: Pumilio-family RNA binding repeat
  misc_feature (633)..(667): Pfam Id: PF00806 Pfam Desc: Pumilio-family RNA binding repeat
  misc_feature (850)..(884): Pfam Id: PF00806 Pfam Desc: Pumilio-family RNA binding repeat
  misc_feature (814)..(848): Pfam Id: PF00806 Pfam Desc: Pumilio-family RNA binding repeat
  misc_feature (778)..(812): Pfam Id: PF00806 Pfam Desc: Pumilio-family RNA binding repeat
  misc_feature (788)..(812): Pfam Id: PF00806 Pfam Desc: Pumilio-family RNA binding repeat
  misc_feature (713)..(740): Pfam Id: PF00806 Pfam Desc: Pumilio-family RNA binding repeat
  misc_feature (896)..(922): Pfam Id: PF00806 Pfam Desc: Pumilio-family RNA binding repeat
  misc_feature (1)..(992): NCBI GI: 261356789 Blast Desc: pumilio domain-containing protein [Verticillium albo-atrum VaMs.102]
  misc_feature (1)..(1054): NCBI GI: 116199395 Blast Desc: CHGG_07853 [Chaetomium globosum CBS 148.51] gi|88179132|gb|EAQ86600.1| CHGG_07853 [Chaetomium globosum CBS 148.51]
  misc_feature (1)..(1002): NCBI GI: 156059478 Blast Desc: SS1G_03751 [Sclerotinia sclerotiorum 1980] gi|154701538|gb|EDO01277.1| SS1G_03751 [Sclerotinia sclerotiorum 1980]
  misc_feature (1)..(999): NCBI GI: 154316386 Blast Desc: BC1G_04124 [Botryotinia fuckeliana B05.10] gi|150845924|gb|EDN21117.1| BC1G_04124 [Botryotinia fuckeliana B05.10]
  misc_feature (243)..(1001): NCBI GI: 256734650 Blast Desc: NECHADRAFT_65753 [Nectria haematococca mpVI 77-13-4]
  misc_feature (243)..(1002): NCBI GI: 46107916 Blast Desc: FG00841.1 [Gibberella zeae PH-1]
  misc_feature (10)..(1054): NCBI GI: 189195174 Blast Desc: mRNA binding protein Pumilio 2 [Pyrenophora tritici-repentis Pt-1C-BFP] gi|187979804|gb|EDU46430.1| mRNA binding protein Pumilio 2 [Pyrenophora tritici-repentis
  misc_feature (345)..(974): NCBI GI: 85083831 Blast Desc: NCU01775 [Neurospora crassa OR74A] gi|18376126|emb|CAD21191.1| conserved [Neurospora crassa] gi|28918285|gb|EAA27962.1| conserved [Neurospora crassa OR74A]
  misc_feature (26)..(966): NCBI GI: 169596899 Blast Desc: SNOG_01219 [Phaeosphaeria nodorum SN15] gi|160707392|gb|EAT90868.2| SNOG_01219 [Phaeosphaeria nodorum SN15]
  misc_feature (1)..(974): NCBI GI: 242808097 Blast Desc: RNA-binding protein, [Talaromyces stipitatus ATCC 10500] gi|218715717|gb|EED15139.1| RNA-binding protein, [Talaromyces stipitatus ATCC 10500]
MDDYRFRSQQSPRNETTMNSFVSPQRNGRPMPQATSQDLRSTLPRRFTTDSGRVPTLSTISSTSLLPEPQDYAPTNPTQYKVQLQLEKKKREYERVREQKRRFEAEMQRLDQQQRQDEMELQALHEDLSNLGRGAVMGLTGHQSEPTTPPEYRETNNGFPTMFSRPNRYSMSSLVSPPGLFTNMGSRASRSGSVLQSPQSNVMPSRFPDEHPMPYRSVPGSRRNSDDDEKEEALRQDPTSHRSTNALNRYSLPVTKRGNLYDNIDQTNTTGFLFRDDDATMESGNYVSIDGGEDRFPQLHAQKGNPHVLSATSAAADLASQLNGGETAVSNGWGNISRHRQQQSLSTIPSSQMPSSDSISSESNAIGSRPYRHSIDMNGQYKDTSGETTPTASMSPANNQALATPPKLQSSFSANDIPTMKNMSTGGGAPANAANAHAQQHFHNHNASMGRIPPGAVPKRHSRELSGDSHPTVTQAGAFPSIQSQLHASAPSFALPTTQGPAAQSPISPTSGGSVASPGGYQYYNGYNPAGPNGTYGNNGNMGALTMGMQHMNMNGMNGMNGMNGMNGMSAMNAMNGVGINGYAMPGNQQYTGYAGQYQPSIQPRDSQQRVIAQRRAQNDETMNRFANCTLDDVQGQIYSLCKDQYGCRFLQKQLENRNPDDTRKIWLETNQHVVELMTDPFGNYLCQKLLEYCTNDERTTLIRNAATDMVRIALNQHGTRALQKMIEHVSTPTHVQIIIDALRHQVVALIQDLNGNHVIQKCLNKLSSADAEFIFEAVGRECIGVGTHRHGCCVLQRCIDHADGQQKINLVTAITKHALRLVQDPFGNYVVQYIIDLNDPLFTEPLVQQFQGRICGLSRHKFSSNVVEKCLRCASEQSKEMMINELLAPGETDRLLRDSYGNYVIQTALDHSSQQMKHQLMETIRPLLPGIRGTPYGRRLGAKVAQFDSASSNPTTATTNGQKTPTDITQGQIGAINDPHRAMASQSILAPTVYTNGLNPTRASMTYPSTANIATTMLNQNQSNPPPQPPRMNSYHTYPGNGNSHTNGEGAFF

SEQ ID NO: 13775 - DNA, 4425 bp, Muscodor strobelii; identical to SEQ ID NO: 13772
  misc_feature: SGI EST ID NO. CUFF.32969.0
  misc_feature: Variant of the nucleotide sequence at SEQ ID NO 13773

SEQ ID NO: 13776 - DNA, 1290 bp, Muscodor strobelii
  misc_feature: SGI cDNA ID NO. 564524
  misc_feature: Reduced expression when VOC is produced
  misc_feature: Encodes the peptide sequence at SEQ ID NO 13777
atgccgaagctcgatgatgggttcgaagcccttatgcagccgttttataatggcaaaaagctgaccgacacgatttctgcggtcgaggacaagaaccagctcctaccagccttcttgaaagtgaaaggccttgtgaagcagcacatcgattcctacaactactttgtagatcaagaaatcaaagagattgtccgcgccaatcgaatgatcaagagtgatgctgacagcacattctggatggagtttcttgatgtccgcgttgagagcccagagagtgcaacccaaaatgctacttctactaatcccaagatcacaccccaagaatgccgcttgagagacatgacttactccgcgcgcgtcctcgttgatgttgcctacccaaaggagcgcggaaagaaggctattagacgaaatgttgagctcgctcgtatgcctgtgatgttacgaagcaacaaatgccatctctacggtgccaacaacacccaaatggaggtgatgaacgaatgcccgctagaccctggcggatattttattgtacgaggaacggagaaggtcatcctgattcaagaacagctcagcaagaatcgcgtcatcgtcgaggctgatgagaagaacaatgcaatcatggcatctgtcacgagttccacccacgaaagaaaatccaagacctacgttcttctcaaaaaggagcgcatcactcttcaacacaacgtctttaccgaaaatatcccaattgtaatcgttatgaaagcctttggagggcttactgattacgagattatgcagctcatagccggctccgacggaagataccaagatgacttcgagatcaacttctctgaggcagtggttgccgaagttttcacccaacagcaagcacttgaatatattgggtcgagagtcaagatgggaatgaagccaaagcaagcgagaggagggttccaggcacggcgcagcggcgtggaggagggtcttgacgctcttgcaaacatcattattgcccatatccctgtggaaggcacaaacttctttcctaaagccgtatacattgctatgatggcacgtcgagttctcatggctcgccacaatccaaaattggttgacgacagggacttcgtgggaaataagcgattcgagcttgcgggtcagcttctatcgctcctcttcgaggatttgttcaagaacttccttagctctttcaagttcaacatcgagcacactctgaagaaacaaaatcgcgctattgccaccgatccgcttctacagattggtgctcaaggcaacacataa

SEQ ID NO: 13777 - protein, 429 aa, Muscodor strobelii
  misc_feature: SGI Peptide ID NO. 564524
  misc_feature (43)..(427): Pfam Id: PF04563 Pfam Desc: RNA polymerase beta subunit
  misc_feature (193)..(379): Pfam Id: PF04561 Pfam Desc: RNA polymerase Rpb2, domain 2
  misc_feature (43)..(413): Pfam Id: PF04563 Pfam Desc: RNA polymerase beta subunit
  misc_feature (193)..(311): Pfam Id: PF04561 Pfam Desc: RNA polymerase Rpb2, domain 2
  misc_feature (346)..(379): Pfam Id: PF04561 Pfam Desc: RNA polymerase Rpb2, domain 2
  misc_feature (1)..(428): NCBI GI: 46107920 Blast Desc: FG00843.1 [Gibberella zeae PH-1]
  misc_feature (1)..(427): NCBI GI: 116199389 Blast Desc: CHGG_07850 [Chaetomium globosum CBS 148.51] gi|88179129|gb|EAQ86597.1| CHGG_07850 [Chaetomium globosum CBS 148.51]
  misc_feature (1)..(428): NCBI GI: 261356788 Blast Desc: DNA-directed RNA polymerase III subunit RPC2 [Verticillium albo-atrum VaMs.102]
  misc_feature (1)..(425): NCBI GI: 39978199 Blast Desc: MGG_06984 [Magnaporthe grisea 70-15] gi|145013440|gb|EDJ98081.1| MGG_06984 [Magnaporthe grisea 70-15]
  misc_feature (1)..(428): NCBI GI: 85083820 Blast Desc: DNA-directed RNA polymerase III 130 kDa polypeptide [Neurospora crassa OR74A] gi|7800864|emb|CAB91222.1| DNA-directed RNA polymerase III second-largest chain [Neurospora crassa] RNA
  misc_feature (1)..(428): NCBI GI: 171689286 Blast Desc: protein product [Podospora anserina] gi|170944605|emb|CAP70716.1| protein product [Podospora anserina]
  misc_feature (5)..(428): NCBI GI: 154316382 Blast Desc: BC1G_04122 [Botryotinia fuckeliana B05.10] gi|150845922|gb|EDN21115.1| BC1G_04122 [Botryotinia fuckeliana B05.10]
  misc_feature (2)..(428): NCBI GI: 156059482 Blast Desc: SS1G_03753 [Sclerotinia sclerotiorum 1980] gi|154701540|gb|EDO01279.1| SS1G_03753 [Sclerotinia sclerotiorum 1980]
  misc_feature (5)..(428): NCBI GI: 255713708 Blast Desc: KLTH0D09812p [Lachancea thermotolerans] gi|238934516|emb|CAR22698.1| KLTH0D09812p [Lachancea thermotolerans]
  misc_feature (5)..(428): NCBI GI: 156839387 Blast Desc: Kpol_479p15 [Vanderwaltozyma polyspora DSM 70294] gi|156113993|gb|EDO15527.1| Kpol_479p15 [Vanderwaltozyma polyspora DSM 70294]
  misc_feature (5)..(428): SWISSPROT Homolog: EC 2.7.7.6 DNA-directed RNA polymerase
  misc_feature: Useful for introducing or modulating the production of volatile compounds
MPKLDDGFEALMQPFYNGKKLTDTISAVEDKNQLLPAFLKVKGLVKQHIDSYNYFVDQEIKEIVRANRMIKSDADSTFWMEFLDVRVESPESATQNATSTNPKITPQECRLRDMTYSARVLVDVAYPKERGKKAIRRNVELARMPVMLRSNKCHLYGANNTQMEVMNECPLDPGGYFIVRGTEKVILIQEQLSKNRVIVEADEKNNAIMASVTSSTHERKSKTYVLLKKERITLQHNVFTENIPIVIVMKAFGGLTDYEIMQLIAGSDGRYQDDFEINFSEAVVAEVFTQQQALEYIGSRVKMGMKPKQARGGFQARRSGVEEGLDALANIIIAHIPVEGTNFFPKAVYIAMMARRVLMARHNPKLVDDRDFVGNKRFELAGQLLSLLFEDLFKNFLSSFKFNIEHTLKKQNRAIATDPLLQIGAQGNT

SEQ ID NO: 13778 - DNA, 3677 bp, Muscodor strobelii
  misc_feature: SGI EST ID NO. CUFF.33070.1
  misc_feature: Variant of the nucleotide sequence at SEQ ID NO 13776
gtgaagcagcacatcgattcctacaactactttgtagatcaagaaatcaaagagattgtccgcgccaatcgaatgatcaagagtgatgctgacagcacattctggatggagtttcttgatgtccgcgttgagagcccagagagtgcaacccaaaatgctacttctactaatcccaagatcacaccccaagaatgccgcttgagagacatgacttactccgcgcgcgtcctcgttgatgttgcctacccaaaggagcgcggaaagaaggctattagacgaaatgttgagctcgctcgtatgcctgtgatgttacgaagcaacaaatgccatctctacggtgccaacaacacccaaatggaggtgatgaacgaatgcccgctagaccctggcggatattttattgtacgaggaacggagaaggtcatcctgattcaagaacagctcagcaagaatcgcgtcatcgtcgaggctgatgagaagaacaatgcaatcatggcatctgtcacgagttccacccacgaaagaaaatccaagacctacgttcttctcaaaaaggagcgcatcactcttcaacacaacgtctttaccgaaaatatcccaattgtaatcgttatgaaagcctttggagggcttactgattacgagattatgcagctcatagccggctccgacggaagataccaagatgacttcgagatcaacttctctgaggcagtggttgccgaagttttcacccaacagcaagcacttgaatatattgggtcgagagtcaagatgggaatgaagccaaagcaagcgagaggagggttccaggcacggcgcagcggcgtggaggagggtcttgacgctcttgcaaacatcattattgcccatatccctgtggaaggcacaaacttctttcctaaagccgtatacattgctatgatggcacgtcgagttctcatggctcgccacaatccaaaattggttgacgacagggacttcgtgggaaataagcgattcgagcttgcgggtcagcttctatcgctcctcttcgaggatttgttcaagaacttccttagctctttcaagttcaacatcgagcacactctgaagaaacaaaatcgcgctattgccaccgatccgcttctacagattggtgctcaaggcaacacataacagagggatgaatcgagctggcgttacgcacgtgcttagccgactgagctacatttctgccctcggtatgatgactcgcatcagcagtcagtttgagaagacccgtaaagtcagtggtcctcgagctttgcaagcctcacagtggggtgttctttgcccctcagatacgcccgaaggcgaggcatgtggtctcgtcaagaatttagcattgatgacccatattacgaccagctctgatgaggatccggttatatcggccgccttatgtaatgacttctcagcgtcactgttgacgagcaattccggcacagaaatatacaaggacggcatattcgttgtgcacatcaatggcactccttttgccacgacaaaacgccccaagcaattggcggctagccttcgcgcagctagacgacagggttgcatatctccattcgtcagtatcaatgtcaatgagaaccttgccgctgtacatatcgcgaccgatgaaggacggatctgccggccgtatatcatagtgaaaaacgctaaatctacgatcactaagcatcaactgtggcagctgcaagaagggaaggtatcatttgacgatttcatacgcagcggagtcgttgaatatctcgacgtgaacgaagccaatgataccctcattgcattgtacgaaaaagacattaccaaatccaccacccatgttgagattgagcctttcacacttctgggagccgttgcagggctcatcccattcccgcatcataatcaatcgcccagaaatacttaccagtgcgccatgggtaagcaagccatcggggccattgcatacaaccagttcaaccgtatcgataccctcctccttaccatggtatatcctcagcgaccgatggtcataagcaagacgatcgaattgatccactacgataaactgccggcgggacagaatgccactgtcgttgtcatgtcttattcgggatatgatattgaagacgctctagtacttaacaaagcatctctggatcgtgggttcggtcgcgcgcaggttttcaaaaaattttcggccgagctacagagatatcctaacggtactcaagaaagaattggggataacgatccaagtgtcgagaagtaccagtcactatctaaggacggtcttgccgatgttggtgtacaggtaaactcaggacatgttctcatcaagaaagaaagcccttcggacacgacgacttcaactattggagggatggcaccaaggaccaacgatttccgtgaaacaccaatcagtttcaagtctgcagacccagcgtacatcgacaaagttatggtcactcagacagaccgagagaatcagctcattaaggtgcaaaccagacagactcgtcgacccgagattggcgacaaattttcatctcgccatggacagaaaggtgtggttggtatcatcgtggaccaggaagatctgccgttctccgatgagggcattgttcccgatatcatcatgaatccgcacggtttcccctcgcgtatgacggtcggaaagttattagagtgtcttacaggcaaggcagccgtcgtcaagaataagagagagtacgggtatggagatgcattccgctcgcacccactcgaggcaatgagtgccgagttggtcgatgcaggtttctcatgggaaggtaaagattattttacttcaggaattacaggcgaagctctacaggcatacattttcaacggccctatcttttaccagcgcctaaagcacatggtccaggacaagatgcattcgcgttcccgaggaccccgtgctatcctcacgcgccagcctactgagggtcgatcaagagatggtggtctgcgtttgggagaaatggagcgcgactgtcttgtcgcatacggtgcctcccaattgcttcttgagcgcctgatgatcagttcagatgccgttgtcatcgatgtttgccagcgatgcgggctgttcgggaccaagggctactgtaatacttgtcgatcgagtcaggagattgccaagatgacgatgccatacgctgcgaagttgcttgtgcaggagctgatcagcatgaacgtcggtgtgagactgcaactggaggatgagttcccgcacccaagatagggatgtggatgatggtgtaccgcatagtatatgttcttgcattgcgtggcgttctgaacaagggaaaagtgcatgcattttaaggagtgaggataggtagtctttccgcggaaagtcgttacataattgctcctttggagaatacacggttcacccacatttattgcacgagggcttcggtagtcttcagagaagtgagcacattcgatcaaagtgaaattaaagctacggcagacttgttgtattgtttaggcagttctcaaagggtagtgcagctgagtctaaatccatgatggcttccttctcgattttgtatgctgatataatcattgttggaagtcgcatcgtgaagaaacctaactcgatgcttgtaggtaggcgacgcaacaacctcagg

SEQ ID NO: 13779 - DNA, 2055 bp, Muscodor strobelii
  misc_feature: SGI cDNA ID NO. 564525
  misc_feature: Encodes the peptide sequence at SEQ ID NO 13780
atgatgactcgcatcagcagtcagtttgagaagacccgtaaagtcagtggtcctcgagctttgcaagcctcacagtggggtgttctttgcccctcagatacgcccgaaggcgaggcatgtggtctcgtcaagaatttagcattgatgacccatattacgaccagctctgatgaggatccggttatatcggccgccttatgtaatgacttctcagcgtcactgttgacgagcaattccggcacagaaatatacaaggacggcatattcgttgtgcacatcaatggcactccttttgccacgacaaaacgccccaagcaattggcggctagccttcgcgcagctagacgacagggttgcatatctccattcgtcagtatcaatgtcaatgagaaccttgccgctgtacatatcgcgaccgatgaaggacggatctgccggccgtatatcatagtgaaaaacgctaaatctacgatcactaagcatcaactgtggcagctgcaagaagggaaggtatcatttgacgatttcatacgcagcggagtcgttgaatatctcgacgtgaacgaagccaatgataccctcattgcattgtacgaaaaagacattaccaaatccaccacccatgttgagattgagcctttcacacttctgggagccgttgcagggctcatcccattcccgcatcataatcaatcgcccagaaatacttaccagtgcgccatgggtaagcaagccatcggggccattgcatacaaccagttcaaccgtatcgataccctcctccttaccatggtatatcctcagcgaccgatggtcataagcaagacgatcgaattgatccactacgataaactgccggcgggacagaatgccactgtcgttgtcatgtcttattcgggatatgatattgaagacgctctagtacttaacaaagcatctctggatcgtgggttcggtcgcgcgcaggttttcaaaaaattttcggccgagctacagagatatcctaacggtactcaagaaagaattggggataacgatccaagtgtcgagaagtaccagtcactatctaaggacggtcttgccgatgttggtgtacaggtaaactcaggacatgttctcatcaagaaagaaagcccttcggacacgacgacttcaactattggagggatggcaccaaggaccaacgatttccgtgaaacaccaatcagtttcaagtctgcagacccagcgtacatcgacaaagttatggtcactcagacagaccgagagaatcagctcattaaggtgcaaaccagacagactcgtcgacccgagattggcgacaaattttcatctcgccatggacagaaaggtgtggttggtatcatcgtggaccaggaagatctgccgttctccgatgagggcattgttcccgatatcatcatgaatccgcacggtttcccctcgcgtatgacggtcggaaagttattagagtgtcttacaggcaaggcagccgtcgtcaagaataagagagagtacgggtatggagatgcattccgctcgcacccactcgaggcaatgagtgccgagttggtcgatgcaggtttctcatgggaaggtaaagattattttacttcaggaattacaggcgaagctctacaggcatacattttcaacggccctatcttttaccagcgcctaaagcacatggtccaggacaagatgcattcgcgttcccgaggaccccgtgctatcctcacgcgccagcctactgagggtcgatcaagagatggtggtctgcgtttgggagaaatggagcgcgactgtcttgtcgcatacggtgcctcccaattgcttcttgagcgcctgatgatcagttcagatgccgttgtcatcgatgtttgccagcgatgcgggctgttcgggaccaagggctactgtaatacttgtcgatcgagtcaggagattgccaagatgacgatgccatacgctgcgaagttgcttgtgcaggagctgatcagcatgaacgtcggtgtgagactgcaactggaggatgagttcccgcacccaagatag

SEQ ID NO: 13780 - protein, 684 aa, Muscodor strobelii
  misc_feature: SGI Peptide ID NO. 564525
  misc_feature (173)..(213): Pfam Id: PF04567 Pfam Desc: RNA polymerase Rpb2, domain 5
  misc_feature (1)..(53): Pfam Id: PF04565 Pfam Desc: RNA polymerase Rpb2, domain 3
  misc_feature (91)..(153): Pfam Id: PF04566 Pfam Desc: RNA polymerase Rpb2, domain 4
  misc_feature (218)..(589): Pfam Id: PF00562 Pfam Desc: RNA polymerase Rpb2, domain 6
  misc_feature (591)..(677): Pfam Id: PF04560 Pfam Desc: RNA polymerase Rpb2, domain 7
  misc_feature (1)..(684): NCBI GI: 46107920 Blast Desc: FG00843.1 [Gibberella zeae PH-1]
  misc_feature (1)..(684): NCBI GI: 85083820 Blast Desc: DNA-directed RNA polymerase III 130 kDa polypeptide [Neurospora crassa OR74A] gi|7800864|emb|CAB91222.1| DNA-directed RNA polymerase III second-largest chain [Neurospora crassa] RNA
  misc_feature (1)..(684): NCBI GI: 116199389 Blast Desc: CHGG_07850 [Chaetomium globosum CBS 148.51] gi|88179129|gb|EAQ86597.1| CHGG_07850 [Chaetomium globosum CBS 148.51]
  misc_feature (1)..(683): NCBI GI: 39978199 Blast Desc: MGG_06984 [Magnaporthe grisea 70-15] gi|145013440|gb|EDJ98081.1| MGG_06984 [Magnaporthe grisea 70-15]
  misc_feature (1)..(684): NCBI GI: 171689286 Blast Desc: protein product [Podospora anserina] gi|170944605|emb|CAP70716.1| protein product [Podospora anserina]
  misc_feature (1)..(682): NCBI GI: 156059482 Blast Desc: SS1G_03753 [Sclerotinia sclerotiorum 1980] gi|154701540|gb|EDO01279.1| SS1G_03753 [Sclerotinia sclerotiorum 1980]
  misc_feature (1)..(684): NCBI GI: 242808107 Blast Desc: DNA-directed RNA polymerase III, beta subunit, [Talaromyces stipitatus ATCC 10500] gi|218715719|gb|EED15141.1| DNA-directed RNA polymerase III, beta subunit, [Talaromyces ATCC
  misc_feature (1)..(681): NCBI GI: 115396768 Blast Desc: DNA-directed RNA polymerase III 130 kDa polypeptide [Aspergillus terreus NIH2624] gi|114193592|gb|EAU35292.1| DNA-directed RNA polymerase III 130 kDa polypeptide [Aspergillus
  misc_feature (1)..(684): NCBI GI: 261194511 Blast Desc: DNA-directed RNA polymerase III polypeptide [Ajellomyces dermatitidis SLH14081] gi|239588198|gb|EEQ70841.1| DNA-directed RNA polymerase III polypeptide [Ajellomyces
  misc_feature (1)..(684): NCBI GI: 67516079 Blast Desc: AN0321.2 [Aspergillus nidulans FGSC A4] gi|40746571|gb|EAA65727.1| AN0321.2 [Aspergillus nidulans FGSC A4]
  misc_feature (1)..(682): SWISSPROT Homolog: EC 2.7.7.6 DNA-directed RNA polymerase
MMTRISSQFEKTRKVSGPRALQASQWGVLCPSDTPEGEACGLVKNLALMTHITTSSDEDPVISAALCNDFSASLLTSNSGTEIYKDGIFVVHINGTPFATTKRPKQLAASLRAARRQGCISPFVSINVNENLAAVHIATDEGRICRPYIIVKNAKSTITKHQLWQLQEGKVSFDDFIRSGVVEYLDVNEANDTLIALYEKDITKSTTHVEIEPFTLLGAVAGLIPFPHHNQSPRNTYQCAMGKQAIGAIAYNQFNRIDTLLLTMVYPQRPMVISKTIELIHYDKLPAGQNATVVVMSYSGYDIEDALVLNKASLDRGFGRAQVFKKFSAELQRYPNGTQERIGDNDPSVEKYQSLSKDGLADVGVQVNSGHVLIKKESPSDTTTSTIGGMAPRTNDFRETPISFKSADPAYIDKVMVTQTDRENQLIKVQTRQTRRPEIGDKFSSRHGQKGVVGIIVDQEDLPFSDEGIVPDIIMNPHGFPSRMTVGKLLECLTGKAAVVKNKREYGYGDAFRSHPLEAMSAELVDAGFSWEGKDYFTSGITGEALQAYIFNGPIFYQRLKHMVQDKMHSRSRGPRAILTRQPTEGRSRDGGLRLGEMERDCLVAYGASQLLLERLMISSDAVVIDVCQRCGLFGTKGYCNTCRSSQEIAKMTMPYAAKLLVQELISMNVGVRLQLEDEFPHPR

SEQ ID NO: 13781 - DNA, 3677 bp, Muscodor strobelii; identical to SEQ ID NO: 13778
  misc_feature: SGI EST ID NO. CUFF.33070.1
  misc_feature: Variant of the nucleotide sequence at SEQ ID NO 13779

SEQ ID NO: 13782 - DNA, 390 bp, Muscodor strobelii
  misc_feature: SGI cDNA ID NO. 564526
  misc_feature: Encodes the peptide sequence at SEQ ID NO 13783
atgcctgactcccagcccgcttcggaggaggttgtcacggttgtcgttcctgccatttctcgacagctcctgaatgaggctattacgagagtcatcaatgaaggccgcactgtgatacgaggaatggcccaggacttggcccaggactcggctccgctttctgacgaggtgacgcagtacctcgaagagctgaagcgaaacttgcacgaattgagtgagaacgactgcagcctacatcaggaagaagttcaaggtttcgagagcatggataaggtctgtcatgcctttaacgagcttcatcagaaagttaccgccacaaagcagactctcaacgccctcaccactcgttttgagttggagaaggctaatgagaataacacccgcaattaa

SEQ ID NO: 13783 - protein, 129 aa, Muscodor strobelii
  misc_feature: SGI Peptide ID NO. 564526
MPDSQPASEEVVTVVVPAISRQLLNEAITRVINEGRTVIRGMAQDLAQDSAPLSDEVTQYLEELKRNLHELSENDCSLHQEEVQGFESMDKVCHAFNELHQKVTATKQTLNALTTRFELEKANENNTRN

SEQ ID NO: 13784 - DNA, 318 bp, Muscodor strobelii
  misc_feature: SGI cDNA ID NO. 564527
  misc_feature: Encodes the peptide sequence at SEQ ID NO 13785
atggctagcccaccgtctccctcggatccggactcggagcccatctcgggtcctctcatgattctcactgcagaaagcaagccagatcccggtgacaactcggacaagatggttgaggaccgcgctcagcgttctgacggaatggatcaaactttcggcgtccagaacgcgcaagaagagttctacaacacaatgaacctgggcatcaacaatttgacgcaggtgttgttgcagacctgccagcgcttagacaagatagatcagcacgtggtcaacaccaactgccatcttctgaacaccctcagcactcgaatctag

SEQ ID NO: 13785 - protein, 105 aa, Muscodor strobelii
  misc_feature: SGI Peptide ID NO. 564527
MASPPSPSDPDSEPISGPLMILTAESKPDPGDNSDKMVEDRAQRSDGMDQTFGVQNAQEEFYNTMNLGINNLTQVLLQTCQRLDKIDQHVVNTNCHLLNTLSTRI

SEQ ID NO: 13786 - DNA, 1182 bp, Muscodor strobelii
  misc_feature: SGI cDNA ID NO. 564528
  misc_feature: Reduced expression when VOC is produced
  misc_feature: Encodes the peptide sequence at SEQ ID NO 13787
atgtcgcaatcaccgttcaccgtgaggtggggtatcatggccacaggggggatagctcaaacattcgtcaaggatcttctcacagacccatcaagccgcgatgtgacggatatcgcccacaaagttgttgctgttgcatcttcgcgctcgaaagacagcgctgtctcattcctcgacaaagtcaaactcgcttccgaaggcgttgcgctctacggctcgtacaatgagcttgtcaatgatccaaatgtaaactgtgtctatgtcgctactcctcacagccatcacttccagaacgccatgttggcactacaagccgggaaaaatgtcttgtgcgagaaggctttcactatcactgcttctcaggcgaggaagctggccgaagttgccaaggagaagaacctgttcttgatggaggctgtatggacgagatatttcccgcttagcatcaaggtcagggaactagttcaatcaggcgtcattggaagtgtttatcgggtcattgccgatctttcttttggagaagatggtccgaacggtactctgaacttccctgatgaaaaccgcatggttaatatagatctcgccggcggcgcgctgctggatcttggcatctacccactgacatggctgtttcaaattctataccacctgcagcctgaagctgacaaggaagctcccaagactgttgcagcaatgaataaatacaaaacaggggcggacgaaacgaccggtataattcttcagtttcccaaccataagagtatgggtattgccacgacttcaatgcgcatcgcaacggacccggataagcagaacagtgccgggcccgcaatcaagattcagggttcacttggcgagattcaggttatggggccagcctacagacctcaacaataccgaatcatcaagaaggatgctgctggcaaagtagaagttgttgactgtcctattccgaaggatcctgccagggactggggccatggcatgttctgggaagccgatgaagtcgcaagatgtttgagagacggcaaaaaggagagcgccagtcttcccctttccgagagtattgtgatcatggagtgcatggaagaggcacttaagcaaggtgatgtcacatatccagagcttatcgccacagacgtgtatgatcctcagagcccgctcaatactggcaaccagtga

SEQ ID NO: 13787 - protein, 393 aa, Muscodor strobelii
  misc_feature: SGI Peptide ID NO. 564528
  misc_feature (8)..(140): Pfam Id: PF01408 Pfam Desc: Oxidoreductase family, NAD-binding Rossmann fold
  misc_feature (4)..(393): NCBI GI: 46105384 Blast Desc: FG00320.1 [Gibberella zeae PH-1]
  misc_feature (1)..(391): NCBI GI: 256734616 Blast Desc: [Nectria haematococca mpVI 77-13-4]
  misc_feature (4)..(393): NCBI GI: 171689056 Blast Desc: protein product [Podospora anserina] gi|170944490|emb|CAP70601.1| protein product [Podospora anserina]
  misc_feature (2)..(393): NCBI GI: 85082391 Blast Desc: NCU01704 [Neurospora crassa OR74A] gi|8218254|emb|CAB92681.1| related to dimeric dihydrodiol dehydrogenase [Neurospora crassa] gi|28917990|gb|EAA27674.1|
  misc_feature (2)..(393): NCBI GI: 116204939 Blast Desc: CHGG_10353 [Chaetomium globosum CBS 148.51] gi|88176481|gb|EAQ83949.1| CHGG_10353 [Chaetomium globosum CBS 148.51]
  misc_feature (2)..(393): NCBI GI: 131569961 Blast Desc: NADP:D-xylose dehydrogenase [Hypocrea jecorina]
  misc_feature (1)..(391): NCBI GI: 39946662 Blast Desc: MGG_08569 [Magnaporthe grisea 70-15] gi|145012426|gb|EDJ97082.1| MGG_08569 [Magnaporthe grisea 70-15]
  misc_feature (6)..(392): NCBI GI: 261358594 Blast Desc: NADP:D-xylose dehydrogenase [Verticillium albo-atrum VaMs.102]
  misc_feature (4)..(392): NCBI GI: 261358570 Blast Desc: NADP:D-xylose dehydrogenase [Verticillium albo-atrum VaMs.102]
  misc_feature (1)..(389): NCBI GI: 156063490 Blast Desc: SS1G_01863 [Sclerotinia sclerotiorum 1980] gi|154697197|gb|EDN96935.1| SS1G_01863 [Sclerotinia sclerotiorum 1980]
  misc_feature (6)..(375): SWISSPROT Homolog: EC 1.3.1.20 Trans-1,2-dihydrobenzene-1,2-diol dehydrogenase
  misc_feature (6)..(375): SWISSPROT Homolog: EC 1.1.1.179 D-xylose 1-dehydrogenase (NADP(+))
  misc_feature: Useful for introducing or modulating the production of volatile compounds
MSQSPFTVRWGIMATGGIAQTFVKDLLTDPSSRDVTDIAHKVVAVASSRSKDSAVSFLDKVKLASEGVALYGSYNELVNDPNVNCVYVATPHSHHFQNAMLALQAGKNVLCEKAFTITASQARKLAEVAKEKNLFLMEAVWTRYFPLSIKVRELVQSGVIGSVYRVIADLSFGEDGPNGTLNFPDENRMVNIDLAGGALLDLGIYPLTWLFQILYHLQPEADKEAPKTVAAMNKYKTGADETTGIILQFPNHKSMGIATTSMRIATDPDKQNSAGPAIKIQGSLGEIQVMGPAYRPQQYRIIKKDAAGKVEVVDCPIPKDPARDWGHGMFWEADEVARCLRDGKKESASLPLSESIVIMECMEEALKQGDVTYPELIATDVYDPQSPLNTGNQ

SEQ ID NO: 13788 - DNA, 1668 bp, Muscodor strobelii
  misc_feature: SGI EST ID NO. CUFF.33200.0
  misc_feature: Variant of the nucleotide sequence at SEQ ID NO 13786
gaaacaggttgcaagcgtagtggctctgaaagcaaattctatagtgcggaacgttgcacagcgaggtcataacgtcactagctgaggggcaacacaatttcggacgacagtaccccgcctggtcataaatatttcgacggaattaaggcacgaatctcatgccagatctttgaagtttcagtataagatacaatagattggcttctcgacaggattaaatcatagctgaagcccaattcgatacacatcttccgaaaccatcgtgtaagcaaggctaagtccgccaattcgacatgtcgcaatcaccgttcaccgtgaggtggggtatcatggccacaggggggatagctcaaacattcgtcaaggatcttctcacagacccatcaagccgcgatgtgacggatatcgcccacaaagttgttgctgttgcatcttcgcgctcgaaagacagcgctgtctcattcctcgacaaagtcaaactcgcttccgaaggcgttgcgctctacggctcgtacaatgagcttgtcaatgatccaaatgtaaactgtgtctatgtcgctactcctcacagccatcacttccagaacgccatgttggcactacaagccgggaaaaatgtcttgtgcgagaaggctttcactatcactgcttctcaggcgaggaagctggccgaagttgccaaggagaagaacctgttcttgatggaggctgtatggacgagatatttcccgcttagcatcaaggtcagggaactagttcaatcaggcgtcattggaagtgtttatcgggtcattggtgagcgacgcacttgatccctatctcggggagtatggcaatctggtttttatgctgacatgcttgatgcagccgatctttcttttggagaagatggtccgaacggtactctgaacttccctgatgaaaaccgcatggttaatatagatctcgccggcggcgcgctgctggatcttggcatctacccactgacatggctgtttcaaattctataccacctgcagcctgaagctgacaaggaagctcccaagactgttgcagcaatgaataaatacaaaacaggggcggacgaaacgaccggtataattcttcagtttcccaaccataagagtatgggtattgccacgacttcaatgcgcatcgcaacggacccggataagcagaacagtgccgggcccgcaatcaagattcagggttcacttggcgagattcaggttatggggccagcctacagacctcaacaataccgaatcatcaagaaggatgctgctggcaaagtagaagttgttgactgtcctattccgaaggatcctgccagggactggggccatggcatgttctgggaagccgatgaagtcgcaagatgtttgagagacggcaaaaaggagagcgccagtcttcccctttccgagagtattgtgatcatggagtgcatggaagaggcacttaagcaaggtgatgtcacatatccagagcttatcgccacagacgtgtatgatcctcagagcccgctcaatactggcaaccagtgaagagcggatgatgtaacattccggcttttatgtagataatatagaacggccttcgatacgggctccttgactggcttcaatcttcctcgacggtaccataatactcttagataactctcag

SEQ ID NO: 13789 - DNA, 795 bp, Muscodor strobelii
  misc_feature: SGI cDNA ID NO. 564529
  misc_feature: Reduced expression when VOC is produced
  misc_feature: Encodes the peptide sequence at SEQ ID NO 13790
atgtcgaatgcaacagaagcacatggcgccgctcctggtggtagcaagccagaagccgagagcgcatctggctccatccgtgccgccgtagagcagtcgccagatgcctacgagcaagaacatgtgcatagcgtatatgagacgatagcaggtcatttcagttccacgcggtacaaaccctggcccttcattgcctcgttcctgcaggaccgcgtccaacccgggttcgtagggctcgacgttggctgcgggaacgggaaatatctctccgtacggaaaagtggcgatgtgcacatgcttgggtcggaccggagtgcgaacctggtgacgatcgcgcgggactacaatggacatgggcacgatgtcatggtcgctgattcactttctttgccattcagacacgggtgcgcagacattgtgctctgcattgcagtcatacatcacatgactacgcgcgagcgacgtgtcgatgcactgagacgattgctggagtgcatcaggggcgacggacaggttctagtatatgtttgggcgctggagcagagctcgagtcgcagaggatgggatgagaattcggatcaagatcaacttgtgccgtgggtcatgaaagggaagcagaacaaggacggtggcgatgcggctgcagacgtgacttatcagcggttttatcacctgtaccgtgagggtgagctagaggaggatatgcgaacagcgggcggcaaggtgttagagagcggatacgagagagataactggtgggtaataggaggtcatagcgaatcgctaacgagctga

SEQ ID NO: 13790 - protein, 264 aa, Muscodor strobelii
  misc_feature: SGI Peptide ID NO. 564529
  misc_feature (79)..(174): Pfam Id: PF08241 Pfam Desc: Methyltransferase domain
  misc_feature (79)..(172): Pfam Id: PF08242 Pfam Desc: Methyltransferase domain
  misc_feature (14)..(254): NCBI GI: 256734617 Blast Desc: NECHADRAFT_98875 [Nectria haematococca mpVI 77-13-4]
  misc_feature (1)..(254): NCBI GI: 46105382 Blast Desc: FG00319.1 [Gibberella zeae PH-1]
  misc_feature (2)..(263): NCBI GI: 154319111 Blast Desc: BC1G_02507 [Botryotinia fuckeliana B05.10] gi|150856938|gb|EDN32130.1| BC1G_02507 [Botryotinia fuckeliana B05.10]
  misc_feature (29)..(255): NCBI GI: 261358595 Blast Desc: tRNA (uracil-5-)-methyltransferase TRM9 [Verticillium albo-atrum VaMs.102]
  misc_feature (37)..(255): NCBI GI: 169597129 Blast Desc: SNOG_01346 [Phaeosphaeria nodorum SN15] gi|111069875|gb|EAT90995.1| SNOG_01346 [Phaeosphaeria nodorum SN15]
  misc_feature (39)..(261): NCBI GI: 116204941 Blast Desc: CHGG_10354 [Chaetomium globosum CBS 148.51] gi|88176482|gb|EAQ83950.1| CHGG_10354 [Chaetomium globosum CBS 148.51]
  misc_feature (34)..(255): NCBI GI: 156063480 Blast Desc: SS1G_01858 [Sclerotinia sclerotiorum 1980] gi|154697192|gb|EDN96930.1| SS1G_01858 [Sclerotinia sclerotiorum 1980]
  misc_feature (35)..(264): NCBI GI: 145238896 Blast Desc: An07g10200 [Aspergillus niger] gi|134076596|emb|CAK45149.1| protein product [Aspergillus niger]
  misc_feature (35)..(260): NCBI GI: 121702285 Blast Desc: conserved [Aspergillus clavatus NRRL 1] gi|119397550|gb|EAW07981.1| conserved [Aspergillus clavatus NRRL 1]
  misc_feature (22)..(260): NCBI GI: 119496279 Blast Desc: NFIA_017170 [Neosartorya fischeri NRRL 181] gi|119413075|gb|EAW23016.1| conserved [Neosartorya fischeri NRRL 181]
  misc_feature: Useful for introducing or modulating the production of volatile compounds
MSNATEAHGAAPGGSKPEAESASGSIRAAVEQSPDAYEQEHVHSVYETIAGHFSSTRYKPWPFIASFLQDRVQPGFVGLDVGCGNGKYLSVRKSGDVHMLGSDRSANLVTIARDYNGHGHDVMVADSLSLPFRHGCADIVLCIAVIHHMTTRERRVDALRRLLECIRGDGQVLVYVWALEQSSSRRGWDENSDQDQLVPWVMKGKQNKDGGDAAADVTYQRFYHLYREGELEEDMRTAGGKVLESGYERDNWWVIGGHSESLTS

SEQ ID NO: 13791 - DNA, 954 bp, Muscodor strobelii
  misc_feature: SGI cDNA ID NO. 564530
  misc_feature: Reduced expression when VOC is produced
  misc_feature: Encodes the peptide sequence at SEQ ID NO 13792
atggtggcagggacagttggaaagcgcggcgggccgcatcatacggagtccccggcgaagaagcagagtaaatggtcaccagaagaggacgccctgatcattgaccttcgcggaagtggaatgaagtgggaggacatctcgaaaaagttaccaggacggagcgcgatcagttgtcgtcttcactaccagaactatcttgaaagacgtagcgagtgggatgaagagcggaagaacaagctcgctagactctacgagagattcaagccagagatgtgggcgaaggtcgcagaagagatgcagataccgtggcgagcagcagaagcaatgcactggcacatgggtgaacaggatatggcgcgtcgagctggagtcacccctttctccctgtcttcccaaacattagaaggggcacatggagcctcgagaccatcagcgcgtcacggacgtacaacatctcacggaagcgttccgagagatacagggcacggaaggtctcatggtcgtgcagctgcagtccctcctacccgtccactcgcatcacgaatggaggccataccggcgcaccatcttccaccgccacccgatcacgttgaaattgcctacggataccccatttcgcatggcgggggtccacttgctcctattcaaactccaggccagaatctgcgccccgcgatgctacccggtgttgcagagcttactaccggcgtaagcccatacagcacgccagccttctcgacaggtgtacctagtgccagtccagtacatagcgccaggacgagtcccggtccttacatgccgccccttgcgtatccctctctcgagcctgttccgggcggctccaagagacgaaggagtccagaaagctacccctatgaacctcgacggaggaattatgactcacgggcaggttcgtatgaacttgtaccgagacgacagccacgagagcattga

SEQ ID NO: 13792 - protein, 317 aa, Muscodor strobelii
  misc_feature: SGI Peptide ID NO. 564530
  misc_feature (22)..(66): Pfam Id: PF00249 Pfam Desc: Myb-like DNA-binding domain
  misc_feature (4)..(289): NCBI GI: 16416107 Blast Desc: related to DRPLA protein [Neurospora crassa]
  misc_feature (4)..(289): NCBI GI: 164428136 Blast Desc: NCU01706 [Neurospora crassa OR74A] gi|157072026|gb|EAA27676.2| conserved [Neurospora crassa OR74A]
  misc_feature (12)..(298): NCBI GI: 171689060 Blast Desc: protein product [Podospora anserina] gi|170944492|emb|CAP70603.1| protein product [Podospora anserina]
  misc_feature (7)..(297): NCBI GI: 46105380 Blast Desc: FG00318.1 [Gibberella zeae PH-1]
  misc_feature (16)..(297): NCBI GI: 256735349 Blast Desc: [Nectria haematococca mpVI 77-13-4]
  misc_feature (2)..(251): NCBI GI: 156063482 Blast Desc: SS1G_01859 [Sclerotinia sclerotiorum 1980] gi|154697193|gb|EDN96931.1| SS1G_01859 [Sclerotinia sclerotiorum 1980]
  misc_feature (1)..(251): NCBI GI: 154319109 Blast Desc: BC1G_02506 [Botryotinia fuckeliana B05.10] gi|150856937|gb|EDN32129.1| BC1G_02506 [Botryotinia fuckeliana B05.10]
  misc_feature (7)..(165): NCBI GI: 238490067 Blast Desc: MYB DNA-binding domain protein [Aspergillus flavus NRRL3357] gi|220698659|gb|EED54999.1| MYB DNA-binding domain protein [Aspergillus flavus NRRL3357]
  misc_feature (3)..(165): NCBI GI: 121702287 Blast Desc: MYB DNA-binding domain protein [Aspergillus clavatus NRRL 1] gi|119397551|gb|EAW07982.1| MYB DNA-binding domain protein [Aspergillus clavatus NRRL 1]
  misc_feature (3)..(164): NCBI GI: 145238894 Blast Desc: An07g10190 [Aspergillus niger] gi|134076595|emb|CAK45148.1| protein product [Aspergillus niger]
  misc_feature: Useful for introducing or modulating the production of volatile compounds
MVAGTVGKRGGPHHTESPAKKQSKWSPEEDALIIDLRGSGMKWEDISKKLPGRSAISCRLHYQNYLERRSEWDEERKNKLARLYERFKPEMWAKVAEEMQIPWRAAEAMHWHMGEQDMARRAGVTPFSLSSQTLEGAHGASRPSARHGRTTSHGSVPRDTGHGRSHGRAAAVPPTRPLASRMEAIPAHHLPPPPDHVEIAYGYPISHGGGPLAPIQTPGQNLRPAMLPGVAELTTGVSPYSTPAFSTGVPSASPVHSARTSPGPYMPPLAYPSLEPVPGGSKRRRSPESYPYEPRRRNYDSRAGSYELVPRRQPREH

SEQ ID NO: 13793 - DNA, 4730 bp, Muscodor strobelii
  misc_feature: SGI EST ID NO. CUFF.32987.0
  misc_feature: Variant of the nucleotide sequence at SEQ ID NO 13791
gttggaaagcgcggcgggccgcatcatacggagtccccggcgaagaagcagagtaaatggtcaccagaagaggacgccctgatcattgaccttcgcggaagtggaatgaagtgggaggacatctcgaaaaagttaccaggacggagcgcgatcagttgtcgtcttcactaccagaactatcttgaaagacgtagcgagtgggatgaagagcggaagaacaagctcgctagactctacgagagattcaagccagagatgtgggcgaaggtcgcagaagagatgcagataccgtggcgagcagcagaagcaatgcactggcacatgggtgaacaggatatggcgcgtcgagctggagtcacccctttctccctgtcttcccaaacattagaaggggcacatggagcctcgagaccatcagcgcgtcacggacgtacaacatctcacggaagcgttccgagagatacagggcacggaaggtctcatggtcgtgcagctgcagtccctcctacccgtccactcgcatcacgaatggaggccataccggcgcaccatcttccaccgccacccgatcacgttgaaattgcctacggataccccatttcgcatggcgggggtccacttgctcctattcaaactccaggccagaatctgcgccccgcgatgctacccggtgttgcagagcttactaccggcgtaagcccatacagcacgccagccttctcgacaggtgtacctagtgccagtccagtacatagcgccaggacgagtcccggtccttacatgccgccccttgcgtatccctctctcgagcctgttccgggcggctccaagagacgaaggagtccagaaagctacccctatgaacctcgacggaggaattatgactcacgggcaggttcgtatgaacttgtaccgagacgacagccacgagagcattgaggatgcaaatttgcaaatacttaggagcgaggactagcgcggatacgatcacggtagaggcacagagttccacatagctcaaggaatgcagttcagaataagtgattattcgctttcacggaacaaacagaccatgtctacacgaacagcacaaacggaatggcgtttcaagcgccaagaatgcagaccgaagtactaaattggagtacaacagaaacagaactgaggcaataacctccagcattgaacaggcgtatgctttaattacagtcagcctcggggcaatgcccgtggcataggaatttacgacgatatgaacaactccacagtgtgtttattgatcttgctttttcgagcttcgattctatcatgtcgttttaccttcacctacccttttacgacagacctaactaccatacctacatcacgaccacacagactagatttcgcatacggaagatctcaatatggatacgggggaacggagcatttcgaagcatgcatcattgctttttggctctcaggagactaaaatgcaaagcggttggggcagggaaacgaaacatggacagggcgttgttagggtttgggcagggaacatttggtcatcagtgttgcggaagattctgtaatcagggtcctattgatcgattcgaggtcgagtcccagaccgtgaggcgagaaattggcgaatggtgttttgttttgcttttgtagtatttttgtggctcggatagaactcccgagggcgcttggagcgggtcggttgtgtgacgattaatgaatcacttgcttttggaatgtgaagtggtctgtataccaatataactgttcaagccataaaataatatcgcgatatttgtcaatatgagatctgttttgttttccacctgattgattgctgtattcggcactcctcattgttgctagatccacgccggcgaccgatttcttggcgcagtatcgtaattttatttattcacaatacattcagatcagctcgttagcgattcgctatgacctcctattacccaccagttatctctctcgtatccgctctctaacaccttgccgcccgctgttcgcatatcctcctctagctcaccctcacggtacaggtgataaaaccgctgataagtcacgtctgcagccgcatcgccaccgtccttgttctgcttccctttcatgacccacggcacaagttgatcttgatccgaattctcatcccatcctctgcgactcgagctctgctccagcgcccaaacatatactagaacctgtccgtcgcccctgatgcactccagcaatcgtctcagtgcatcgacacgtcgctcgcgcgtagtcatgtgatgtatgactgcaatgcagagcacaatgtctgcgcacccgtgtctgaatggcaaagaaagtgaatcagcgaccatgacatcgtgcccatgtccattgtagtcccgcgcgatcgtcaccaggttcgcactccggtccgacccaagcatgtgcacatcgccacttttccgtacggagagatatttcccgttcccgcagccaacgtcgagccctacgaacccgggttggacgcggtcctgcaggaacgaggcaatgaagggccagggtttgtaccgcgtggaactgaaatgacctgctatcgtctcatatacgctatgcacatgttcttgctcgtaggcatctggcgactgctctacggcggcacggatggagccagatgcgctctcggcttctggcttgctaccaccaggagcggcgccatgtgcttctgttgcattcgacatgtttggatggttgtacagaatcggcacaggcaagtagataggtcgggcgttggaacgaagacgataggtgtccggcctatcgcttggtcgggcaccccaacagcagttggtatgctaaggtgtttgactccttctgcggccagaacatcaaccccgggcaagcccccgaaagtcgtgttacctgcctagtgcttcctggagatcgaaaagccttgtctcacctgacgagcgcaacgtggcccagaagtcgcagtctagttaaggttggcacgtcttctaaaccccctccttcgccaaaaactcgaggatccgatctgctcgttctaggtccgtcagcggcccgtcccgcctcgtaaagcaagaccagggcgaaaccgaagtagtacgtcccctatctatgcacaaggcggaccgggaccagcaatgtattccagtagtatgtggtccgatgatacaccccacgggtcgggtgtcactgacagatcgactatgcgatcaggaccagggttcggacgaaagctatatgcaatgcacctcgacaggttgttgtgacttgacaaagacaaatcgatcgaaatataccgactggcctttgcggttgcggctacactacagctcacaatcccagttttgatcgcagtaataccgcctgtacgcagcagcaggcctcattcgctgggtctgcaatgatcgacacttggattgtggtgtgcgcttgcccttttcgcgtgtctcagatagcgcccgcgtcgtgcagaagaaggttctttctccccggatcccagaaaatggcgttgtttttggctcctgggtccccgcagcatgcactccggctggagactcgcgctggttggtgctggataacggctgactagaggatgtgtgcgtttgcccgagacaagcagtttttacctgaggccacgccccttttcgaggtcatcacaagacctgcggagatttttttagtgatcgtgacgaagatcgagacgtgggctgattgatttttaggatctgttcaacggcactccacaatttcaggtcccactcattcaggtcatgtctttttcctatgttcagttgcttccaacaagttcttttactcgcgattattgacgtgaaaattacgatggaaatcagtgaagctagcttttcagcccagaggaaggatagcgcaagacaaggggagaaactggagaaacgagaagatccctcactttcagtcgcaacccttagtggggccgcgacttcgaagaattagtagcggctacctatacacaatgggaggcaatgatccatgaacccgaaatagtccaaatattgcttcagactatatcaactcggcttcagagtttgttaccacaatgtaattcctctctctcgatgccaaataagacgcctttcacgaagactcggaacttatccaaacgattgcatgcttctgtgatgaaaactctggatctctgatacaacgaaccttttaagcatgaaaaggatcgtagaatggtgtagttctggctctgcagtgcccctcgtcccttacatcagtagcttaggctcagcaattaatgcatccgttgaactcggtggtcatatctgctgcatctcacggcttgtgctgatacacggggtgtggcggacttggagctagcaataacggagctagcagaaaccgtgaggttgggaataccgcttccattacctcggacttctcgcgagagatgcaaacccgtttgatagctccttgtcaccttctcagtatatacagtcttcaagaaacactcatccgcggatatgctgtaattaggtagtctttggctgttatctccgtggaaaacagagagttgtcgtgaacgccagaaatgaatgttgtacgcgaatcaagcaaggcatctcttcagaggagactctcaaaagcaatgaccctttacggccacgttagaatcggcgtgttgggtttccggatcttgttaaatcacgaaagactccagtattcaagcaaag

SEQ ID NO: 13794 - DNA, 729 bp, Muscodor strobelii
  misc_feature: SGI cDNA ID NO. 564531
  misc_feature: Encodes the peptide sequence at SEQ ID NO 13795
atggctgacgttccacttctggttacgtcggagaattcgtcgtccgaacgacgtgttactccgtcatggtccatcagccagctcaagaccaagcttgaacccgtcacgggcataccgccttcttgccagcgcctcagactgaagacttcatccacaaacgagactattgcccttgaggcggtgaacgaggatgcagcacttctgtccagctttccgcttgtgccctatgctgagttactgatcattgatacccggccgcctgctgctaggttgaacttgacggacacctctaatgtcgacaaatatgttatgccgacggaggagtacgagaaaaagtccgattcagttctagcctggaaaaaggctgaaaaactcggccgcttcaatcccgatgctcctactttggagaaagccaagatagatgccgtcgaccaggaaatcagcagccgaggcattgcggtcggcaaacgctgcagaataggcgctgaggactcgcgcagaggtgagatcaagttcgtcggggaggtcaaggagatacccggcgtgttaggcgcatgggtcggggttcatctcgacgagccggtcggtaagaatgatggcagcataggaggcaagcgatactggggcacggaatcgtctctcaaacatggcgtctttgtcagaccagagagagtcgaagtgggagattggccggttcttgatgacctggaagacatggaggagatatga

SEQ ID NO: 13795 - protein, 242 aa, Muscodor strobelii
  misc_feature: SGI Peptide ID NO. 564531
  misc_feature (154)..(226): Pfam Id: PF01302 Pfam Desc: CAP-Gly domain
  misc_feature (18)..(48): Pfam Id: PF00240 Pfam Desc: Ubiquitin family
  misc_feature (1)..(242): NCBI GI: 46105378 Blast Desc: FG00317.1 [Gibberella zeae PH-1]
  misc_feature (1)..(242): NCBI GI: 171689062 Blast Desc: protein product [Podospora anserina] gi|170944493|emb|CAP70604.1| protein product [Podospora anserina]
  misc_feature (1)..(242): NCBI GI: 85077615 Blast Desc: NCU01713 [Neurospora crassa OR74A] gi|8218264|emb|CAB92691.1| Alp11 homologue of tubulin-folding cofactor B [Neurospora crassa] gi|28917069|gb|EAA26791.1| crassa
  misc_feature (1)..(242): NCBI GI: 116204947 Blast Desc: CHGG_10357 [Chaetomium globosum CBS 148.51] gi|88176485|gb|EAQ83953.1| CHGG_10357 [Chaetomium globosum CBS 148.51]
  misc_feature (2)..(242): NCBI GI: 154319105 Blast Desc: BC1G_02504 [Botryotinia fuckeliana B05.10] gi|150856935|gb|EDN32127.1| BC1G_02504 [Botryotinia fuckeliana B05.10]
  misc_feature (1)..(209): NCBI GI: 39946660 Blast Desc: MGG_08570 [Magnaporthe grisea 70-15] gi|145012428|gb|EDJ97084.1| MGG_08570 [Magnaporthe grisea 70-15]
  misc_feature (2)..(242): NCBI GI: 169596929 Blast Desc: SNOG_01240 [Phaeosphaeria nodorum SN15] gi|160707404|gb|EAT90889.2| SNOG_01240 [Phaeosphaeria nodorum SN15]
  misc_feature (44)..(242): NCBI GI: 261358596 Blast Desc: cell polarity protein alp11 [Verticillium albo-atrum VaMs.102]
  misc_feature (2)..(242): NCBI GI: 156063486 Blast Desc: SS1G_01861 [Sclerotinia sclerotiorum 1980] gi|154697195|gb|EDN96933.1| SS1G_01861 [Sclerotinia sclerotiorum 1980]
  misc_feature (2)..(242): NCBI GI: 145238898 Blast Desc: An07g10210 [Aspergillus niger] gi|134076597|emb|CAK45150.1| protein product [Aspergillus niger]
MADVPLLVTSENSSSERRVTPSWSISQLKTKLEPVTGIPPSCQRLRLKTSSTNETIALEAVNEDAALLSSFPLVPYAELLIIDTRPPAARLNLTDTSNVDKYVMPTEEYEKKSDSVLAWKKAEKLGRFNPDAPTLEKAKIDAVDQEISSRGIAVGKRCRIGAEDSRRGEIKFVGEVKEIPGVLGAWVGVHLDEPVGKNDGSIGGKRYWGTESSLKHGVFVRPERVEVGDWPVLDDLEDMEEI

SEQ ID NO: 13796 - DNA, 1576 bp, Muscodor strobelii
  misc_feature: SGI EST ID NO. CUFF.33022.0
  misc_feature: Variant of the nucleotide sequence at SEQ ID NO 13794
cgccggccacgttcgttgtggctgagatggcgcagggtttccccactacgagccacccctccaaaatgcccctcatcgctggcttcattattcctgcccagtgtacaggcaacaactcatcacgatcaggtacaaacagaatttgctggaaatccgcggaccaattgcttgactttcgcaaattgccgttgagaacgaccgatcgatttcaagactccagaccacccagttcaccaccaacttcattaatcacgtcactctgaggacaacacatccgggcatactactccttcaagactggcgggagcaagtacctaaggtaaggtaggtacttacggtttgggggctatcaataacagattgtcagccctatcaaaccagcgcctcgtttttagggtctctataccgccagagcagaaccgatcaaagcaagggtcttcgccctgcacatcgactggcaacgcaccaagcgcacacgtcacaaactcggggctaagaatggctgacgttccacttctggttacgtcggagaattcgtcgtccgaacgacgtgttactccgtcatggtccatcagccagctcaagaccaagcttgaacccgtcacgggcataccgccttcttgccagcgcctcagactgaagacttcatccacaaacgagactattgcccttgaggcggtgaacgaggatgcagcacttctgtccagctttccgcttgtgccctatgctgagttactgatcattgatacccggccgcctgctgctaggttgaacttgacggacacctctaatgtcgacaaatatgttatgccgacggaggagtacgagaaaaagtccgattcagttctagcctggaaaaaggctgaaaaactcggccgcttcaatcccgatgctcctactttggagaaagccaagatagatgccgtcgaccaggaaatcagcagccgaggcattgcggtcggcaaacgctgcagaataggcgctgaggactcgcgcagaggtgagatcaagttcgtcggggaggtcaaggagatacccggcgtgttaggcgcatgggtcggggttcatctcgacgagccggtcggtaagaatgatggcagcataggaggcaagcgatactggggcacggaatcgtctctcaaacatggcgtctttgtcagaccagagagagtcgaagtgggagattggccggttcttgatgacctggaagacatggaggagatatgatcaccatcatagtcttcacattgagcgcgtccctctagtcactaggagtacaagtacgattaataaccagtatcgacacccaaattcttgtaactcattgatagctggggctacaagaactttcgattctgtgttggagacattcatgggatattctgcgggtgccgcgttcttctctacatcccttcactattgccaagctttaggcgagaatggacttgcaagtgaacacctgcatgaatgtgtcgcttgagatacatgagacatccaaatcacttgatggaatgagaagttcttttggtctcggtcgttgtaccgcatgctatgcgtttcaatcgaaccacgctcg

SEQ ID NO: 13797 - DNA, 234 bp, Muscodor strobelii
  misc_feature: SGI cDNA ID NO. 564532
  misc_feature: Encodes the peptide sequence at SEQ ID NO 13798
atgaccatcattttccagctcctcaccctcgtggccgtctctctggatcaggtcagctcagccggacactacttctcgctgtacactgctaacaaagccgctgtaccctacaccgagttcttaacaacgggcgagttcaagctcggttggacaactagcgtcgagttccttggaggcaagggctactacaggactactccgatgtatgttcttggctacttgaagttcatctaa

SEQ ID NO: 13798 - protein, 77 aa, Muscodor strobelii
  misc_feature: SGI Peptide ID NO. 564532
  misc_feature (9)..(62): NCBI GI: 238497225 Blast Desc: endo-1,4-beta-xylanase B precursor, [Aspergillus flavus NRRL3357] gi|220694728|gb|EED51072.1| endo-1,4-beta-xylanase B precursor, [Aspergillus flavus NRRL3357]
  misc_feature (9)..(67): NCBI GI: 145250953 Blast Desc: An15g04550 [Aspergillus niger] gi|134082516|emb|CAK97322.1| protein product [Aspergillus niger]
  misc_feature (9)..(62): NCBI GI: 119470734 Blast Desc: glycosyl hydrolases family 11 protein [Neosartorya fischeri NRRL 181] gi|119406224|gb|EAW16175.1| glycosyl hydrolases family 11 protein [Neosartorya fischeri NRRL 181]
  misc_feature (14)..(55): NCBI GI: 169784562 Blast Desc: [Aspergillus oryzae RIB40] gi|238508269|ref|XP_002385332.1| endo-1,4-beta-xylanase B precursor, [Aspergillus flavus NRRL3357] protein product oryzae]
MTIIFQLLTLVAVSLDQVSSAGHYFSLYTANKAAVPYTEFLTTGEFKLGWTTSVEFLGGKGYYRTTPMYVLGYLKFI

SEQ ID NO: 13799 - DNA, 1605 bp, Muscodor strobelii
  misc_feature: SGI cDNA ID NO. 564533
  misc_feature: Elevated expression when VOC is produced
  misc_feature: Encodes the peptide sequence at SEQ ID NO 13800
atggttgcgaaggccgcgccttctctcctcgcgagggcctgcctgctcttcggcatggtttctcttgtctccccagcatctgcaacggatgtggcgataacggctacagacagccttccacaaaacagcagcgacgtgaacctcaacatcattataaatactctacctcagccgtttccggtgctcaatctcacatcgaccctgggtactatgggaatcaaaatcgtaggagatttactgttcgtcgacgagaccaacttcactagtgtcgagaacgtcaccgatcccatcgtctatctatcttgcgatccgtcacccacgcttctatcacctaacgagaccctgaattctcttatcaataaccagcaaaagataccaaaagctattgttctctttagtacggtgaaacaaggttgtgacttggacgtttccggcaacttgtcctatgccaatttgtggaccgtgaccagcgtagaagaggctgccacggtcaaaatgcaagcccttgaaaaggctagcgtcagtctctaccgcaatggaacaatcaccgacccggatggtgatggtggtcaaggaggcccaggaagtacatcaccggtggctatgagcattctgtacagtatcacaggtctcatcaccctgcttttcttggttattatcgccaccggagcagtacgcgcacatcggcatcccgagcggtatggaccacgagcaggcacgaatggtagaccgaggcagagccgtgcgaagggaatcgctcgagccatgctcgaaaccctaccaatcgtgaagtttggagagtcggacaacaagaaacccgacgaggaacatggtgacgatgcgtcttcagaagaacatgaactgcgagagaacccggaagttttggtcacggatccatcaggcaatgccgctcacccgaggagttcgactgatgcagcaacacagagcagcccatcgacagcaaacccggatgctacgactgccacgacagcaaccgctgcacaggccccaaataatcaatctgagactggagatggacatctgggctgctcaatttgtacagaagattttacaaagggtgaggacgttcgagtgttaccttgtaaccacaaataccacccagcgtgtgtcgatccttggcttgttaacgtttctgggacatgtcctctatgtcgtcttgatcttcgacctccagaagtcattgcagcagaagcagagcgggaagaacgacgccgagctcgtctcgctggtgccgtagaagatgcacccgcgactgatgacgcggcgacagccaccgatgatcatctggccccgcctgccgaaggagaaccagcggctgagggcaatgattcaacacaccgacgtcgcagatcaagacttctagattggaatcgactacgtcatgcaccagtagatgagcgcatcaatgcattacgcgagtaccgacaatcacaacaagattctgctactggggacaacgaacgccgacactctagactgacggatcggattagaggcagattccatcgaagagccgagtcaagcaatggtaatcagccatcagagactccagaggcttcaagtccacctgctacttcatcgtga

SEQ ID NO: 13800 - protein, 534 aa, Muscodor strobelii
  misc_feature: SGI Peptide ID NO. 564533
  misc_feature (350)..(391): Pfam Id: PF00097 Pfam Desc: Zinc finger, C3HC4 type (RING finger)
  misc_feature (30)..(517): NCBI GI: 256734619 Blast Desc: NECHADRAFT_103182 [Nectria haematococca mpVI 77-13-4]
  misc_feature (13)..(511): NCBI GI: 39946658 Blast Desc: MGG_08571 [Magnaporthe grisea 70-15] gi|145012429|gb|EDJ97085.1| MGG_08571 [Magnaporthe grisea 70-15]
  misc_feature (26)..(511): NCBI GI: 46105376 Blast Desc: FG00316.1 [Gibberella zeae PH-1] gi|116090825|gb|ABJ55994.1| RING-7 protein [Gibberella zeae]
  misc_feature (54)..(518): NCBI GI: 261358597 Blast Desc: RING-7 protein [Verticillium albo-atrum VaMs.102]
  misc_feature (85)..(508): NCBI GI: 171689064 Blast Desc: protein product [Podospora anserina] gi|170944494|emb|CAP70605.1| protein product [Podospora anserina]
  misc_feature (27)..(522): NCBI GI: 121715324 Blast Desc: RING finger domain protein, [Aspergillus clavatus NRRL 1] gi|119403428|gb|EAW13845.1| RING finger domain protein, [Aspergillus clavatus NRRL 1]
  misc_feature (66)..(522): NCBI GI: 85077623 Blast Desc: NCU01715 [Neurospora crassa OR74A] gi|28917071|gb|EAA26793.1| [Neurospora crassa OR74A]
  misc_feature (66)..(508): NCBI GI: 16416109 Blast Desc: conserved [Neurospora crassa]
  misc_feature (61)..(514): NCBI GI: 119480855 Blast Desc: RING finger domain protein, [Neosartorya fischeri NRRL 181] gi|119408610|gb|EAW18559.1| RING finger domain protein, [Neosartorya fischeri NRRL 181]
  misc_feature (14)..(515): NCBI GI: 154319097 Blast Desc: BC1G_02500 [Botryotinia fuckeliana B05.10] gi|150856931|gb|EDN32123.1| BC1G_02500 [Botryotinia fuckeliana B05.10]
  misc_feature: Useful for introducing or modulating the production of volatile compounds
MVAKAAPSLLARACLLFGMVSLVSPASATDVAITATDSLPQNSSDVNLNIIINTLPQPFPVLNLTSTLGTMGIKIVGDLLFVDETNFTSVENVTDPIVYLSCDPSPTLLSPNETLNSLINNQQKIPKAIVLFSTVKQGCDLDVSGNLSYANLWTVTSVEEAATVKMQALEKASVSLYRNGTITDPDGDGGQGGPGSTSPVAMSILYSITGLITLLFLVIIATGAVRAHRHPERYGPRAGTNGRPRQSRAKGIARAMLETLPIVKFGESDNKKPDEEHGDDASSEEHELRENPEVLVTDPSGNAAHPRSSTDAATQSSPSTANPDATTATTATAAQAPNNQSETGDGHLGCSICTEDFTKGEDVRVLPCNHKYHPACVDPWLVNVSGTCPLCRLDLRPPEVIAAEAEREERRRARLAGAVEDAPATDDAATATDDHLAPPAEGEPAAEGNDSTHRRRRSRLLDWNRLRHAPVDERINALREYRQSQQDSATGDNERRHSRLTDRIRGRFHRRAESSNGNQPSETPEASSPPATSS

SEQ ID NO: 13801 - DNA, 3628 bp, Muscodor strobelii
  misc_feature: SGI EST ID NO. CUFF.33148.0
  misc_feature: Variant of the nucleotide sequence at SEQ ID NO 13799
ggaacatcggaaccattcacatccactgagaacgttgggccttgaatcaacgcccagcagaggattccaaataccgcgtaggttgtgagagttagaagacttgtagaagcatgcgatcgccattcctttattgttcttcccgtgctctttgagtcaaattcaaatccaaacccaaatcagaaccaaatccaacccaatcactttctacctattcatctcctcactccccgcctcccctgtcccccgttctggctctactgaactgccagtcgggaatagcccacattttggcaagggcggacccttcccccacacagcccacttaagttagttggccctttagagttcaaacgctgtgacgattgaagatcgtttttctggcacgggagcgttgtgtggtattgcgcatggtacagtaatatgggattcatcaccactcagcgcgcgcggccaactgcatagtgacatataactgagagagacacccctgtgccgagcgccgacgctgttttgaacatatacggaacttttttgcattgcactacctcacacgacactatctgcgacaccacgataccacgataccctgaccacgccagaccgtccgatctttcaggtcgcatctgcattcccgagttcacactgcatagtaaacctgagatcgaggacgataacgacgacaacgcgatccgctcgtcttcttgttttaatgggctccgctggtgttttgagagatttgcgtgaatcagtttgagcggctcgggcaaaaaaacataaaacacttgtatcggtctccaaccaggcaatatttggcattgtctccaattttccgaagctgccgtggctccctgtcgccgatcaggaagcgactgagataccgatcgaggagatccccaatcctgtctccccgtgtgccgccgactcaagtccttcgaatcgtgacgtcccgatcgtgcatctacacatacacacacagagagtaatcactttgagctgagcgggagtgagatgcgacaggcacacacagcttcagcctttgtcactgggtgacatctaccctcttggaacccccgacacgtagttgcagtcgcagcccgcattttcgcatcccgtagcttacctgcattccgttctctatccttgttcgcaattatctcacagccttgctgctttgctcattctgccaggcccaagcgattgcgcagcgcaattactctatcgtgatcacgcgactatctcaggatggttgcgaaggccgcgccttctctcctcgcgagggcctgcctgctcttcggcatggtttctcttgtctccccagcatctgcaacggatgtggcgataacggctacagacagccttccacaaaacagcagcgacgtgaacctcaacatcattataaatactctacctcagccgtttccggtgctcaatctcacatcgaccctgggtactatgggaatcaaaatcgtaggagatttactgttcgtcgacgagaccaacttcactagtgtcgagaacgtcaccgatcccatcgtctatctatcttgcgatccgtcacccacgcttctatcacctaacgagaccctgaattctcttatcaataaccagcaaaagataccaaaagctattgttctctttagtacggtgaaacaaggttgtgacttggacgtttccggcaacttgtcctatgccaatttgtggaccgtgaccagcgtagaagaggctgccacggtcaaaatgcaagcccttgaaaaggctagcgtcagtctctaccgcaatggaacaatcaccgacccggatggtgatggtggtcaaggaggcccaggaagtacatcaccggtggctatgagcattctgtacagtatcacaggtctcatcaccctgcttttcttggttattatcgccaccggagcagtacgcgcacatcggcatcccgagcggtatggaccacgagcaggcacgaatggtagaccgaggcagagccgtgcgaagggaatcgctcgagccatgctcgaaaccctaccaatcgtgaagtttggagagtcggacaacaagaaacccgacgaggaacatggtgacgatgcgtcttcagaagaacatgaactgcgagagaacccggaagttttggtcacggatccatcaggcaatgccgctcacccgaggagttcgactgatgcagcaacacagagcagcccatcgacagcaaacccggatgctacgactgccacgacagcaaccgctgcacaggccccaaataatcaatctgagactggagatggacatctgggctgctcaatttgtacagaagattttacaaagggtgaggacgttcgagtgttaccttgtaaccacaaataccacccagcgtgtgtcgatccttggcttgttaacgtttctgggacatgtcctctatgtcgtcttgatcttcgacctccagaagtcattgcagcagaagcagagcgggaagaacgacgccgagctcgtctcgctggtgccgtagaagatgcacccgcgactgatgacgcggcgacagccaccgatgatcatctggccccgcctgccgaaggagaaccagcggctgagggcaatgattcaacacaccgacgtcgcagatcaagacttctagattggaatcgactacgtcatgcaccagtagatgagcgcatcaatgcattacgcgagtaccgacaatcacaacaagattctgctactggggacaacgaacgccgacactctagactgacggatcggattagaggcagattccatcgaagagccgagtcaagcaatggtaatcagccatcagagactccagaggcttcaagtccacctgctacttcatcgtgagaatggagattccggatatagcagatatggatgaggcacctgttatgctttcaatttcttttgaaggtcaatcaatgattgcctgtgggactttatatagttgggtgttttgatcatgatgtgatggtacaggatgacatggcatggtatggtacggtatgcattagcgggcgttcaacggacgacaaggtttccaagcatgacatgacgattttgatgtctggagtttggggtgtttgtcatattacaagtggatcagttgttgcaaagactgttagtaaatagggctttcgcggtacatatcagacgctgcatcttctccaagttggcgctgtatcatagaattggccatttcgagcaaattgaatatatttttgtcaacacttctgtacctattttcctccgagtccaattcctcttgacatcctggcccagccgttgtcgatagcatcggaaacggttcacaacgctggatgagattattacccgcgacaaatgacacagatgtctctgatgagatcatcatgcgcttgagggagcaggtgcaataggcttgggctcaggcacccagtccaatgttgctgatgtagcatggacgaagaggtcttgcaagggactatcgcaatatcagcattaccccgttccactgtattaaactgcagataacttctatagaggactatagggaaggcgagtaggaacacatacctagccatcttattccccatcacgagattgtgcgggaatccgggatcgaaaggcgctgccgcctcaatctcat

SEQ ID NO: 13802 - DNA, 1218 bp, Muscodor strobelii
  misc_feature: SGI cDNA ID NO. 564534
  misc_feature: Encodes the peptide sequence at SEQ ID NO 13803
atgtctgaggttaagaaatccgcattttttgtacttgcgccggcgcccgtcggaccgctgaatcgataccggttgttgtcgccgacagccgctgtgagagtcagcccactatgtcttggggcaatgaactttggtgatgcttggacccatgatatgggagagtgtagccaggagactgccgaggggatcatggacttctacttcgaacaggtgaggaggtccgtatcacgaaaacggagctcgtcgagcaatgcagcttatgagactataggaaacttcatcgacacggcgaacaattaccagttccaagagtcagagagatggatcggcgaatggatgaagaaacgtggtaatcgggatcagatcgttctggcaacgaaatacacaacaaatttcagagccggtccaactgcctctcatcttatggcgaactacagcggaaacggtacgaagagcatggtcctctcggtggagcagagtctcgagaatctgcaaactaactatattgatattctgtacgtccactggtgggactactcgacatcaattccagagctcatgcaatctctcaatcaactcgtcatctcgggcaaagtcctttatctaggagtcagcgacacgcccgcatgggtcgtcagccgcgcaaacgaatacgcccgacaaaacggtctgcgtcaattcagcgtataccaagggatgtggtccgcggccctgcgtgacatagagcgagacgtcatccccatgtgcaaagccgagggcatggcactcatacccttcggcgtcatgggatccggccgcttcaagaccaaagaagagcgcgctgctgatccgggacgcaccagagagacgagcgagaccgagcgggccgtcgctgatgtactgggagctatcgcaaaaagaaaaggcggcgaaatgactgcgttgagtgttgcgcttgcttatgtttttcataaggcgccttatgtattccccgtcatcggcggtcgtaagatcgagcacctcaagggcaacattgctgctctcaccttgagcctgaccccagaagagatagatgagattgaggcggcagcgcctttcgatcccggattcccgcacaatctcgtgatggggaataagatggctagtcccttgcaagacctcttcgtccatgctacatcagcaacattggactgggtgcctgagcccaagcctattgcacctgctccctcaagcgcatga

SEQ ID NO: 13803 - protein, 405 aa, Muscodor strobelii
  misc_feature: SGI Peptide ID NO. 564534
  misc_feature (28)..(358): Pfam Id: PF00248 Pfam Desc: Aldo/keto reductase family
  misc_feature (92)..(358): Pfam Id: PF00248 Pfam Desc: Aldo/keto reductase family
  misc_feature (12)..(401): NCBI GI: 256727425 Blast Desc: NECHADRAFT_58032 [Nectria haematococca mpVI 77-13-4]
  misc_feature (12)..(401): NCBI GI: 164423792 Blast Desc: norsolorinic acid reductase [Neurospora crassa OR74A] gi|157070233|gb|EAA32737.2| norsolorinic acid reductase [Neurospora crassa OR74A]
  misc_feature (12)..(396): NCBI GI: 261353083 Blast Desc: norsolorinic acid reductase [Verticillium albo-atrum VaMs.102]
  misc_feature (12)..(398): NCBI GI: 145613357 Blast Desc: MGG_01713 [Magnaporthe grisea 70-15] gi|145020443|gb|EDK04572.1| MGG_01713 [Magnaporthe grisea 70-15]
  misc_feature (10)..(400): NCBI GI: 154303677 Blast Desc: BC1G_08723 [Botryotinia fuckeliana B05.10] gi|150854517|gb|EDN29709.1| BC1G_08723 [Botryotinia fuckeliana B05.10]
  misc_feature (13)..(396): NCBI GI: 46123679 Blast Desc: FG06217.1 [Gibberella zeae PH-1]
  misc_feature (17)..(369): NCBI GI: 189206311 Blast Desc: norsolorinic acid reductase [Pyrenophora tritici-repentis Pt-1C-BFP] gi|187975583|gb|EDU42209.1| norsolorinic acid reductase [Pyrenophora tritici-repentis
  misc_feature (8)..(400): NCBI GI: 145240867 Blast Desc: An08g09700 [Aspergillus niger] gi|134077604|emb|CAK96748.1| protein product [Aspergillus niger]
  misc_feature (13)..(400): NCBI GI: 242796863 Blast Desc: aldo/keto reductase, [Talaromyces stipitatus ATCC 10500] gi|218719480|gb|EED18900.1| aldo/keto reductase, [Talaromyces stipitatus ATCC 10500]
  misc_feature (10)..(399): NCBI GI: 156049339 Blast Desc: SS1G_08376 [Sclerotinia sclerotiorum 1980] gi|154692775|gb|EDN92513.1| SS1G_08376 [Sclerotinia sclerotiorum 1980]
  misc_feature (11)..(400): SWISSPROT Homolog: EC 1.1.1.91 Aryl-alcohol dehydrogenase (NADP(+))
MSEVKKSAFFVLAPAPVGPLNRYRLLSPTAAVRVSPLCLGAMNFGDAWTHDMGECSQETAEGIMDFYFEQVRRSVSRKRSSSSNAAYETIGNFIDTANNYQFQESERWIGEWMKKRGNRDQIVLATKYTTNFRAGPTASHLMANYSGNGTKSMVLSVEQSLENLQTNYIDILYVHWWDYSTSIPELMQSLNQLVISGKVLYLGVSDTPAWVVSRANEYARQNGLRQFSVYQGMWSAALRDIERDVIPMCKAEGMALIPFGVMGSGRFKTKEERAADPGRTRETSETERAVADVLGAIAKRKGGEMTALSVALAYVFHKAPYVFPVIGGRKIEHLKGNIAALTLSLTPEEIDEIEAAAPFDPGFPHNLVMGNKMASPLQDLFVHATSATLDWVPEPKPIAPAPSSA

SEQ ID NO: 13804 - DNA, 157 bp, Muscodor strobelii
  misc_feature: SGI EST ID NO. CUFF.33026.0
  misc_feature: Variant of the nucleotide sequence at SEQ ID NO 13802
ctatattgatattctgtacgtccactggtgggactactcgacatcaattccagagctcatgcaatctctcaatcaactcgtcatctcgggcaaagtcctttatctaggagtcagcgacacgcccgcatgggtcgtcagccgcgcaaacgaatacgcc

SEQ ID NO: 13805 - DNA, 612 bp, Muscodor strobelii
  misc_feature: SGI cDNA ID NO. 564535
  misc_feature: Encodes the peptide sequence at SEQ ID NO 13806
atgcctcgatcttccgcaacgtcgcatcagactggcggctcaggccagtctggaggaggttcaggcaggcgcaaaaagcgacccagtaggttcagagatgagtccggtaaccctatctgtggcaaatgcttgaagaaattggagaaagggtcgacaggatactgcggcgatccgtgtcgcctcgcagtgcaacaggaccggttagatgaggaggaggcaagcaacggacagaaaaaggtggatagcgcacagccagcaagccttcagagagccatggaagggccaccgccaattctacaggcacctctagtccgcgtgccagctgggcccccagctgctggtagtccgctccgagcaccagatatatcatataggtcagcatcatatgtaatgaacctcaatgcgcaaactacatcgacatcgcagaatgtcgttacatatgatgaggctttacaggccgcacgtaacgtgggccgtggtggaaactatacgtcgcactcttatcagtattacgacagcccaaatcagggacagggcggttattacgacgacccgaatcagggacagggtgattattacgacaatctaaatcagggacagggcggttattaa

SEQ ID NO: 13806 - protein, 203 aa, Muscodor strobelii
  misc_feature: SGI Peptide ID NO. 564535
MPRSSATSHQTGGSGQSGGGSGRRKKRPSRFRDESGNPICGKCLKKLEKGSTGYCGDPCRLAVQQDRLDEEEASNGQKKVDSAQPASLQRAMEGPPPILQAPLVRVPAGPPAAGSPLRAPDISYRSASYVMNLNAQTTSTSQNVVTYDEALQAARNVGRGGNYTSHSYQYYDSPNQGQGGYYDDPNQGQGDYYDNLNQGQGGY

SEQ ID NO: 13807 - DNA, 981 bp, Muscodor strobelii
  misc_feature: SGI cDNA ID NO. 564536
  misc_feature: Elevated expression when VOC is produced
  misc_feature: Encodes the peptide sequence at SEQ ID NO 13808
atgacgtcaacagcaccagcatacaccacacatgcccacgcggtatctcaaacatcgctcaccagtaccctaccaccggagtatacagaatacgacactaaagacggccatctcgcacctccaggcgccgcgcgctccaggtcatcatcaacatcatccgccaacgcgcccgtatcctcaggcccattcacaccaacctcacagctacaaatcgaagcccagggctcgtcatgcgcactcacctgttacggcggaaacacaccaatctacagcatatcgccctccggcggcctgggacccctagcatacctcaacgtccggccccaacggcggtccaattcctgctatctcacactagccgatgaccccaccgagacgccaatcacccgcacaacataccgcttcgggcccggtcgacccccagtcatcgaactcagtgatcccgtccggggtgtaagtctccccggtaaaggcacagacgtcgatgtgcacgaggctaagaccaggggcgccttcgaggtccacggtacttctgtctggagccgaagcataaccttcgaagtgcccggtctcgggaccttcggctggcgatacgccggatccacggagaagaaagaatgggatgccaagtctcttctagtatgcgagatcttcgatgaagtgtaccagggcaacgacggagcggctggcttctgtacacctaagaagtcgtttgcgtctaaactcggacttggctcttcgaaggaaaaggagtctgggaggacgagaatcgcgcagcttattagaaactcagagttcagaacgccgggctcgaacagaatgagctcggggaatggaggaaggctgatgatggatttgactgcgttcgaggagaaggaacaggagagagttaggcagttggtttgcacgacggcgttgacgatgcttaagagggaggttgagaggaatcagcaaactactgttgttgttgttactgcctag

SEQ ID NO: 13808 - protein, 326 aa, Muscodor strobelii
  misc_feature: SGI Peptide ID NO. 564536
  misc_feature (2)..(324): NCBI GI: 256734622 Blast Desc: NECHADRAFT_75082 [Nectria haematococca mpVI 77-13-4]
  misc_feature (15)..(317): NCBI GI: 46105368 Blast Desc: FG00312.1 [Gibberella zeae PH-1]
  misc_feature (49)..(325): NCBI GI: 169777517 Blast Desc: [Aspergillus oryzae RIB40] gi|83771961|dbj|BAE62091.1| protein product [Aspergillus oryzae]
  misc_feature (49)..(325): NCBI GI: 238494674 Blast Desc: conserved [Aspergillus flavus NRRL3357] gi|220695223|gb|EED51566.1| conserved [Aspergillus flavus NRRL3357]
  misc_feature (15)..(317): NCBI GI: 116204959 Blast Desc: CHGG_10363 [Chaetomium globosum CBS 148.51] gi|88176491|gb|EAQ83959.1| CHGG_10363 [Chaetomium globosum CBS 148.51]
  misc_feature (63)..(326): NCBI GI: 70992425 Blast Desc: conserved [Aspergillus fumigatus Af293] gi|66848694|gb|EAL89023.1| conserved [Aspergillus fumigatus Af293]
  misc_feature (40)..(324): NCBI GI: 258566085 Blast Desc: [Uncinocarpus reesii 1704] gi|237907488|gb|EEP81889.1| [Uncinocarpus reesii 1704]
  misc_feature (31)..(324): NCBI GI: 226292044 Blast Desc: conserved [Paracoccidioides brasiliensis Pb18]
  misc_feature (31)..(324): NCBI GI: 226282788 Blast Desc: conserved [Paracoccidioides brasiliensis Pb01]
  misc_feature (31)..(324): NCBI GI: 225681242 Blast Desc: conserved [Paracoccidioides brasiliensis Pb03]
  misc_feature: Useful for introducing or modulating the production of volatile compounds
MTSTAPAYTTHAHAVSQTSLTSTLPPEYTEYDTKDGHLAPPGAARSRSSSTSSANAPVSSGPFTPTSQLQIEAQGSSCALTCYGGNTPIYSISPSGGLGPLAYLNVRPQRRSNSCYLTLADDPTETPITRTTYRFGPGRPPVIELSDPVRGVSLPGKGTDVDVHEAKTRGAFEVHGTSVWSRSITFEVPGLGTFGWRYAGSTEKKEWDAKSLLVCEIFDEVYQGNDGAAGFCTPKKSFASKLGLGSSKEKESGRTRIAQLIRNSEFRTPGSNRMSSGNGGRLMMDLTAFEEKEQERVRQLVCTTALTMLKREVERNQQTTVVVVTA

SEQ ID NO: 13809 - DNA, 1698 bp, Muscodor strobelii
  misc_feature: SGI EST ID NO. CUFF.33061.0
  misc_feature: Variant of the nucleotide sequence at SEQ ID NO 13807
cgccaatctatccgatctcagtaaagcgcctatcttggcgcacgctagcaatcagccttgccgtgcaaagtcttggccatttgttcgaccagttaaggaatacggcgtgtttcgagacccaacctgcaaaactaggcgcaaatgttgcacgatgatgcaaagcttcttgttcaacttcgcccatcgccatccccgtgcattgttcagtcttctgaattgactggctaataggtaaattgtagggtccacggcacatggctgcctatcattacttacatcttatttcctattacggtaaaaatctcatggtcgagttgggatgggcgatcgatgttggaccttcacgtcatggcttagagaaggcgtcgaatgatgagtatatagacacagcatagtcctgataatcatcttctcctttcgtggtatatcatcagtctatagataaattcatcgatctcaaatacaaagaaaaaccttttgtcacttactgattgacaaacaacatctcaccctcacgcccatcccaccaaatccacccttaacaccttcacaatgacgtcaacagcaccagcatacaccacacatgcccacgcggtatctcaaacatcgctcaccagtaccctaccaccggagtatacagaatacgacactaaagacggccatctcgcacctccaggcgccgcgcgctccaggtcatcatcaacatcatccgccaacgcgcccgtatcctcaggcccattcacaccaacctcacagctacaaatcgaagcccagggctcgtcatgcgcactcacctgttacggcggaaacacaccaatctacagcatatcgccctccggcggcctgggacccctagcatacctcaacgtccggccccaacggcggtccaattcctgctatctcacactagccgatgaccccaccgagacgccaatcacccgcacaacataccgcttcgggcccggtcgacccccagtcatcgaactcagtgatcccgtccggggtgtaagtctccccggtaaaggcacagacgtcgatgtgcacgaggctaagaccaggggcgccttcgaggtccacggtacttctgtctggagccgaagcataaccttcgaagtgcccggtctcgggaccttcggctggcgatacgccggatccacggagaagaaagaatgggatgccaagtctcttctagtatgcgagatcttcgatgaagtgtaccagggcaacgacggagcggctggcttctgtacacctaagaagtcgtttgcgtctaaactcggacttggctcttcgaaggaaaaggagtctgggaggacgagaatcgcgcagcttattagaaactcagagttcagaacgccgggctcgaacagaatgagctcggggaatggaggaaggctgatgatggatttgactgcgttcgaggagaaggaacaggagagagttaggcagttggtttgcacgacggcgttgacgatgcttaagagggaggttgagaggaatcagcaaactactgttgttgttgttactgcctagacgggttgagaagtatatgggatggtcggagagcgagcgggggaagaggtctggttcgttgtgtattgagagtgatgcatgtagtggaaatacccttttgttgttagatttgtttcctggaatgttagaaggtttactacgtatgacttttcaatctatacgatg

SEQ ID NO: 13810 - DNA, 1365 bp, Muscodor strobelii
  misc_feature: SGI cDNA ID NO. 564537
  misc_feature: Encodes the peptide sequence at SEQ ID NO 13811
atggaccctctagacttcacgcagtctgcaccgctccctatactgactctcgagaacggcaatactgatttcgactatggggcgtaccttcaggaagatgatatcgactatctcgccgactctggctcgtcaggctcagtcacagccatgaacgaggctccctcgcctgacgtttccccgcttgcttcttctgtcatcaagcaagtcaattctcaaaaaccaagattagaaaggaggggtcacacaaagagtcgtcgtggatgctacaactgcaagagaaggaggatcaagtgtcaagagacgctccccgcgtgtggccactgcgtaaagacgggcctgaagtgcgaatacccaattgctcctcaagtgacgcatcaaccgcaacatcagataccactcttcagcttgcaggatatgcggttcttccaacacttcctacttgcatgctatccccatcatcccctagggaatcgctcggtctggacacatgatataccatgtctatcacagaatgtgatgcacgcaatcctaggtctcgccgcctccgacctaatgacccaagacccaagtctcgtaacattcgcaatggggcaccgtctaaaagccataaaagcaatcaagaagaccctaacagacgtatcaaaacgcaatgcctttgaagaaggcaacgccctaatcgcgacctgctacgcgctcaccttccaatcagtctgtctcgacgacgggatggcggaattcatgacgttctgccgcgggatcgtcatcgttgctatccagatgtactgcaaaggagcaaagttcatgttcgcgaacctgatggaaacggatgagctgacgatcttgcggccattaatggaggcactaccgccaattaggagtgattggacagatatggcgattgctgccatcgcggagctagagccgctatgtcaggagcaggttgagattgattatcagagatttctggcagatatcgctaaggaactttatacgagtccttttagagcgtatcaagttctctgcaaacattatggatggtggatgcaaatcccgcacgaagacttccgacacgtaatcgactcggagaaccaagtctgtctgctcctcgcctcacactggatagcactcaagcagatcatggcaacgatcaccgagacggaacatcaagccaagaacgaagagaggcgaaaagagggcgatgcggatctcggcatgataagatggctgaggtatctaaaccgacagatcgatatacagcatcaagagtataatcaatggcctctgtgggtcgagcagcagttggatgttagtatgggctattttggcaagatgtgcggcgggatcaaacaattgggctcggggtag

SEQ ID NO: 13811 - protein, 454 aa, Muscodor strobelii
  misc_feature: SGI Peptide ID NO. 564537
  misc_feature (86)..(124): Pfam Id: PF00172 Pfam Desc: Fungal Zn(2)-Cys(6) binuclear cluster domain
  misc_feature (21)..(445): NCBI GI: 46105370 Blast Desc: FG00313.1 [Gibberella zeae PH-1]
  misc_feature (4)..(444): NCBI GI: 256734621 Blast Desc: NECHADRAFT_90227 [Nectria haematococca mpVI 77-13-4]
  misc_feature (1)..(443): NCBI GI: 261358600 Blast Desc: conserved [Verticillium albo-atrum VaMs.102]
  misc_feature (1)..(443): NCBI GI: 116204957 Blast Desc: CHGG_10362 [Chaetomium globosum CBS 148.51] gi|88176490|gb|EAQ83958.1| CHGG_10362 [Chaetomium globosum CBS 148.51]
  misc_feature (15)..(307): NCBI GI: 171689050 Blast Desc: protein product [Podospora anserina] gi|170944487|emb|CAP70598.1| protein product [Podospora anserina]
  misc_feature (42)..(441): NCBI GI: 238914587 Blast Desc: Gal4-like transcriptional regulator [Beauveria bassiana]
  misc_feature (54)..(428): NCBI GI: 256733799 Blast Desc: NECHADRAFT_67015 [Nectria haematococca mpVI 77-13-4]
  misc_feature (68)..(448): NCBI GI: 119483104 Blast Desc: NFIA_027570 [Neosartorya fischeri NRRL 181] gi|119409735|gb|EAW19683.1| conserved [Neosartorya fischeri NRRL 181]
  misc_feature (61)..(436): NCBI GI: 164426624 Blast Desc: NCU03931 [Neurospora crassa OR74A] gi|11289949|pir||T49729 zinc finger protein 1 homolog [imported] - Neurospora crassa gi|40882346|emb|CAF06168.1| conserved crassa]
  misc_feature (77)..(380): NCBI GI: 70985817 Blast Desc: C6 transcription factor [Aspergillus fumigatus Af293] gi|66846043|gb|EAL86376.1| C6 transcription factor, [Aspergillus fumigatus Af293] gi|159128450|gb|EDP53565.1| C6 transcription
MDPLDFTQSAPLPILTLENGNTDFDYGAYLQEDDIDYLADSGSSGSVTAMNEAPSPDVSPLASSVIKQVNSQKPRLERRGHTKSRRGCYNCKRRRIKCQETLPACGHCVKTGLKCEYPIAPQVTHQPQHQIPLFSLQDMRFFQHFLLACYPHHPLGNRSVWTHDIPCLSQNVMHAILGLAASDLMTQDPSLVTFAMGHRLKAIKAIKKTLTDVSKRNAFEEGNALIATCYALTFQSVCLDDGMAEFMTFCRGIVIVAIQMYCKGAKFMFANLMETDELTILRPLMEALPPIRSDWTDMAIAAIAELEPLCQEQVEIDYQRFLADIAKELYTSPFRAYQVLCKHYGWWMQIPHEDFRHVIDSENQVCLLLASHWIALKQIMATITETEHQAKNEERRKEGDADLGMIRWLRYLNRQIDIQHQEYNQWPLWVEQQLDVSMGYFGKMCGGIKQLGSG

SEQ ID NO: 13812 - DNA, 1470 bp, Muscodor strobelii
  misc_feature: SGI EST ID NO. CUFF.33068.0
  misc_feature: Variant of the nucleotide sequence at SEQ ID NO 13810
tgagtacgtttcgatagcattctccacaagccacgctgtactgagtatgcaggtggaggcatcaagcgacaggctcctctcattgaccgagacccaaaccaaattcactgacatatctccaacgcagtgcacgcaatcctaggtctcgccgcctccgacctaatgacccaagacccaagtctcgtaacattcgcaatggggcaccgtctaaaagccataaaagcaatcaagaagaccctaacagacgtatcaaaacgcaatgcctttgaagaaggcaacgccctaatcgcgacctgctacgcgctcaccttccaatcagtctgtctcgacgacgggatggcggaattcatgacgttctgccgcgggatcgtcatcgttgctatccagatgtactgcaaaggagcaaagttcatgttcgcgaacctgatggaaacggatgagctgacgatcttgcggccattaatggaggcactaccgccaattaggagtgattggacagatatggcgattgctgccatcgcggagctagagccgctatgtcaggagcaggttgagattgattatcagagatttctggcagatatcgctaaggaactttatacgagtccttttagagcgtatcaagttctctgcaaacattatggatggtggatgcaaatcccgcacgaagacttccgacacgtaatcgactcggagaaccaagtctgtctgctcctcgcctcacactggatagcactcaagcagatcatggcaacgatcaccgagacggaacatcaagccaagaacgaagagaggcgaaaagagggcgatgcggatctcggcatgataagatggctgaggtatctaaaccgacagatcgatatacagcatcaagagtataatcaatggcctctgtgggtcgagcagcagttggatgttagtatgggctattttggcaagatgtgcggcgggatcaaacaattgggctcggggtagaatgagcaatggcctagtgggacgggtgaaggtgtcttatgattcacggtcgatcgggcgagttttgataccattttgcttcattggtttgcgcctgattgatcgggcttgtattagtactattataccacctcggcatcaatgtgtgtttttgatgaattattcaagtctatctagttactgtatacaacgctctttgggcgttgggcgattgcctacagaccttatgaatacataccgggccgcagtgttgtcaccgtgggcgtgtgttatatcaactacatgtatactcgttgcgtccttcctttctaccctcatattcattgattggcctctattcagatatgggtgtcgaaacagatgacacattgcttaattgcctgaaaacgataacaagatgctttcaatttgccaattatgctgatttcatggattgatcagctttttgctgtcgttcctgaacagatccctacaatacacgtgggcgagagtgat

SEQ ID NO: 13813 - DNA, 1281 bp, Muscodor strobelii
  misc_feature: SGI cDNA ID NO. 564538
  misc_feature: Reduced expression when VOC is produced
  misc_feature: Encodes the peptide sequence at SEQ ID NO 13814
atggtttccaagatcattcctgcagcccttgtcgctgccgccaccgtcaagcaggccgctgctgcccacggccaccaacaccgccatgccgacaagcgggagatccactgggctgagacggacaccgtcgtcgtcaccgactggtacaccgtctatgtgactgccggcgccgagacggtcactgctgctgatgtttccactgccaagaagcctcaccaccatcagaagcccacgactacctctgaggagcccaccaccacgacgactttgacttcgtctgtcttcacgacgaccaccgtgttgttgtcgagtgcagaggagcctgccccgtcgagctcgtcgtcctcatcttcgtccactcccgttgtcgttgtgcccacgaccacgcaagcgcccactgtccaggctccggccccgacgacgttggtcacctcatccatccagcccactgttgctgatgtcaccacgaccaccactcccgccccggctcccaccactaccagcaccagcgctgctagcagccccaccagcggaagtggaagcagtggcagctccagtggtggcaagcgtggtcttgtctttactgaccctagcctcgttactgagtacctctctctcggtggagaggcttactgggcttacaactgggcgccctctgccaacggcctcgacgactcgattccttactatcccatgctttggggaactgacccgaaccacaccaacggtttcgaggaagccgcacagaaggctattgccagcagtgacggtgctttgttgagcttcaacgagcccgatattgatacccaggccaacatgagccctgctgccgctgcctctgctcaccaggagtggttgaacaagtactctggtcaagtccgcatcagcgcccccgccatttccagcagcgaggaccccaacaagggccttgactggttctcgcagtggaaggatcaatgcaacggtaactgtgccttcgacttctgcgccggtcactggtacggccctggcgaccagtctggcgctgagttgttcctcgactgggtcggccgattcatcaacgcctgcgacggcaagaaagtctggatcaccgagttccaggccactggcggtgacgttagcgctttcctcgaccacgccatgaagcagatggataccaacagctccttcgccgccgttgagaagtactcgtacttctatctgtctgagggattcctgttcgactcggccactacgctcagctcctacggttccctctatgccggtcttacctcgttgtaa

SEQ ID NO: 13814 - protein, 426 aa, Muscodor strobelii
  misc_feature: SGI Peptide ID NO. 564538
  misc_feature (1)..(421): NCBI GI: 39946646 Blast Desc: MGG_08577 [Magnaporthe grisea 70-15] gi|145012435|gb|EDJ97091.1| MGG_08577 [Magnaporthe grisea 70-15]
  misc_feature (54)..(421): NCBI GI: 85077644 Blast Desc: NCU01720 [Neurospora crassa OR74A] gi|8218273|emb|CAB92700.1| conserved [Neurospora crassa] gi|28917076|gb|EAA26798.1| [Neurospora crassa OR74A]
  misc_feature (177)..(421): NCBI GI: 116204951 Blast Desc: CHGG_10359 [Chaetomium globosum CBS 148.51] gi|88176487|gb|EAQ83955.1| CHGG_10359 [Chaetomium globosum CBS 148.51]
  misc_feature (189)..(421): NCBI GI: 223973473 Blast Desc: [Zea mays]
  misc_feature (1)..(421): NCBI GI: 261358599 Blast Desc: conserved [Verticillium albo-atrum VaMs.102]
  misc_feature (189)..(421): NCBI GI: 256735350 Blast Desc: NECHADRAFT_98877 [Nectria haematococca mpVI 77-13-4]
  misc_feature (189)..(421): NCBI GI: 46105372 Blast Desc: FG00314.1 [Gibberella zeae PH-1]
  misc_feature (191)..(421): NCBI GI: 171689052 Blast Desc: protein product [Podospora anserina] gi|170944488|emb|CAP70599.1| protein product [Podospora anserina]
  misc_feature (188)..(401): NCBI GI: 261199548 Blast Desc: conserved [Ajellomyces dermatitidis SLH14081] gi|239594383|gb|EEQ76964.1| conserved [Ajellomyces dermatitidis SLH14081] gi|239615548|gb|EEQ92535.1| conserved [Ajellomyces
  misc_feature (185)..(421): NCBI GI: 225557536 Blast Desc: conserved [Ajellomyces capsulatus G186AR]
  misc_feature: Useful for introducing or modulating the production of volatile compounds
MVSKIIPAALVAAATVKQAAAAHGHQHRHADKREIHWAETDTVVVTDWYTVYVTAGAETVTAADVSTAKKPHHHQKPTTTSEEPTTTTTLTSSVFTTTTVLLSSAEEPAPSSSSSSSSSTPVVVVPTTTQAPTVQAPAPTTLVTSSIQPTVADVTTTTTPAPAPTTTSTSAASSPTSGSGSSGSSSGGKRGLVFTDPSLVTEYLSLGGEAYWAYNWAPSANGLDDSIPYYPMLWGTDPNHTNGFEEAAQKAIASSDGALLSFNEPDIDTQANMSPAAAASAHQEWLNKYSGQVRISAPAISSSEDPNKGLDWFSQWKDQCNGNCAFDFCAGHWYGPGDQSGAELFLDWVGRFINACDGKKVWITEFQATGGDVSAFLDHAMKQMDTNSSFAAVEKYSYFYLSEGFLFDSATTLSSYGSLYAGLTSL

SEQ ID NO: 13815 - DNA, 2253 bp, Muscodor strobelii
  misc_feature: SGI EST ID NO. CUFF.33115.0
  misc_feature: Variant of the nucleotide sequence at SEQ ID NO 13813
agacatctcacctcatcccatcacctctgccgcctcccctcgtttcacctttccactccctttatatcgcttctccccctcgaccccagcggcttacgttctctaccacccagtgttcatcacgaactgttcgttgactttctttccaacccacattcctttcaccaggtcgccagcttcgaccctgctttcgtgcttcttcttcgtgtgcctgactcgcctcgcctgcttgcctgtgtcttgctgtttcgtgatacaacatccgtaaaacgctcacacaacgcacaaagaaccagtccgacgccgccaccaactgactgtaccactcgtcaatttccccgtcgaccgctctgtcattccttcagcgtcttcgatagactgcgcaaccacccccgcattgcattgcgcagaaacgagaaaacactccttcacccacgacgacctccgccctagacgagtcgtcttcactgtcctttgcgaactgctggcaccgcaacattcattactgagtatctctggaaagaaacaaacaatagaattcgattaccatcactatcactaccacacactccaagtcaactatccgaaaagaaactagatcaaaagtcacatccgtcatcatggtttccaagatcattcctgcagcccttgtcgctgccgccaccgtcaagcaggccgctgctgcccacggccaccaacaccgccatgccgacaagcgggagatccactgggctgagacggacaccgtcgtcgtcaccgactggtacaccgtctatgtgactgccggcgccgagacggtcactgctgctgatgtttccactgccaagaagcctcaccaccatcagaagcccacgactacctctgaggagcccaccaccacgacgactttgacttcgtctgtcttcacgacgaccaccgtgttgttgtcgagtgcagaggagcctgccccgtcgagctcgtcgtcctcatcttcgtccactcccgttgtcgttgtgcccacgaccacgcaagcgcccactgtccaggctccggccccgacgacgttggtcacctcatccatccagcccactgttgctgatgtcaccacgaccaccactcccgccccggctcccaccactaccagcaccagcgctgctagcagccccaccagcggaagtggaagcagtggcagctccagtggtggcaagcgtggtcttgtctttactgaccctagcctcgttactgagtacctctctctcggtggagaggcttactgggcttacaactgggcgccctctgccaacggcctcgacgactcgattccttactatcccatgctttggggaactgacccgaaccacaccaacggtttcgaggaagccgcacagaaggctattgccagcagtgacggtgctttgttgagcttcaacgagcccgatattgatacccaggccaacatgagccctgctgccgctgcctctgctcaccaggagtggttgaacaagtactctggtcaagtccgcatcagcgcccccgccatttccagcagcgaggaccccaacaagggccttgactggttctcgcagtggaaggatcaatgcaacggtaactgtgccttcgacttctgcgccggtcactggtacggccctggcgaccagtctggcgctgagttgttcctcgactgggtcggccgattcatcaacgcctgcgacggcaagaaagtctggatcaccgagttccaggccactggcggtgacgttagcgctttcctcgaccacgccatgaagcagatggataccaacagctccttcgccgccgttgagaagtactcgtacttctatctgtctgagggattcctgttcgactcggccactacgctcagctcctacggttccctctatgccggtcttacctcgttgtaaacggtgcaataccatgtatcagacttcttgtgtattaccattttaggggaacggccatatggctcgggatttgatctactttacttcatatgtacatagtttgacaaaaatcatttttcatcttcatttagggattggtaccacgccatctctcattcacacattttgggtttcacagccaggggactcagccactgagttttctttgcattggtgcaatgatgcatggctaagaaggatggatatgctgtgaggcataaaaaattagggaggatagaatcacgagatatgaataccatttgcaatttcaattgccgaactcgatggtttttctttgctttttgagtgacat

SEQ ID NO: 13816 - DNA, 1149 bp, Muscodor strobelii
  misc_feature: SGI cDNA ID NO. 564539
  misc_feature: Encodes the peptide sequence at SEQ ID NO 13817
atgtctcagacaacaccccctaccacaagtcctgacacatcaggcgccaagctactcgcgatcgaaggaagcgggctgccgcgaccgtctcgttctaatcgtaaggacgtaatctgcgctaagaccggcgaaattatcagcaggcgcgatggagtatccaagcctactagatgcttctttctgactgaagatgggtctttgaaatgggttggcgtcaatgctggagtcgttccgggtcatcattggtatcttcgaagccaggcctatcacgaccaacttgtatttccgcccttcccagcaggagagtggaacgtcggacagatccgccgtttcgataacggtgaggtcggtttcacggacacactgctcaatctgccatttggcggcatcaccaacgcctggcaccctacgaagatcgagtttagcgagtttgagatcatcagccaattcaacaaaggaaggatttggcatgtcaagcatcctcaattcggcgacaagcacatcattctgaagattgatccttgggacaactattactctcacatgaaaatggaaacggagacaagagtctacgagagaatcgccggtcagggtatcgccccagagttcctcggtcacgtaacataccgtggcgcgatccttggctttatcctcgagtggatcgagggagctacgtccaccaagagagcagacgcagatgcccgcgttgaggttgtaaagaagctccacgcactcaacatcactcacggaagtgcccatcgatataacttcttgaaaatcgatggcaaaatcttgatggtcgacttcgaggactccagattcgacgacagagctacagagaaatggaagaacgaagacatacgccgaattcgtaacatcaggaccgactgttatccctttgctagatgcatagtcaagcgcggggactactccgacgaggatgaaccgatcagaccgaatatctaccccttcttcgagtcgctagaagacgacgagatcgactggagtgaggattcggaggcgggcgaaattgaagacaagaaggatgaagctcttgaggagccggagaatgaggatgcgatcgattcagacgatccgagaaatgcgcgagactccgagtgggatgactcagatacctcggacgattaa

SEQ ID NO: 13817 - protein, 382 aa, Muscodor strobelii
  misc_feature: SGI Peptide ID NO. 564539
  misc_feature (94)..(277): NCBI GI: 115395842 Blast Desc: alpha-galactosidase A precursor [Aspergillus terreus NIH2624] gi|114193129|gb|EAU34829.1| alpha-galactosidase A precursor [Aspergillus terreus NIH2624]
  misc_feature (94)..(273): NCBI GI: 170089739 Blast Desc: [Laccaria bicolor S238N-H82] gi|164649352|gb|EDR13594.1| [Laccaria bicolor S238N-H82]
  misc_feature (60)..(272): NCBI GI: 256726110 Blast Desc: [Nectria haematococca mpVI 77-13-4]
  misc_feature (60)..(272): NCBI GI: 46111681 Blast Desc: FG02722.1 [Gibberella zeae PH-1]
  misc_feature (94)..(273): NCBI GI: 46110080 Blast Desc: FG01922.1 [Gibberella zeae PH-1]
  misc_feature (59)..(273): NCBI GI: 255952865 Blast Desc: Pc21g01140 [Penicillium chrysogenum Wisconsin 54-1255] gi|211588896|emb|CAP95011.1| Pc21g01140 [Penicillium chrysogenum Wisconsin 54-1255]
  misc_feature (52)..(273): NCBI GI: 255951665 Blast Desc: Pc23g00320 [Penicillium chrysogenum Wisconsin 54-1255] gi|211904220|emb|CAP79526.1| Pc23g00320 [Penicillium chrysogenum Wisconsin 54-1255]
  misc_feature (61)..(289): NCBI GI: 258569645 Blast Desc: [Uncinocarpus reesii 1704] gi|237903896|gb|EEP78297.1| [Uncinocarpus reesii 1704]
  misc_feature (94)..(273): NCBI GI: 238500357 Blast Desc: conserved [Aspergillus flavus NRRL3357] gi|220693166|gb|EED49512.1| conserved [Aspergillus flavus NRRL3357]
  misc_feature (94)..(273): NCBI GI: 169617574 Blast Desc: SNOG_11969 [Phaeosphaeria nodorum SN15] gi|111059261|gb|EAT80381.1| SNOG_11969 [Phaeosphaeria nodorum SN15]
MSQTTPPTTSPDTSGAKLLAIEGSGLPRPSRSNRKDVICAKTGEIISRRDGVSKPTRCFFLTEDGSLKWVGVNAGVVPGHHWYLRSQAYHDQLVFPPFPAGEWNVGQIRRFDNGEVGFTDTLLNLPFGGITNAWHPTKIEFSEFEIISQFNKGRIWHVKHPQFGDKHIILKIDPWDNYYSHMKMETETRVYERIAGQGIAPEFLGHVTYRGAILGFILEWIEGATSTKRADADARVEVVKKLHALNITHGSAHRYNFLKIDGKILMVDFEDSRFDDRATEKWKNEDIRRIRNIRTDCYPFARCIVKRGDYSDEDEPIRPNIYPFFESLEDDEIDWSEDSEAGEIEDKKDEALEEPENEDAIDSDDPRNARDSEWDDSDTSDD

SEQ ID NO: 13818 - DNA, 434 bp, Muscodor strobelii
  misc_feature: SGI EST ID NO. CUFF.33088.0
  misc_feature: Variant of the nucleotide sequence at SEQ ID NO 13816
gtccaccaagagagcagacgcagatgcccgcgttgaggttgtaaagaagctccacgcactcaacatcactcacggaagtgcccatcgatataacttcttgaaaatcgatggcaaaatcttgatggtcgacttcgaggactccagattcgacgacagagctacagagaaatggaagaacgaagacatacgccgaattcgtaacatcaggaccgactgttatccctttgctagatgcatagtcaagcgcggggactactccgacgaggatgaaccgatcagaccgaatatctaccccttcttcgagtcgctagaagacgacgagatcgactggagtgaggattcggaggcgggcgaaattgaagacaagaaggatgaagctcttgaggagccggagaatgaggatgcgatcgattcagacgatccgagaaatgcgc

SEQ ID NO: 13819 - DNA, 894 bp, Muscodor strobelii
  misc_feature: SGI cDNA ID NO. 564540
  misc_feature: Encodes the peptide sequence at SEQ ID NO 13820
atggcaagctcgaccatcaccacaccggctactatatccttgccggcgcaaacaactccattctatccaactgtatctacagacctctgtcggtcaccagaagtttattgtcctggcttcccgaccaatgccgcctgctatgctggcgatcttaatgacaataacggcacctacgacgacccaacagccgcttttccaggcactgcctgcccatcagcatggtcgcaagcctgcaccacgactatgaacctcgcgaacaacaatctaactcaaacttggtgctgtccctcagactacgcatgtccttcatcaggctgggagactctattcacaggtctgatcacaccaacgcgattctgcagcagtctcattcagtcctcagacttggtgtacttgaagaacggcactacgtcgtatacagcgcatatcttatccgagcccgtcacatcgccgtctggctcgagtagtaaattagagacagctttgtctttttatgctatcagacccgtattcccgcttcaaggaaacgaggcgtcttcagctagtcgctcaatcacggggagtcaattagctggggctatcgtgggagccatcgctggtcttgcactattcttagggatcatcttcttcctccgacggcacaagaaaaagcgaatagcagaattgagctcggagaacaatccggagaaagctacggagaaggctatagagaagcccgatgacgcagctgagctttcgcctatgactgagcttgcagagatgcagggctccaaagcgcgagcggagctcgattctccgcgcccggtgctggagatgcatgataatgttccgatggcagagcttcagggtgactcgccgccgtttgacaaggagcgcataggacaggcaatttga

SEQ ID NO: 13820 - protein, 297 aa, Muscodor strobelii
  misc_feature: SGI Peptide ID NO. 564540
  misc_feature (175)..(285): NCBI GI: 238507039 Blast Desc: conserved [Aspergillus flavus NRRL3357] gi|220689434|gb|EED45785.1| conserved [Aspergillus flavus NRRL3357]
  misc_feature (175)..(285): NCBI GI: 169786099 Blast Desc: [Aspergillus oryzae RIB40] gi|83776258|dbj|BAE66377.1| protein product [Aspergillus oryzae]
MASSTITTPATISLPAQTTPFYPTVSTDLCRSPEVYCPGFPTNAACYAGDLNDNNGTYDDPTAAFPGTACPSAWSQACTTTMNLANNNLTQTWCCPSDYACPSSGWETLFTGLITPTRFCSSLIQSSDLVYLKNGTTSYTAHILSEPVTSPSGSSSKLETALSFYAIRPVFPLQGNEASSASRSITGSQLAGAIVGAIAGLALFLGIIFFLRRHKKKRIAELSSENNPEKATEKAIEKPDDAAELSPMTELAEMQGSKARAELDSPRPVLEMHDNVPMAELQGDSPPFDKERIGQAI

SEQ ID NO: 13821 - DNA, 1110 bp, Muscodor strobelii
  misc_feature: SGI cDNA ID NO. 564541
  misc_feature: Encodes the peptide sequence at SEQ ID NO 13822
atggacgctccttctgagtgggatgtgacagtagcgaaagatcttctcagcaaatatttcgaaaaagatgagcagagacgattcgagctcgaaagcttcattgacgggggaatagagggagtagcctggaaagtcaagtatcgtttcgatggcgttcgtccgcatccagatgatcccgaccgggagatacctcctgagagtatcggtcgtattgttttaaaaacaagacggaatcgcgtagaacgtctccaaaataggaacccgatatttgcttccgctgggctggttccaccgccaccacaaatcagtcaagagcaagaagtgccggatgagccgtttccgactgttcgcgattatgatggagatgatctttactcggagcacaagttgttaagggcgcttcgaggggcaatgcacgtggtgaacggttttagaccaacaaatgatccgctagttctgaggattttcaccggcatggcttacccacccccaattgattcaccgaggcggcggccggagacaactccaagtacggtgcctcgcataggctactatcacaatgacttgcataacgaaaatttgatgtttggaaacttgtcgttgcgggaagaagaacaccgtcttgttcctatcttgaaagccatagatctaggtggtacgaatgagcttagaactgctgcacagcgccaaacggcagatcacgatgctatctgggatgtgggcacacacatgtattccttgataacactacaagaagacatcatggatagcaacgtacacccacatgatgggaatgacgagttcttcaaacgcatccgatggcccacggctagccaatctccggacgacgacaaatggacctgcgcagtcgctctattgccagacaacccgaatgacgttcctttccccagccttgatgataatatgcgaattttggtgtgtgcttgcatgtttcggacccgccgtgaaagaccagcattagccgatatattggcggcggttgaacagtgtagtcaatggggtgcggatcattacaacaacagcgctgaagaacaagacgcaaacatctcaagacttatacaaagactaatgctcgaccctccgaggtag

SEQ ID NO: 13822 - protein, 369 aa, Muscodor strobelii
  misc_feature: SGI Peptide ID NO. 564541
MDAPSEWDVTVAKDLLSKYFEKDEQRRFELESFIDGGIEGVAWKVKYRFDGVRPHPDDPDREIPPESIGRIVLKTRRNRVERLQNRNPIFASAGLVPPPPQISQEQEVPDEPFPTVRDYDGDDLYSEHKLLRALRGAMHVVNGFRPTNDPLVLRIFTGMAYPPPIDSPRRRPETTPSTVPRIGYYHNDLHNENLMFGNLSLREEEHRLVPILKAIDLGGTNELRTAAQRQTADHDAIWDVGTHMYSLITLQEDIMDSNVHPHDGNDEFFKRIRWPTASQSPDDDKWTCAVALLPDNPNDVPFPSLDDNMRILVCACMFRTRRERPALADILAAVEQCSQWGADHYNNSAEEQDANISRLIQRLMLDPPR

SEQ ID NO: 13823 - DNA, 969 bp, Muscodor strobelii
  misc_feature: SGI cDNA ID NO. 564542
  misc_feature: Encodes the peptide sequence at SEQ ID NO 13824
atggcgaccaaagccgaggtgcatcctggcgatcagcacgagataccagagttcgaggctcacgaatcattcgcatcgctgaaggagaggatcaagaaacactatgagattgcatccgattactactattcgctttggggacagcacattcatcatggatatttcaagtctccatcagataccaaagaagtggcacaagtcaatttgatcaactatcttctcgagatatctgacttacccactggcgggcgcattctcgatgtcggttgtggtattggcggaacttctcgcttcctagcgaaggaacatgcgtgcaatgtgacaggcatcaccatcagtggacgtcaggtggaaattgcaaagaagatcaccgattccgaactgacttcactcgaacgtgacacaacccagagtagcaatgcatatccatcgggaggcggctgcagcttcatcgagctcgacgctgagaaaatgctggagcactttaccaccgccggcaagctagccacgggctttgatggtgtgtggatttccgaggcactctcgcatttcccaaacaagccattattcttcaagtcggcatttgaattgatggcatccggcaagtctgcgcgactcgtcattgcggattggttcaaggcaccaaatttgtcaccagaacaggaaaaagcagacatcagcccaattgaagatggaatgcttctcccacctatctgtactgcagaccaatatctcgagatggcgcagcaagttggcttcaaagttcgtcaggcgccaattgatatcagcagcgacgtcgctaaaacctgggatatctcatgggcactagtctcgtcaccttcgttatggatgtttgctattgctcaaggacgcgacggccttgctttcctacaagcattccgtgcgatgaagaggggctatgcaaataagactttccagtatgcgatcatgtgtttcgaaaaaccgtga

SEQ ID NO: 13824 - protein, 322 aa, Muscodor strobelii
  misc_feature: SGI Peptide ID NO. 564542
  misc_feature (22)..(304): Pfam Id: PF02353 Pfam Desc: Cyclopropane-fatty-acyl-phospholipid synthase
  misc_feature (86)..(206): Pfam Id: PF08241 Pfam Desc: Methyltransferase domain
  misc_feature (54)..(122): Pfam Id: PF02353 Pfam Desc: Cyclopropane-fatty-acyl-phospholipid synthase
  misc_feature (86)..(122): Pfam Id: PF08241 Pfam Desc: Methyltransferase domain
  misc_feature (86)..(122): Pfam Id: PF08242 Pfam Desc: Methyltransferase domain
  misc_feature (12)..(321): NCBI GI: 164426537 Blast Desc: NCU04129 [Neurospora crassa OR74A] gi|157071375|gb|EAA32049.2| conserved [Neurospora crassa OR74A]
  misc_feature (12)..(321): NCBI GI: 16944422 Blast Desc: conserved [Neurospora crassa]
  misc_feature (12)..(321): NCBI GI: 39940678 Blast Desc: cyclopropane-fatty-acyl-phospholipid synthase, [Magnaporthe grisea 70-15] gi|145010866|gb|EDJ95522.1| cyclopropane-fatty-acyl-phospholipid synthase, [Magnaporthe
  misc_feature (12)..(321): NCBI GI: 256728975 Blast Desc: [Nectria haematococca mpVI 77-13-4]
  misc_feature (12)..(322): NCBI GI: 171693937 Blast Desc: protein product [Podospora anserina] gi|170946917|emb|CAP73721.1| protein product [Podospora anserina]
  misc_feature (12)..(321): NCBI GI: 46138453 Blast Desc: FG10741.1 [Gibberella zeae PH-1]
  misc_feature (12)..(274): NCBI GI: 116197961 Blast Desc: CHGG_07136 [Chaetomium globosum CBS 148.51] gi|88178415|gb|EAQ85883.1| CHGG_07136 [Chaetomium globosum CBS 148.51]
  misc_feature (22)..(281): NCBI GI: 154304596 Blast Desc: BC1G_08037 [Botryotinia fuckeliana B05.10] gi|150853937|gb|EDN29129.1| BC1G_08037 [Botryotinia fuckeliana B05.10]
  misc_feature (25)..(322): NCBI GI: 256392433 Blast Desc: Methyltransferase type 11 [Catenulispora acidiphila DSM 44928] gi|256358659|gb|ACU72156.1| Methyltransferase type 11 [Catenulispora acidiphila DSM 44928]
  misc_feature (28)..(322): NCBI GI: 149174327 Blast Desc: cyclopropane-fatty-acyl-phospholipid synthase family protein [Planctomyces maris DSM 8797] gi|148846872|gb|EDL61208.1| cyclopropane-fatty-acyl-phospholipid synthase family protein DSM
  misc_feature (23)..(322): SWISSPROT Homolog: EC 2.1.1.95 Tocopherol O-methyltransferase
MATKAEVHPGDQHEIPEFEAHESFASLKERIKKHYEIASDYYYSLWGQHIHHGYFKSPSDTKEVAQVNLINYLLEISDLPTGGRILDVGCGIGGTSRFLAKEHACNVTGITISGRQVEIAKKITDSELTSLERDTTQSSNAYPSGGGCSFIELDAEKMLEHFTTAGKLATGFDGVWISEALSHFPNKPLFFKSAFELMASGKSARLVIADWFKAPNLSPEQEKADISPIEDGMLLPPICTADQYLEMAQQVGFKVRQAPIDISSDVAKTWDISWALVSSPSLWMFAIAQGRDGLAFLQAFRAMKRGYANKTFQYAIMCFEKP

SEQ ID NO: 13825 - DNA, 1533 bp, Muscodor strobelii
  misc_feature: SGI EST ID NO. CUFF.33113.0
  misc_feature: Variant of the nucleotide sequence at SEQ ID NO 13823
aagaatttctcatcactgcacaactgtactcatctactgcaaatggtctgcctctttacttcaataggaatatgaagttagtctcaacgcacgagagaggggtcggggagctgaaacgcggcaatggaaccgatcgatgagatcagccgtccgtggttgtcaccatgccgtgatctagcactgactgaaaaggcaacttattaataccaacttggaaaatcctaatgttcgattacggggctatcgcctgagagatattgattataagccgagcatttgaataccaaatcagacgcagcatcttcgcagttatctcccgattatcctaatggcgaccaaagccgaggtgcatcctggcgatcagcacgagataccagagttcgaggctcacgaatcattcgcatcgctgaaggagaggatcaagaaacactatgagattgcatccgattactactattcgctttggggacagcacattcatcatggatatttcaagtctccatcagataccaaagaagtggcacaagtcaatttgatcaactatcttctcgagatatctgacttacccactggcgggcgcattctcgatgtcggttgtggtattggcggaacttctcgcttcctagcgaaggaacatgcgtgcaatgtgacaggcatcaccatcagtggacgtcaggtggaaattgcaaagaagatcaccgattccgaactgacttcactcgaacgtgacacaacccagagtagcaatgcatatccatcgggaggcggctgcagcttcatcgagctcgacgctgagaaaatgctggagcactttaccaccgccggcaagctagccacgggctttgatggtgtgtggatttccgaggcactctcgcatttcccaaacaagccattattcttcaagtcggcatttgaattgatggcatccggcaagtctgcgcgactcgtcattgcggattggttcaaggcaccaaatttgtcaccagaacaggaaaaagcagacatcagcccaattgaagatggaatgcttctcccacctatctgtactgcagaccaatatctcgagatggcgcagcaagttggcttcaaagttcgtcaggcgccaattgatatcagcagcgacgtcgctaaaacctgggatatctcatgggcactagtctcgtcaccttcgttatggatgtttgctattgctcaaggacgcgacggccttgctttcctacaagcattccgtgcgatgaagaggggctatgcaaataagactttccagtatgcgatcatgtgtttcgaaaaaccgtgatggtcgaatgtaaaatcaacagccttcagtctatcaagcttctgtagtagtgtgcgctatgcgtgaccatatctcatcttcaggtttgacaaagtagtgtttaaagactcacgactgtggggtaaacaattttaattgatatacgagaaacaaaaatataaacatattacaaactataaactataaacatactacgcttgagtctcgataacgccagcagttaaatgcaatttggc

SEQ ID NO: 13826 - DNA, 321 bp, Muscodor strobelii
  misc_feature: SGI cDNA ID NO. 564543
  misc_feature: Encodes the peptide sequence at SEQ ID NO 13827
atgctcaacctacaactcacgatgaacctgcttctccagctctgcctggcttcatgggccttcgctgctcccattgccgacgagaccttcaccacgactaacaattcatggcaagctggtaccggcggtggcatcatcggactgatcgttctgattctcgacattatagtatttgtcgaggtcttcaagtcgaatcgcccagtatcaagcaagcttatctggtgtctcgtcgtcttctttttccccattatcggaatgttgatctacttcttcttctcgaaccgaaaggcacacaacacctacgaaccccttcccgcctaa

SEQ ID NO: 13827 - protein, 106 aa, Muscodor strobelii
  misc_feature: SGI Peptide ID NO. 564543
  misc_feature (4)..(106): NCBI GI: 189206419 Blast Desc: conserved [Pyrenophora tritici-repentis Pt-1C-BFP] gi|187975637|gb|EDU42263.1| conserved [Pyrenophora tritici-repentis Pt-1C-BFP]
  misc_feature (11)..(105): NCBI GI: 169621564 Blast Desc: SNOG_13992 [Phaeosphaeria nodorum SN15] gi|111057497|gb|EAT78617.1| SNOG_13992 [Phaeosphaeria nodorum SN15]
  misc_feature (6)..(104): NCBI GI: 116194288 Blast Desc: [Chaetomium globosum CBS 148.51] gi|88179655|gb|EAQ87123.1| [Chaetomium globosum CBS 148.51]
  misc_feature (12)..(105): NCBI GI: 46102748 Blast Desc: FG00059.1 [Gibberella zeae PH-1]
  misc_feature (34)..(105): NCBI GI: 154314732 Blast Desc: BC1G_04075 [Botryotinia fuckeliana B05.10] gi|150848697|gb|EDN23890.1| BC1G_04075 [Botryotinia fuckeliana B05.10]
  misc_feature (34)..(100): NCBI GI: 156053333 Blast Desc: SS1G_06834 [Sclerotinia sclerotiorum 1980] gi|154704612|gb|EDO04351.1| SS1G_06834 [Sclerotinia sclerotiorum 1980]
  misc_feature (1)..(104): NCBI GI: 39972051 Blast Desc: [Magnaporthe grisea 70-15] gi|145019854|gb|EDK04082.1| [Magnaporthe grisea 70-15]
  misc_feature (12)..(104): NCBI GI: 256730013 Blast Desc: NECHADRAFT_104897 [Nectria haematococca mpVI 77-13-4]
  misc_feature (1)..(104): NCBI GI: 171691538 Blast Desc: protein product [Podospora anserina] gi|170945717|emb|CAP71830.1| protein product [Podospora anserina]
  misc_feature (44)..(100): NCBI GI: 159046386 Blast Desc: Dshi_3848 [Dinoroseobacter shibae DFL 12] gi|157914145|gb|ABV95576.1| conserved [Dinoroseobacter shibae DFL 12]
MLNLQLTMNLLLQLCLASWAFAAPIADETFTTTNNSWQAGTGGGIIGLIVLILDIIVFVEVFKSNRPVSSKLIWCLVVFFFPIIGMLIYFFFSNRKAHNTYEPLPA

SEQ ID NO: 13828 - DNA, 830 bp, Muscodor strobelii
  misc_feature: SGI EST ID NO. CUFF.33346.1
  misc_feature: Variant of the nucleotide sequence at SEQ ID NO 13826
ctcaccccctctctcttacgaatcaacattcctgatcccttttaatacagattgactcccgtacttctctctgcatattgttacatctccgactgtctctaagctatagacgtagttcgatacgaccgagtcgataccgcaaacatccgcaacaatgctcaacctacaactcacgatgaacctgcttctccagctctgcctggcttcatgggccttcgctgctcccattgccgacgagaccttcaccacgactaacaattcatggcaagctggtaccggcggtggcatcatcggactgatcgttctgattctcgacattatagtatttgtcgaggtcttcaagtcgaatcgcccagtatcaagcaagcttatctggtgtctcgtcgtcttctttttccccattatcggaatgttgatctacttcttcttctcgaaccgaaaggcacacaacacctacgaaccccttcccgcctaaatggaattgccaagtatcatcaagagagaggattactcctgtgtttggcaagatcagagagccaaggatcacaatgaaggacaaggctcttgaggacttgcgttgatctttcaggaaggatgagggtttcagtttttatggcgaaggcgtcaatgggcaacggcattgcatgatatgactctgtatcttgtcgagattagctagtacgggctctcgcgaggtcattttgatagttttcattaccttatgagacgacgataaccattactttctgcttacttccttcaagtctgtaaagcgattcgatgaacattagtcaaagtgcaacgcacgccaattcgtacgttgttagtcg

SEQ ID NO: 13829 - DNA, 1470 bp, Muscodor strobelii
  misc_feature: SGI cDNA ID NO. 564544
  misc_feature: Encodes the peptide sequence at SEQ ID NO 13830
atgtattatggggagtatactgaggccgctacatttgacgaaagcctcgctgtcacatcgtcatatgcccgagatgcgcttcttgaatccatccaaaccgacgcccctcctcgaccggtcatctttcgcgcttgggtggaggcatacatgacacatagcttccatcactgtccggtcctcgaacagcgggatctgtctgattcgctaccctccgtcgttttgcagaaagccatttcaatgatagcaaacctaacaagactcgacccacgtggtccgagaatcgcggccgaactgtacgagaggattaagatactgatctgtatgaactctgagttagagccggtattggtgttaaaggtactgtgtcttctggcactttggaatggtcggccctcgacaccggttagtgtcgatggaccatggcattggaccggtgttggcctgagactggcaatacaaatgggtcttcatcgagaatcgacgtacttggagcgagcggatgcaagttgtctccgcagaatgttctggtttctccgaaacagcgaaacattgtacgtctcgtgctggggatatccaccgcacttgcgaccccaagatttcgacgtcaacctgcctaccttagacgattttgctgttcacccctttcaagggacctggttcattgaaagctccaagctgtgtaggatcacggaccgtgtgtctaagctacaagtcgaaaggcgcccaataaacgatgaagagttctcggagattaaggcagcgctctgcgactggagcggttgtctgcccacagagcttcggctattcgacgcgaatgggaatagaaatacatattgtcgtgctgtttcggaactcgcaatacagtatttcgtggccatcgttcttggcgaattcttgaagtacacggagaatacgcgctcctaccagggtgttataacatcattgttggcagcgtcctgtggtaccgtgttatacgatgagatctactgccgagatgagtcggtggccctgccacaagtgcatggtttcttctgcttagcattgacgcttcctctcatctactacaagccgcagtcctcagcaaagatcgcatcgcgcaaaagagacatcgaagtactacgctctgttctgatggccatttccgaccgattcggcgatgggagactatacctccggatgattgaccaccttcaaagaagcgtggctgagactgcaacttcatccgaagctcgtgacagtgttcccgagccagaggcgtttctcgaagcccatcgtcttttcccatttcctcgtacattttgcgattatatggatctgctggagccatctgctgagggtgatgatcttttctcttggggcgactgggctgcgccaatgcctgataatgatgcatttgactttacctggttggacgcatttggtttgggtcctgacaacatagatatcgacttcagtggtaacgttggataa

SEQ ID NO: 13830 - protein, 489 aa, Muscodor strobelii
  misc_feature: SGI Peptide ID NO. 564544
  misc_feature (111)..(210): Pfam Id: PF04082 Pfam Desc: Fungal specific transcription factor domain
  misc_feature (141)..(210): Pfam Id: PF04082 Pfam Desc: Fungal specific transcription factor domain
  misc_feature (80)..(481): NCBI GI: 242769278 Blast Desc: acetamidase regulatory protein, [Talaromyces stipitatus ATCC 10500] gi|218724933|gb|EED24350.1| acetamidase regulatory protein, [Talaromyces stipitatus ATCC 10500]
  misc_feature (24)..(439): NCBI GI: 256721208 Blast Desc: NECHADRAFT_82314 [Nectria haematococca mpVI 77-13-4]
  misc_feature (23)..(444): NCBI GI: 255932095 Blast Desc: Pc12g07690 [Penicillium chrysogenum Wisconsin 54-1255] gi|211582223|emb|CAP80396.1| Pc12g07690 [Penicillium chrysogenum Wisconsin 54-1255]
  misc_feature (37)..(445): NCBI GI: 255941776 Blast Desc: Pc16g13580 [Penicillium chrysogenum Wisconsin 54-1255] gi|211586280|emb|CAP94028.1| Pc16g13580 [Penicillium chrysogenum Wisconsin 54-1255]
  misc_feature (34)..(415): NCBI GI: 225681273 Blast Desc: conserved [Paracoccidioides brasiliensis Pb03]
  misc_feature (34)..(415): NCBI GI: 226282818 Blast Desc: conserved [Paracoccidioides brasiliensis Pb01]
  misc_feature (12)..(397): NCBI GI: 240277992 Blast Desc: conserved [Ajellomyces capsulatus H143]
  misc_feature (34)..(415): NCBI GI: 226292015 Blast Desc: conserved [Paracoccidioides brasiliensis Pb18]
  misc_feature (12)..(397): NCBI GI: 154274618 Blast Desc: [Ajellomyces capsulatus NAm1] gi|150414600|gb|EDN09962.1| [Ajellomyces capsulatus NAm1]
  misc_feature (12)..(397): NCBI GI: 225557351 Blast Desc: conserved [Ajellomyces capsulatus G186AR]
MYYGEYTEAATFDESLAVTSSYARDALLESIQTDAPPRPVIFRAWVEAYMTHSFHHCPVLEQRDLSDSLPSVVLQKAISMIANLTRLDPRGPRIAAELYERIKILICMNSELEPVLVLKVLCLLALWNGRPSTPVSVDGPWHWTGVGLRLAIQMGLHRESTYLERADASCLRRMFWFLRNSETLYVSCWGYPPHLRPQDFDVNLPTLDDFAVHPFQGTWFIESSKLCRITDRVSKLQVERRPINDEEFSEIKAALCDWSGCLPTELRLFDANGNRNTYCRAVSELAIQYFVAIVLGEFLKYTENTRSYQGVITSLLAASCGTVLYDEIYCRDESVALPQVHGFFCLALTLPLIYYKPQSSAKIASRKRDIEVLRSVLMAISDRFGDGRLYLRMIDHLQRSVAETATSSEARDSVPEPEAFLEAHRLFPFPRTFCDYMDLLEPSAEGDDLFSWGDWAAPMPDNDAFDFTWLDAFGLGPDNIDIDFSGNVG

SEQ ID NO: 13831 - DNA, 784 bp, Muscodor strobelii
  misc_feature: SGI EST ID NO. CUFF.33131.0
  misc_feature: Variant of the nucleotide sequence at SEQ ID NO 13829
gtggaggcatacatgacacatagcttccatcactgtccggtcctcgaacagcgggatctgtctgattcgctaccctccgtcgttttgcagaaagccatttcaatgatagcaaacctaacaagactcgacccacgtggtccgagaatcgcggccgaactgtacgagaggattaagatactgatctgtatgaactctgagttagagccggtattggtgttaaaggtactgtgtcttctggcactttggaatggtcggccctcgacaccggttagtgtcgatggaccatggcattggaccggtgttggcctgagactggcaatacaaatgggtcttcatcgagaatcgacgtacttggagcgagcggatgcaagttgtctccgcagaatgttctggtttctccgaaacagcgaaacattgtacgtctcgtgctggggatatccaccgcacttgcgaccccaagatttcgacgtcaacctgcctaccttagacgattttgctgttcacccctttcaagggacctggttcattgaaagctccaagctgtgtaggatcacggaccgtgtgtctaagctacaagtcgaaaggcgcccaataaacgatgaagagttctcggagattaaggcagcgctctgcgactggagcggttgtctgcccacagagcttcggctattcgacgcgaatgggaatagaaatacatattgtcgtgctgtttcggaactcgcaatacagtatttcgtggccatcgttcttggcgaattcttgaagtacacggagaatacgcgct

SEQ ID NO: 13832 - DNA, 1074 bp, Muscodor strobelii
  misc_feature: SGI cDNA ID NO. 564545
  misc_feature: Encodes the peptide sequence at SEQ ID NO 13833
atggcatcaaagcctacattccacgtcccgtctggcgaaaccgcccatgtctcgatcatcgaaacgggcatgcgcatgaaggacatcacgttcggctttctgcttgctccaccagtggcaggtcttgatacaatcaccattccaggatggtctttcttgatccagagttcgaagggtgaaaaggccttatttgatctctgcttcaaccctgatcgccatacttatcctcctggcacatgggatctgatcaaggcggctgggtctgaggtaaccggcaccaaacacgttgcggatgtcctcaagattcataacgttgaccctgcggaaataagtagtgtgatatggagtcatcaccactgggaccatattggtgacccaacaacatttccaataacgactgaagtggtcgttggaccaggatttaagcaggctttcctccctggttatccaactcgaaaagactcttacatagaggaaagattctttgaaggccgaaccctacgagaaatcgatttctcaacatcatcgctcaaggttggcaggttcagggctctggatttcttcggcgacggttcgttcttccttctcgatgcgcccggccacgattggggccatcttaacggactcgtccgtactacaagcaacccagacaccttcatattcctgggcggcgatacagttcatcacggcggcgaaattcgcccctcgccatacgtcccccttcccaatgaagtgcattttcccttgccaggtcatatcctagaacaggtggattcggtatgtcctacagggtcggagtttcggaacctgaatgtcaaacgcggccgcaagccggaccaaccgttcctagatcctgtgctcgttgtcgatatggctgatgcagttgattcaatcaacaaagcgcaagacgccgatgcgcagaacaacatcttcttcatttttgcgcatgatgcatccattcagggagtcgttgactttttccctctatcggcgaacgagtggaaggagaaaggttggaaagaacagcaccaatggagatttctggcagatttcactccggcattgacttcatag

SEQ ID NO: 13833 - protein, 357 aa, Muscodor strobelii
  misc_feature: SGI Peptide ID NO. 564545
  misc_feature (48)..(252): Pfam Id: PF00753 Pfam Desc: Metallo-beta-lactamase superfamily
  misc_feature (1)..(357): NCBI GI: 242769283 Blast Desc: TSTA_077180 [Talaromyces stipitatus ATCC 10500] gi|218724934|gb|EED24351.1| TSTA_077180 [Talaromyces stipitatus ATCC 10500]
  misc_feature (7)..(355): NCBI GI: 255940180 Blast Desc: Pc16g05120 [Penicillium chrysogenum Wisconsin 54-1255] gi|211585482|emb|CAP93182.1| Pc16g05120 [Penicillium chrysogenum Wisconsin 54-1255]
  misc_feature (5)..(355): NCBI GI: 115384558 Blast Desc: conserved [Aspergillus terreus NIH2624] gi|114196518|gb|EAU38218.1| conserved [Aspergillus terreus NIH2624]
  misc_feature (34)..(355): NCBI GI: 46115196 Blast Desc: FG03440.1 [Gibberella zeae PH-1]
  misc_feature (1)..(351): NCBI GI: 238497333 Blast Desc: AFLA_138910 [Aspergillus flavus NRRL3357] gi|220694782|gb|EED51126.1| AFLA_138910 [Aspergillus flavus NRRL3357]
  misc_feature (7)..(355): NCBI GI: 256722260 Blast Desc: NECHADRAFT_52365 [Nectria haematococca mpVI 77-13-4]
  misc_feature (1)..(351): NCBI GI: 169774169 Blast Desc: [Aspergillus oryzae RIB40] gi|83769415|dbj|BAE59550.1| protein product [Aspergillus oryzae]
  misc_feature (3)..(351): NCBI GI: 259489787 Blast Desc: TPA: conserved [Aspergillus nidulans FGSC A4]
  misc_feature (3)..(351): NCBI GI: 261360916 Blast Desc: metallo-beta-lactamase superfamily protein [Verticillium albo-atrum VaMs.102]
  misc_feature (1)..(357): NCBI GI: 159122259 Blast Desc: conserved [Aspergillus fumigatus A1163]
MASKPTFHVPSGETAHVSIIETGMRMKDITFGFLLAPPVAGLDTITIPGWSFLIQSSKGEKALFDLCFNPDRHTYPPGTWDLIKAAGSEVTGTKHVADVLKIHNVDPAEISSVIWSHHHWDHIGDPTTFPITTEVVVGPGFKQAFLPGYPTRKDSYIEERFFEGRTLREIDFSTSSLKVGRFRALDFFGDGSFFLLDAPGHDWGHLNGLVRTTSNPDTFIFLGGDTVHHGGEIRPSPYVPLPNEVHFPLPGHILEQVDSVCPTGSEFRNLNVKRGRKPDQPFLDPVLVVDMADAVDSINKAQDADAQNNIFFIFAHDASIQGVVDFFPLSANEWKEKGWKEQHQWRFLADFTPALTS

SEQ ID NO: 13834 - DNA, 2904 bp, Muscodor strobelii
  misc_feature: SGI cDNA ID NO. 564546
  misc_feature: Encodes the peptide sequence at SEQ ID NO 13835
atggatgacactacagcgagggctcgaaagattgtacaatatctggcaacatctcttgacactccgtatcatggcgccagctccatgactgcatcgatctatgacactgcttgggtagcaatggtcacaaagacaaagaagacgggtcaggaaagtataacgtgctgggaatacccgcaatgttttcagcggctgctagaaaatcaaagtccagaaggaggatttgggaaagcggcgactgacgtggacggaattctcaacaatatggcagctatcctggcgctgaaaaagctcgaagctagctctcatgtcgtgggcttcactgccacgacagacctgccagacaggatttctcgggcatgcgcatttctggagagacgattacaaacgtggaatgtagagagctcgattcacgtgggctttgaaattcttgtcccaacgctacttcagcttctttcacaagaggggatagagttcacttttcctggagcgaagcttctggctaatctgaacaaacaaaagatggcgcggttctctgaaaagattctctattcgccgatccagacaactctactccattccctcgaagcatttgtagggaagatcgatttcgaccgtacttctcatcatctccgcaatggcgctatgatggcttcaccgtcatctactgcagcgttcctgatgcacactactaattggaacgaagatgtcgatgcgtatttgcgctacgtatcagacgtaaccaaaggcggaattccatctgcctttcctatcactgtttttgagatcacttgggtgctctcaacattgttgcatctcggttttaccgcggaacagcttggtaatgatgatgtaaccaaaatcgtgtctttcttggagggacaacttcaagacaatgcaggaattacgggctttgctccagatgttctacccgatgcggatgatacagcgaaggccatcttgaccctcaatctcttaggaagggttgccagttgtgaccagatgatcaaagtattcgagtctgagaatcacttcaaaacgtatgattttgaatcaaatgcatcatttagtgccaactgtaacgtcttaaatgcgatactctcgtcccaaaacctatcgtcgcatcaccaacaggtctcgaaactcctgaaattcttgtgcaaattatggtgtgaagggaagcctttcgataaatggaacttggagtttcaatactcgatgatgcttttagccgaggcttttacgcgagtagtcgaaacttgggatgatggcgaccttcctcatctatcgcgggacttcatttcgcaacgcattcctttggtgactatacagatgctcatacgtaccatgaccactcaatcaacagacggttcatggaaagcttccctagaagtcaccgcttatgccgtgttaactttgaaacaactggtttcgttaccctggatcgacgatgtgataaatacgaaagcgacagaaagtatcgaaaatggaatatcgtacttgcgacagcatcaaaccaagtgggatgttcctggaacaatctgggtggagaaagtctcatatggatccaagatcttgtccgagacgtactgtttggctgcccttcagtcaccggcttcccacaaatggggagaaaaagcaaaaactcttgtccaaatctcaggtaaaaagacggacgctttcgtggcattcttttccagattaccgttgttttctgaagagccgttatggagattgagaggttcaatagtcgagggctacatgcttgctccggttatccgatcttctcgaccagaactcggaatttttccaagccgtgacagcaaaagtgccaagtatcttgactatatccctttcacgtggaccatatgcaataatgccaccgatttcaatctttcgactgacgtgctcgaggatatgatgatcatatccgtcctgaactttcaagttgacaaatatctggaagatttgacggacggattgacgaccgaaggagaatttgaagccttgaaacagctaatacatagactgctcgaaaacaagtgcataggagctggccgagaaggggacaatcatggtcacccagatcccgaggctgacaggagcaagaaacgactcaaactacaggatggttcagcccagcttgtgtcgagcggcgagccagcgatgttgtcaccggtttctgatgattctgagtctgtcccgttcgctcaagacactgcggaaattctctctcaattcattcgatacgttttaggacacaaaaaggtcaacgttggaactaaagcagaacagcgccggctaaaacaagagctgtcgacattcttggtcgcccatgtaacacacggtcaagataatgctcgaatgaagaacatggttcccagcaatggaatgacgatattcacggacgcccgaagttcttattacaactgggttcatagtacatcggcggatcacacgagctgcccctactcatttgagtttttcaagtgcctcgtttccccagccgggcgcgccccgtttgctggcgcactggctggatatttgacgcaagatgtctgtcgccatcttgccattatgtgtcgccaatataatgattttggctctatcaggcgcgatagcgcggagaaaaatctcaacagtatcaacttccctgagtttcacgaatcggacatcgcacgcgatagagatgacgatctatcgaaatcacaatctgtgagaggggaggataatctacgcgagaccttgatgagcatcgccgaattcgaaagagaatgcttagatcatgcgttcagtagattgaaagaacacgtacaaccacaggtaacacaagcgcttgaagtgctgatcaaagtcacagatctgtatgggcagatctatgttgtaagggatatcaacggataa

SEQ ID NO: 13835 - protein, 967 aa, Muscodor strobelii
  misc_feature: SGI Peptide ID NO. 564546
  misc_feature (29)..(965): NCBI GI: 238839982 Blast Desc: ent-kaurene synthase [Microsporum canis CBS 113480]
  misc_feature (29)..(965): NCBI GI: 119494777 Blast Desc: NFIA_009790 [Neosartorya fischeri NRRL 181] gi|119412358|gb|EAW22299.1| conserved [Neosartorya fischeri NRRL 181]
  misc_feature (29)..(962): NCBI GI: 67522274 Blast Desc: AN1594.2 [Aspergillus nidulans FGSC A4] gi|40745145|gb|EAA64301.1| AN1594.2 [Aspergillus nidulans FGSC A4] gi|259486925|tpe|CBF85181.1| TPA: conserved [Aspergillus FGSC
  misc_feature (28)..(965): NCBI GI: 242821230 Blast Desc: terpene synthase family protein [Talaromyces stipitatus ATCC 10500] gi|218712559|gb|EED11984.1| terpene synthase family protein [Talaromyces stipitatus ATCC 10500]
  misc_feature (8)..(967): NCBI GI: 186704306 Blast Desc: copalyl diphosphate synthase [Phomopsis amygdali]
  misc_feature (3)..(965): NCBI GI: 145254740 Blast Desc: An18g02710 [Aspergillus niger] gi|134084314|emb|CAK48654.1| protein product [Aspergillus niger]
  misc_feature (21)..(967): NCBI GI: 186704304 Blast Desc: phyllocladan-16a-ol synthase [Phomopsis amygdali]
  misc_feature (2)..(966): NCBI GI: 219918897 Blast Desc: copalyl-diphosphate/kaurene synthetase [Fusarium proliferatum]
  misc_feature (23)..(966): NCBI GI: 51469022 Blast Desc: ent-copalyl diphosphate/ent-kaurene synthase [Fusarium proliferatum]
  misc_feature (23)..(966): NCBI GI: 62900107 Blast Desc: CPSKS_GIBFU RecName: Full=Ent-kaur-16-ene synthase; AltName: Full=Ent-kaurene synthase; AltName: Full=Ent-copalyl diphosphate synthase; AltName: Full=CPS/KS; AltName: GfCPS/KS
  misc_feature (23)..(966): SWISSPROT Homolog: EC 5.5.1.13 Ent-copalyl diphosphate synthase
  misc_feature (23)..(966): SWISSPROT Homolog: EC 4.2.3.19 Ent-kaurene synthase
  misc_feature: Useful for introducing or modulating the production of volatile compounds
MDDTTARARKIVQYLATSLDTPYHGASSMTASIYDTAWVAMVTKTKKTGQESITCWEYPQCFQRLLENQSPEGGFGKAATDVDGILNNMAAILALKKLEASSHVVGFTATTDLPDRISRACAFLERRLQTWNVESSIHVGFEILVPTLLQLLSQEGIEFTFPGAKLLANLNKQKMARFSEKILYSPIQTTLLHSLEAFVGKIDFDRTSHHLRNGAMMASPSSTAAFLMHTTNWNEDVDAYLRYVSDVTKGGIPSAFPITVFEITWVLSTLLHLGFTAEQLGNDDVTKIVSFLEGQLQDNAGITGFAPDVLPDADDTAKAILTLNLLGRVASCDQMIKVFESENHFKTYDFESNASFSANCNVLNAILSSQNLSSHHQQVSKLLKFLCKLWCEGKPFDKWNLEFQYSMMLLAEAFTRVVETWDDGDLPHLSRDFISQRIPLVTIQMLIRTMTTQSTDGSWKASLEVTAYAVLTLKQLVSLPWIDDVINTKATESIENGISYLRQHQTKWDVPGTIWVEKVSYGSKILSETYCLAALQSPASHKWGEKAKTLVQISGKKTDAFVAFFSRLPLFSEEPLWRLRGSIVEGYMLAPVIRSSRPELGIFPSRDSKSAKYLDYIPFTWTICNNATDFNLSTDVLEDMMIISVLNFQVDKYLEDLTDGLTTEGEFEALKQLIHRLLENKCIGAGREGDNHGHPDPEADRSKKRLKLQDGSAQLVSSGEPAMLSPVSDDSESVPFAQDTAEILSQFIRYVLGHKKVNVGTKAEQRRLKQELSTFLVAHVTHGQDNARMKNMVPSNGMTIFTDARSSYYNWVHSTSADHTSCPYSFEFFKCLVSPAGRAPFAGALAGYLTQDVCRHLAIMCRQYNDFGSIRRDSAEKNLNSINFPEFHESDIARDRDDDLSKSQSVRGEDNLRETLMSIAEFERECLDHAFSRLKEHVQPQVTQALEVLIKVTDLYGQIYVVRDING

SEQ ID NO: 13836 - DNA, 3569 bp, Muscodor strobelii
  misc_feature: SGI EST ID NO. CUFF.33143.0
  misc_feature: Variant of the nucleotide sequence at SEQ ID NO 13834
ccggtatagttacatagactacgtaggttatgcgagaatatcaattcttaagacttcgtaactactactagagaactaacttctaagctttgaatccaagtctttctccctttccatggtctaaagtcgccctgtacctggcttagaaccatctcctcaatatggatgacactacagcgagggctcgaaagattgtacaatatctggcaacatctcttgacactccgtatcatggcgccagctccatgactgcatcgatctatgacactgcttgggtagcaatggtcacaaagacaaagaagacgggtcaggaaagtataacgtgctgggaatacccgcaatgttttcagcggctgctagaaaatcaaagtccagaaggaggatttgggaaagcggcgactgacgtggacggaattctcaacaatatggcagctatcctggcgctgaaaaagctcgaagctagctctcatgtcgtgggcttcactgccacgacagacctgccagacaggatttctcgggcatgcgcatttctggagagacgattacaaacgtggaatgtagagagctcgattcacgtgggctttgaaattcttgtcccaacgctacttcagcttctttcacaagaggggatagagttcacttttcctggagcgaagcttctggctaatctgaacaaacaaaagatggcgcggttctctgaaaagattctctattcgccgatccagacaactctactccattccctcgaagcatttgtagggaagatcgatttcgaccgtacttctcatcatctccgcaatggcgctatgatggcttcaccgtcatctactgcagcgttcctgatgcacactactaattggaacgaagatgtcgatgcgtatttgcgctacgtatcagacgtaaccaaaggcggaattccatctgcctttcctatcactgtttttgagatcacttgggtgctctcaacattgttgcatctcggttttaccgcggaacagcttggtaatgatgatgtaaccaaaatcgtgtctttcttggagggacaacttcaagacaatgcaggaattacgggctttgctccagatgttctacccgatgcggatgatacagcgaaggccatcttgaccctcaatctcttaggaagggttgccagttgtgaccagatgatcaaagtattcgagtctgagaatcacttcaaaacgtatgattttgaatcaaatgcatcatttagtgccaactgtaacgtcttaaatgcgatactctcgtcccaaaacctatcgtcgcatcaccaacaggtctcgaaactcctgaaattcttgtgcaaattatggtgtgaagggaagcctttcgataaatggaacttggagtttcaatactcgatgatgcttttagccgaggcttttacgcgagtagtcgaaacttgggatgatggcgaccttcctcatctatcgcgggacttcatttcgcaacgcattcctttggtgactatacagatgctcatacgtaccatgaccactcaatcaacagacggttcatggaaagcttccctagaagtcaccgcttatgccgtgttaactttgaaacaactggtttcgttaccctggatcgacgatgtgataaatacgaaagcgacagaaagtatcgaaaatggaatatcgtacttgcgacagcatcaaaccaagtgggatgttcctggaacaatctgggtggagaaagtctcatatggatccaagatcttgtccgagacgtactgtttggctgcccttcagtcaccggcttcccacaaatggggagaaaaagcaaaaactcttgtccaaatctcaggtaaaaagacggacgctttcgtggcattcttttccagattaccgttgttttctgaagagccgttatggagattgagaggttcaatagtcgagggctacatgcttgctccggttatccgatcttctcgaccagaactcggaatttttccaagccgtgacagcaaaagtgccaagtatcttgactatatccctttcacgtggaccatatgcaataatgccaccgatttcaatctttcgactgacgtgctcgaggatatgatgatcatatccgtcctgaactttcaagttgacaaatatctggaagatttgacggacggattgacgaccgaaggagaatttgaagccttgaaacagctaatacatagactgctcgaaaacaagtgcataggagctggccgagaaggggacaatcatggtcacccagatcccgaggctgacaggagcaagaaacgactcaaactacaggatggttcagcccagcttgtgtcgagcggcgagccagcgatgttgtcaccggtttctgatgattctgagtctgtcccgttcgctcaagacactgcggaaattctctctcaattcattcgatacgttttaggacacaaaaaggtcaacgttggaactaaagcagaacagcgccggctaaaacaagagctgtcgacattcttggtcgcccatgtaacacacggtcaagataatgctcgaatgaagaacatggttcccagcaatggaatgacgatattcacggacgcccgaagttcttattacaactgggttcatagtacatcggcggatcacacgagctgcccctactcatttgagtttttcaagtgcctcgtttccccagccgggcgcgccccgtttgctggcgcactggctggatatttgacgcaagatgtctgtcgccatcttgccattatgtgtcgccaatataatgattttggctctatcaggcgcgatagcgcggagaaaaatctcaacagtatcaacttccctgagtttcacgaatcggacatcgcacgcgatagagatgacgatctatcgaaatcacaatctgtgagaggggaggataatctacgcgagaccttgatgagcatcgccgaattcgaaagagaatgcttagatcatgcgttcagtagattgaaagaacacgtacaaccacaggtaacacaagcgcttgaagtgctgatcaaagtcacagatctgtatgggcagatctatgttgtaagggatatcaacggataacgacacaacatttcaaaaagggatgacgccaaaaatcatcatcgatattttagcccgcaaacttatctcgcttatcccttgtgtgattgtataatgggttaatggctcgagaaaaggactagacttatttctcggcttgcaacctattgcatcgttatgattatgtggggagctggtcttatcaagatacgtcgaatttggcgctgagttaccgattctctgtgcatattcctccttgtgcagcgaacacgataatatccaggataactgcaggagtttagtaaagcagggaagagattgcggagtaatagtagtgattagactgcttgtctggctctgacgatagcttcgtatggaaagtcgtctggctgttgtattgacaattaatgggagtgtttggattctagctgtggcgcaatcttgcaggaagttgctagctaatcacacacaattcgaacggaagatcgcaatatagaaatatacagaatttcggtttagtactgc

SEQ ID NO: 13837 - DNA, 1578 bp, Muscodor strobelii
  misc_feature: SGI cDNA ID NO. 564547
  misc_feature: Encodes the peptide sequence at SEQ ID NO 13838
atgaataacaccaacaatactgctaagctccccgctttgggagaacatggccttcccaacctcattgacatcgtccatccttccacctctactactatatttgtccttgctgctgcgtacttcatgtggcacaccgttctcagcaaaagtggaaatgaaaagttcaaggcccctatcgttggtccccaagacactattagagcgagatggcagttctttaggaaggcggcagacctcatcaatgagggatacggaaagtataaaggccaaatcttcaaattatcaggacatgatattcttgtcttaccgagcaagtacgtcacagagctgagaagcattcctgacgaagagttgagctctattcaagcaaatatagacaatttcgaagggctctactcaacgactgcaattttgaccgaaggcaaccttcatacacgtacgattcagagcaaattaactcccagactacgtcaccatgtaccagtggttcaagacgtgttgacaaggcattttcccaacgaacttccagccaaaagagatgattatacaagcgtaaagggatttcatttggttcttcgtcttgtctcgttcattgcggcgcgacactttgttggatcgcctctatgcgaagacgaggaatggcttggcacggcacttacttacaccgaaaacgccttcaagaccatcatattactgcgtatctttcccgactgggctaaaatcttcgtcgcctggttcatccctttctcatggcaggtgagctgggcattgagaaaagcgaagagaatcattgtgcctctcatcgaggaaaggcgcagacgtgaaaaagaagatcccgattacgccaagcccgaggatttcttgcagtacatgatggacggcgccgatgaatttgacggccaaccagataagctcgcacatcggttgctaattctaacgttggctgctgtccacactacgtctatggccgctacacagactatttttgatctttgcgcgcatccagagtatatagcgcccctccgacaagaggtcgtcgaggtcttgagtaaggagggtgggtatacaaagcagacacttacgcacttcaagaaattggatagctttatgagagagtctcagcgacttaaccctccaagcttgcttggatttaagcgcgcagtgcgtaagcctctgactctttcggatgggacttacctgccgagaggggtccatttgatgatgcccattgcccccgttgtgctggatcctgaagtcactcccaatcccgatgtctttgatggattgagacattggcgaaaccgtgatcagcctggggaggcccacaagcaccagtttgccacgacaagtgacaacaatctccacttcggacatggtaaattttcatgtcctgggcggttcctcgcaggcaattcggtgaagatgatggtctcgaatatgctcttgagatatgacatgagatttgccggtgggaccaagatcaggcctgacaatgtgtgtctacacgaatacgtatttccaaaccccgaagcagagatcgagttcaagctgagggatgagaagtatgcatggatgtga

SEQ ID NO: 13838 - protein, 525 aa, Muscodor strobelii
  misc_feature: SGI Peptide ID NO. 564547
  misc_feature (60)..(517): Pfam Id: PF00067 Pfam Desc: Cytochrome P450
  misc_feature (231)..(517): Pfam Id: PF00067 Pfam Desc: Cytochrome P450
  misc_feature (35)..(518): NCBI GI: 259486929 Blast Desc: TPA: cytochrome P450, (Eurofung) [Aspergillus nidulans FGSC A4]
  misc_feature (35)..(518): NCBI GI: 67522282 Blast Desc: AN1598.2 [Aspergillus nidulans FGSC A4] gi|40745149|gb|EAA64305.1| AN1598.2 [Aspergillus nidulans FGSC A4]
  misc_feature (32)..(518): NCBI GI: 119494789 Blast Desc: cytochrome P450 monooxygenase, [Neosartorya fischeri NRRL 181] gi|119412362|gb|EAW22303.1| cytochrome P450 monooxygenase, [Neosartorya fischeri NRRL 181]
  misc_feature (28)..(524): NCBI GI: 171692063 Blast Desc: protein product [Podospora anserina] gi|170945980|emb|CAP72781.1| protein product [Podospora anserina]
  misc_feature (33)..(518): NCBI GI: 238839986 Blast Desc: phoma betae P450 monooxygenase No.2 [Microsporum canis CBS 113480]
  misc_feature (28)..(518): NCBI GI: 240108704 Blast Desc: Cytochrome P450 family protein [Coccidioides posadasii C735 delta SOWgp]
  misc_feature (33)..(522): NCBI GI: 258578343 Blast Desc: conserved [Uncinocarpus reesii 1704] gi|237903619|gb|EEP78020.1| conserved [Uncinocarpus reesii 1704]
  misc_feature (47)..(520): NCBI GI: 242771211 Blast Desc: cytochrome P450, [Talaromyces stipitatus ATCC 10500] gi|242821273|ref|XP_002487646.1| cytochrome P450, [Talaromyces stipitatus ATCC 10500] gi|218712567|gb|EED11992.1| cytochrome
  misc_feature (121)..(518): NCBI GI: 119186083 Blast Desc: CIMG_03089 [Coccidioides immitis RS]
  misc_feature (29)..(518): NCBI GI: 145254738 Blast Desc: An18g02700 [Aspergillus niger] gi|134084313|emb|CAK48653.1| protein product [Aspergillus niger]
  misc_feature (33)..(520): SWISSPROT Homolog: EC 1.14.13.78 Ent-kaurene oxidase
MNNTNNTAKLPALGEHGLPNLIDIVHPSTSTTIFVLAAAYFMWHTVLSKSGNEKFKAPIVGPQDTIRARWQFFRKAADLINEGYGKYKGQIFKLSGHDILVLPSKYVTELRSIPDEELSSIQANIDNFEGLYSTTAILTEGNLHTRTIQSKLTPRLRHHVPVVQDVLTRHFPNELPAKRDDYTSVKGFHLVLRLVSFIAARHFVGSPLCEDEEWLGTALTYTENAFKTIILLRIFPDWAKIFVAWFIPFSWQVSWALRKAKRIIVPLIEERRRREKEDPDYAKPEDFLQYMMDGADEFDGQPDKLAHRLLILTLAAVHTTSMAATQTIFDLCAHPEYIAPLRQEVVEVLSKEGGYTKQTLTHFKKLDSFMRESQRLNPPSLLGFKRAVRKPLTLSDGTYLPRGVHLMMPIAPVVLDPEVTPNPDVFDGLRHWRNRDQPGEAHKHQFATTSDNNLHFGHGKFSCPGRFLAGNSVKMMVSNMLLRYDMRFAGGTKIRPDNVCLHEYVFPNPEAEIEFKLRDEKYAWM

SEQ ID NO: 13839 - DNA, 2508 bp, Muscodor strobelii
  misc_feature: SGI EST ID NO. CUFF.33235.0
  misc_feature: Variant of the nucleotide sequence at SEQ ID NO 13837
tgtaacatcgctaatattacccaaggtgtacatgcagccaagtgacagcgcgcaaagacaaagtaggtcaatcatggaaaaattcatctagacgtcgcgcatcattcgacgatcaacttcaatgcggacgtgaagtgagtcctactcacggccttatctgcctggactttccatgcttgttggctgcatgcactagggtcaaatatccacagagaccaagcgggggactcgttgtagcaacagtcctgtcttatcactcgggcatatcactcacatgagtagctgagcagagaccggaatgaaagccttatacagagggagctcatgggcttcgatcgtaaggtcagagattcaaagttgaagttgaagttttcgatgtaatcgtgagcgacaccgagccatcgtaatgaataacaccaacaatactgctaagctccccgctttgggagaacatggccttcccaacctcattgacatcgtccatccttccacctctactactatatttgtccttgctgctgcgtacttcatgtggcacaccgttctcagcaaaagtggaaatgaaaagttcaaggcccctatcgttggtccccaagacactattagagcgagatggcagttctttaggaaggcggcagacctcatcaatgagggatacggaaaggtaggagtttgattactacctactgggtaatagatcctaatatcaaccttgatacagtataaaggccaaatcttcaaattatcaggacatgatattcttgtcttaccgagcaagtacgtcacagagctgagaagcattcctgacgaagagttgagctctattcaagcaaatatagacaatttcgaagggctctactcaacgactgcaattttgaccgaaggcaaccttcatacacgtacgattcagagcaaattaactcccagactacgtcaccatgtaccagtggttcaagacgtgttgacaaggcattttcccaacgaacttccagccaaaagagatgattatacaagcgtaaagggatttcatttggttcttcgtcttgtctcgttcattgcggcgcgacactttgttggatcgcctctatgcgaagacgaggaatggcttggcacggcacttacttacaccgaaaacgccttcaagaccatcatattactgcgtatctttcccgactgggctaaaatcttcgtcgcctggttcatccctttctcatggcaggtgagctgggcattgagaaaagcgaagagaatcattgtgcctctcatcgaggaaaggcgcagacgtgaaaaagaagatcccgattacgccaagcccgaggatttcttgcagtacatgatggacggcgccgatgaatttgacggccaaccagataagctcgcacatcggttgctaattctaacgttggctgctgtccacactacgtctatggccgctacacagactatttttgatctttgcgcgcatccagagtatatagcgcccctccgacaagaggtcgtcgaggtcttgagtaaggagggtgggtatacaaagcagacacttacgcacttcaagaaattggatagctttatgagagagtctcagcgacttaaccctccaagcttgcttggatttaagcgcgcagtgcgtaagcctctgactctttcggatgggacttacctgccgagaggggtccatttgatgatgcccattgcccccgttgtgctggatcctgaagtcactcccaatcccgatgtctttgatggattgagacattggcgaaaccgtgatcagcctggggaggcccacaagcaccagtttgccacgacaagtgacaacaatctccacttcggacatggtaaattttcatgtcctgggcggttcctcgcaggcaattcggtgaagatgatggtctcgaatatgctcttgagatatgacatgagatttgccggtgggaccaagatcaggcctgacaatgtgtgtctacacgaatacgtatttccaaaccccgaagcagagatcgagttcaagctgagggatgagaagtatgcatggatgtgattagactcatatcacttactgcagggtcttgatcacgaaatgggttgttaagtctttgcgtcatatatcaaagtctcaattgaaaggctttccattcgcatcgttcaagtatatacactcgatgacgtgagaaaatgctagcaaatcgaataggtcacaatgaaatgtgaagaatcaggatcgtgagcttctagttttatgattcatggctcaacaaccaacccccattctgttgcagctggaacacctggttaggatcgtaggcttgactgattttgaccaacctcctaaaattgtctacaccgtagccggagaggacttgctggccctcgtgtgcatcattcataaattggtaagtgagattcgtgctatgtgcagccgtgatgtttgctaggctttgtcctatgtcttcgataagttgcatcgctgcagcatcgtcttcagctctttcccattgcagcgtgaca

SEQ ID NO: 13840 - DNA, 1506 bp, Muscodor strobelii
  misc_feature: SGI cDNA ID NO. 564548
  misc_feature: Encodes the peptide sequence at SEQ ID NO 13841
atgctgtttgtgccgattattctcgtattgtgcgctgctatctcctatgcagcttctcccgatcgagcggccgatgcatgcaatcagctgcaagccttattcagcgagagtacagaccgagaactccaagttcctgaattcatcagcccggaatcacgcatgtacccaaatcgcacaatagtacattggtcctccaattgttggcaaaatgcttcgtgtatcgtatctccggtcagtgccgaagacgtggcagatgtcatgtccattgtgacatctacacaggcaatcttctctgttcggagcggaggtcatgacttcaataagaatcatagcagcgtagagggaggtattgtgatagatatggtgaactttcgcaatatatcactgagcgcagataagaccagtgtcacaatcggcgttggtataagctggggcgatgtttatttaacgctgaacggaactggagtctcagtcaacggagctagagatgtggctccaggagttgggggacagactatttccgggggccaaggatggtttagcagtctggcaggtgtaacagcggcttcgatcatcgctgttgatgttgtgttagccaattctactatcatacgagccacggaggaagacgcgtcggacctcttatgggctcttcgaggcggtggaccgaattttggaatcgccacttcttttactttcaagactctgcccgtaaataaaagctggttctcagcgcgtgctttcacgcccgacaagaatcagcagcttttgaacgccttagtcgagtatggccaattggccgaggaggacgataaagcaactttggtcttcggtctatcggaagacacaatgtccgcaagttcctttgtgggattcttctacgcggacgaagtaaggtttccagatgtctactctccgttttacagcatcgagtacgcggcagaaggtctgccttccaccatcgggacccaaggagacttagcagcagcttcaccggatcctcagtatcccgctcctgggacagtacctttgcgacattacgttgtcactttgtcacacaaaacggataatgccacatatcaggacagttataaagcatacacctcctatgcaaagcatgcgatcgcatcaggttgggtcatcagctacggatcacagctcttttctaggagcgccgtgaaagcaacggccaacactccattgggacttgaagacactagccaagactggatacatgtcacgctgcaatgggaaagagctgaagacgatgctgcagcgatgcaacttatcgaagacataggacaaagcctagcaaacatcacggctgcacatagcacgaatctcacttaccaatttatgaatgatgcacacgagggccagcaagtcctctccggctacggtgtagacaattttaggaggttggtcaaaatcagtcaagcctacgatcctaaccaggtgttccagctgcaacagaatgggggttggttgttgagccatgaatcataa

SEQ ID NO: 13841 - protein, 501 aa, Muscodor strobelii
  misc_feature: SGI Peptide ID NO. 564548
  misc_feature (71)..(207): Pfam Id: PF01565 Pfam Desc: FAD binding domain
  misc_feature (466)..(492): Pfam Id: PF08031 Pfam Desc: Berberine and berberine like
  misc_feature (55)..(498): NCBI GI: 238499855 Blast Desc: conserved [Aspergillus flavus NRRL3357] gi|220692915|gb|EED49261.1| conserved [Aspergillus flavus NRRL3357]
  misc_feature (55)..(498): NCBI GI: 145230445 Blast Desc: An01g11180 [Aspergillus niger] gi|134055649|emb|CAK44023.1| protein product [Aspergillus niger]
  misc_feature (63)..(486): NCBI GI: 115449559 Blast Desc: [Aspergillus terreus NIH2624] gi|114187587|gb|EAU29287.1| [Aspergillus terreus NIH2624]
  misc_feature (55)..(493): NCBI GI: 145240173 Blast Desc: An08g06180 [Aspergillus niger] gi|134077247|emb|CAK45588.1| protein product [Aspergillus niger]
  misc_feature (63)..(478): NCBI GI: 169779227 Blast Desc: [Aspergillus oryzae RIB40] gi|83772817|dbj|BAE62945.1| protein product [Aspergillus oryzae]
  misc_feature (23)..(497): NCBI GI: 145254822 Blast Desc: An18g03080 [Aspergillus niger] gi|134084352|emb|CAK48692.1| protein product [Aspergillus niger]
  misc_feature (57)..(498): NCBI GI: 242821331 Blast Desc: 6-hydroxy-D-nicotine oxidase, [Talaromyces stipitatus ATCC 10500] gi|218712579|gb|EED12004.1| 6-hydroxy-D-nicotine oxidase, [Talaromyces stipitatus ATCC 10500]
  misc_feature (61)..(497): NCBI GI: 116201111 Blast Desc: CHGG_08440 [Chaetomium globosum CBS 148.51] gi|88176958|gb|EAQ84426.1| CHGG_08440 [Chaetomium globosum CBS 148.51]
  misc_feature (63)..(497): NCBI GI: 85090595 Blast Desc: NCU09273 [Neurospora crassa OR74A] gi|28919859|gb|EAA29256.1| conserved [Neurospora crassa OR74A]
  misc_feature (62)..(499): NCBI GI: 46138189 Blast Desc: FG10609.1 [Gibberella zeae PH-1]
MLFVPIILVLCAAISYAASPDRAADACNQLQALFSESTDRELQVPEFISPESRMYPNRTIVHWSSNCWQNASCIVSPVSAEDVADVMSIVTSTQAIFSVRSGGHDFNKNHSSVEGGIVIDMVNFRNISLSADKTSVTIGVGISWGDVYLTLNGTGVSVNGARDVAPGVGGQTISGGQGWFSSLAGVTAASIIAVDVVLANSTIIRATEEDASDLLWALRGGGPNFGIATSFTFKTLPVNKSWFSARAFTPDKNQQLLNALVEYGQLAEEDDKATLVFGLSEDTMSASSFVGFFYADEVRFPDVYSPFYSIEYAAEGLPSTIGTQGDLAAASPDPQYPAPGTVPLRHYVVTLSHKTDNATYQDSYKAYTSYAKHAIASGWVISYGSQLFSRSAVKATANTPLGLEDTSQDWIHVTLQWERAEDDAAAMQLIEDIGQSLANITAAHSTNLTYQFMNDAHEGQQVLSGYGVDNFRRLVKISQAYDPNQVFQLQQNGGWLLSHES

SEQ ID NO: 13842 - DNA, 3296 bp, Muscodor strobelii
  misc_feature: SGI EST ID NO. CUFF.33236.5
  misc_feature: Variant of the nucleotide sequence at SEQ ID NO 13840
aagcccacaactaccggtccgagtaagcaatgcatggtccttaagcttaagcagttagaatgggctcagcagcgtcgtgttcatcacgaaacaggctttgcctgttgcggtgcaatgtatgtacatagtattcatcgaaatgtcttgaactatcgtcaattgtaatagaatatttgaattcttaagttgagccctgcgatgacaatcagcatgcggcttgtagaaccctgttggaagtgtgagcaggctggagtcgaggcaagcatgattgttctcaatcccatacgcctagaagttggcattgaacagtgtatggaccgagagctcagactctgtcttcctaggtcctctttgctctgagatacatagtcaattcattccgaagtacagtagcaacctggtgtcatattgattccgtcatatcgcatcagagccagaactcacattcataggccgatcgatcgcccgcccaaaatgctgtttgtgccgattattctcgtattgtgcgctgctatctcctatgcagcttctcccgatcgagcggccgatgcatgcaatcagctgcaagccttattcagcgagagtacagaccgagaactccaagttcctgaattcatcagcccggaatcacgcatgtacccaaatcgcacaatagtacattggtcctccaattgttggcaaaatgcttcgtgtatcgtatctccggtcagtgccgaagacgtggcagatgtcatgtccattgtgacatctacacaggcaatcttctctgttcggagcggaggtcatgacttcaataagaatcatagcagcgtagagggaggtattgtgatagatatggtgaactttcgcaatatatcactgagcgcagataagaccagtgtcacaatcggcgttggtataagctggggcgatgtttatttaacgctgaacggaactggagtctcagtcaacggagctagagatgtggctccaggagttgggggacagactatttccgggggccaaggatggtttagcagtctggcaggtgtaacagcggcttcgatcatcgctgttgatgttgtgttagccaattctactatcatacgagccacggaggaagacgcgtcggacctcttatgggctcttcgaggcggtggaccgaattttggaatcgccacttcttttactttcaagactctgcccgtaaataaaagctggttctcagcgcgtgctttcacgcccgacaagaatcagcagcttttgaacgccttagtcgagtatggccaattggccgaggaggacgataaagcaactttggtcttcggtctatcggaagacacaatgtccgcaagttcctttgtgggattcttctacgcggacgaagtaaggtttccagatgtctactctccgttttacagcatcgagtacgcggcagaaggtctgccttccaccatcgggacccaaggagacttagcagcagcttcaccggatcctcagtatcccgctcctgggacagtacctttgcgacattacgttgtcactttgtcacacaaaacggataatgccacatatcaggacagttataaagcatacacctcctatgcaaagcatgcgatcgcatcaggttgggtcatcagctacggatcacagctcttttctaggagcgccgtgaaagcaacggccaacactccattgggacttgaagacactagccaagactggatacatgtcacgctgcaatgggaaagagctgaagacgatgctgcagcgatgcaacttatcgaagacataggacaaagcctagcaaacatcacggctgcacatagcacgaatctcacttaccaatttatgaatgatgcacacgagggccagcaagtcctctccggctacggtgtagacaattttaggaggttggtcaaaatcagtcaagcctacgatcctaaccaggtgttccagctgcaacagaatgggggttggttgttgagccatgaatcataaaactagaagctcacgatcctgattcttcacatttcattgtgacctattcgatttgctagcattttctcacgtcatcgagtgtatatacttgaacgatgcgaatggaaagcctttcaattgagactttgatatatgacgcaaagacttaacaacccatttcgtgatcaagaccctgcagtaagtgatatgagtctaatcacatccatgcatacttctcatccctcagcttgaactcgatctctgcttcggggtttggaaatacgtattcgtgtagacacacattgtcaggcctgatcttggtcccaccggcaaatctcatgtcatatctcaagagcatattcgagaccatcatcttcaccgaattgcctgcgaggaaccgcccaggacatgaaaatttaccatgtccgaagtggagattgttgtcacttgtcgtggcaaactggtgcttgtgggcctccccaggctgatcacggtttcgccaatgtctcaatccatcaaagacatcgggattgggagtgacttcaggatccagcacaacgggggcaatgggcatcatcaaatggacccctctcggcaggtaagtcccatccgaaagagtcagaggcttacgcactgcgcgcttaaatccaactgtattttaaggttagcaaatcgcgtgtgagacgagcagaataaaaacgtaggtgcggagcagagcagacgtcaacgtacgcaagcttggagggttaagtcgctgagactctctcataaagctatccaatttcttgaagtgcgtaagtgtctgctttgtatacccaccctccttactcaagacctcgacgacctcttgtcggaggggcgctatatactctggatgcgcgcaaagatcaaaaatagtctgtgtagcggccatagacgtagtgtggacagcagccaacgttagaattagcaaccgatgtgcgagcttatctggttggccgtcaaattcatcggcgccgtccatcatgtactgcaagaaatcctcgggcttggcgtaatcgggatcttctttttcacgtctgcgcctttcctcgatgagaggcacaatgattctcttcgcttttctcaatgcccagctcacctgccatgagaaagggatgaaccaggcgacgaagattttagcccagtcgggaaagatacgcagtaatatgatggtcttgaaggcgttttcggtgtaagtaagtgccgtgccaagccattcctcgtcttcgcatagaggcgatccaacaaagtgtcgcgccgcaatgaacgagacaagacgaagaaccaaatgaaatccctttacgcttgtataatca

SEQ ID NO: 13843 - DNA, 1680 bp, Muscodor strobelii
  misc_feature: SGI cDNA ID NO. 564549
  misc_feature: Encodes the peptide sequence at SEQ ID NO 13844
atgattaccgagaagggtttgacaaaggtccattcgactcgcctcatctactactcgatcctttctttggttgtagtatggtttgtaacatttctgtttcgaggattccgcatgagaagagatgttcgacggctcgtagctcaaggcattccggtagcacagccgcattcatttcttctcggacatctcaggctgatgggggaattgggtgttggatcgccgaaagatgcgcacccgacttatcacaatgtcaatctttacagaaactggaagaagtattttcctcaggagactgaatgcccaccagcaatatatcttgacctgtggcctttctttccacagcccatactatacatcaactcgcctgacgcatgcactcagttgactcaggagcagcctcaaccgcggcatccaatgcatcgatgggcgttgacacctgtgacggatggcaaggatctgataagtttggcttgcacagacatgtctttgcatcggctatggagatcaagattgaatccaggcttctcatcacgaaatatcatgcttaatatgcccgtgttgctcgaggaagtggatattttcactggcattcttagggaaaaagcaggagaaggtggcaattggggagagatgtttactttatacgacaagagtattcgcctcacattcgacgtgatagtgagagtggctttggaccttcaactccacgagcagactgttggaccaggacccctttttcaagcattgagtaacctaattcctttagcgaaactcgactctctttggaataaggtcgaaagattactgccaccatatcgcaaaagggtatcgatgaacgggaaggtcttgcgtgatgtattgtctgaagaaattgagcgtagtatcgtgtctggcggccagaagaccatcgtcgagcgggctcttcaagaatctcagcacgaggtagacggcaagacaacgatcagaccaagcactgagttcattgaaacggtgatttctcaagtcaaattcttcctatttgcgggtcaagacacaactgcccaaacaatatgctgggcgctctatgaaactcgacgccacgctgaagttttagcaatgatgcaagacgagtacagagatatacttggtggtgatgcccgacgtgctgcaaacattctacgaaacaaaccgcaaaagatcaacgaactgcgctacacatatgctgtcgtcaaagagacgctacgcgtgcacaatctgagcgagacgttccgtcagggaagcgcgggtttcaatcttgcactgaatggcagaatctatcctaccgcaggctgtgtggttatgacagatcccaacacactacacattcgcgaagacctgtggccgcgcgcgggagaattccttccagaacgatttctagttcctgaaggtcatccattgcgcccagtcaagaatgcatggcgccctttcgagctgggcagcatgcgttgcataggcgaggagctggctatgatggaaatcgtactagtccttgcgtttacgactctcgagctagatctcgacttcaattggaatgaatgggatagacaggtcggaagaagcaccgagcagcaggaaatgatattcggtcaacgcggctaccgttgcggggagggagtcgggcgcatcaaggatgatttgccagttcgggtaagaatactttaa

SEQ ID NO: 13844 - protein, 559 aa, Muscodor strobelii
  misc_feature: SGI Peptide ID NO. 564549
  misc_feature (71)..(534): Pfam Id: PF00067 Pfam Desc: Cytochrome P450
  misc_feature (338)..(504): Pfam Id: PF00067 Pfam Desc: Cytochrome P450
  misc_feature (1)..(558): NCBI GI: 238839665 Blast Desc: VerA [Microsporum canis CBS 113480]
  misc_feature (12)..(558): NCBI GI: 240275889 Blast Desc: sterigmatocystin biosynthesis P450 monooxygenase StcS [Ajellomyces capsulatus H143]
  misc_feature (12)..(553): NCBI GI: 154281857 Blast Desc: [Ajellomyces capsulatus NAm1] gi|150411920|gb|EDN07308.1| [Ajellomyces capsulatus NAm1]
  misc_feature (12)..(557): NCBI GI: 225563301 Blast Desc: sterigmatocystin biosynthesis P450 monooxygenase StcS [Ajellomyces capsulatus G186AR]
  misc_feature (14)..(515): NCBI GI: 239610541 Blast Desc: cytochrome P450 [Ajellomyces dermatitidis ER-3]
  misc_feature (12)..(558): NCBI GI: 115402821 Blast Desc: conserved [Aspergillus terreus NIH2624] gi|114189333|gb|EAU31033.1| conserved [Aspergillus terreus NIH2624]
  misc_feature (3)..(558): NCBI GI: 261354657 Blast Desc: cytochrome P450 4V3 [Verticillium albo-atrum VaMs.102]
  misc_feature (56)..(522): NCBI GI: 171677496 Blast Desc: protein product [Podospora anserina] gi|170936816|emb|CAP61474.1| protein product [Podospora anserina]
  misc_feature (22)..(556): NCBI GI: 156042896 Blast Desc: SS1G_11247 [Sclerotinia sclerotiorum 1980] gi|154695632|gb|EDN95370.1| SS1G_11247 [Sclerotinia sclerotiorum 1980]
  misc_feature (49)..(557): NCBI GI: 154301127 Blast Desc: BC1G_10536 [Botryotinia fuckeliana B05.10] gi|150856284|gb|EDN31476.1| BC1G_10536 [Botryotinia fuckeliana B05.10]
  misc_feature (68)..(503): SWISSPROT Homolog: EC 1.14.14.1 Unspecific monooxygenase
MITEKGLTKVHSTRLIYYSILSLVVVWFVTFLFRGFRMRRDVRRLVAQGIPVAQPHSFLLGHLRLMGELGVGSPKDAHPTYHNVNLYRNWKKYFPQETECPPAIYLDLWPFFPQPILYINSPDACTQLTQEQPQPRHPMHRWALTPVTDGKDLISLACTDMSLHRLWRSRLNPGFSSRNIMLNMPVLLEEVDIFTGILREKAGEGGNWGEMFTLYDKSIRLTFDVIVRVALDLQLHEQTVGPGPLFQALSNLIPLAKLDSLWNKVERLLPPYRKRVSMNGKVLRDVLSEEIERSIVSGGQKTIVERALQESQHEVDGKTTIRPSTEFIETVISQVKFFLFAGQDTTAQTICWALYETRRHAEVLAMMQDEYRDILGGDARRAANILRNKPQKINELRYTYAVVKETLRVHNLSETFRQGSAGFNLALNGRIYPTAGCVVMTDPNTLHIREDLWPRAGEFLPERFLVPEGHPLRPVKNAWRPFELGSMRCIGEELAMMEIVLVLAFTTLELDLDFNWNEWDRQVGRSTEQQEMIFGQRGYRCGEGVGRIKDDLPVRVRIL

SEQ ID NO: 13845 - DNA, 2849 bp, Muscodor strobelii
  misc_feature: SGI EST ID NO. CUFF.33220.3
  misc_feature: Variant of the nucleotide sequence at SEQ ID NO 13843
tttcaattactgaaatctacatactagatagctttgattggaccacatacggaatatgataagaacaaaagaccgcaggcttgtatgtacagcgagaacaggctttcgaaacaattgctatcaccggagactaggcctctttcataaccatccctgggcctcgagagacctaacgatgacggggttgtggtagcttaggtatttcgaggacaacccagcccaccctgatgctcgcccatagatcgttatgctgggattggtctatcctttggcgccttactgggcgttgagcgtcactggcgtatcaccgtaattactgtctatggagtgccaatcattgacaagggcatacttgcgccgaattctgagtgcagcatgattattaacgaggccataggtttgctactacttgagtaagacctctagcaggtataacctacctcactccataggtatcaacacatgcttgatccatatatccgatagatacatgaacgaacgaggtgtaaagtgatcgcaaagctacggcagttattttggagatgccctgttattcaaggtatcagttccattggtagtgagtcgtagttgtacgacggcaacatgattaccgagaagggtttgacaaaggtccattcgactcgcctcatctactactcgatcctttctttggttgtagtatggtttgtaacatttctgtttcgaggattccgcatgagaagagatgttcgacggctcgtagctcaaggcattccggtagcacagccgcattcatttcttctcggacatctcaggctgatgggggaattgggtgttggatcgccgaaagatgcgcacccgacttatcacaatgtcaatctttacagaaactggaagaagtattttcctcaggagactgaatgcccaccagcaatatatcttgacctgtggcctttctttccacagcccatactatacatcaactcgcctgacgcatgcactcagttgactcaggagcagcctcaaccgcggcatccaatgcatcgatgggcgttgacacctgtgacggatggcaaggatctgataagtttggcttgcacagacatgtctttgcatcggctatggagatcaagattgaatccaggcttctcatcacgaaatatcatgcttaatatgcccgtgttgctcgaggaagtggatattttcactggcattcttagggaaaaagcaggagaaggtggcaattggggagagatgtttactttatacgacaagagtattcgcctcacattcgacgtgatagtgagagtggctttggaccttcaactccacgagcagactgttggaccaggacccctttttcaagcattgagtaacctaattcctttagcgaaactcgactctctttggaataaggtcgaaagattactgccaccatatcgcaaaagggtatcgatgaacgggaaggtcttgcgtgatgtattgtctgaagaaattgagcgtagtatcgtgtctggcggccagaagaccatcgtcgagcgggctcttcaagaatctcagcacgaggtagacggcaagacaacgatcagaccaagcactgagttcattgaaacggtgatttctcaagtcaaattcttcctatttgcgggtcaagacacaactgcccaaacaatatgctgggcgctctatgaaactcgacgccacgctgaagttttagcaatgatgcaagacgagtacagagatatacttggtggtgatgcccgacgtgctgcaaacattctacgaaacaaaccgcaaaagatcaacgaactgcgctacacatatgctgtcgtcaaagagacgctacgcgtgcacaatctgagcgagacgttccgtcagggaagcgcgggtttcaatcttgcactgaatggcagaatctatcctaccgcaggctgtgtggttatgacagatcccaacacactacacattcgcgaagacctgtggccgcgcgcgggagaattccttccagaacgatttctagttcctgaaggtcatccattgcgcccagtcaagaatgcatggcgccctttcgagctgggcagcatgcgttgcataggcgaggagctggctatgatggaaatcgtactagtccttgcgtttacgactctcgagctagatctcgacttcaattggaatgaatgggatagacaggtcggaagaagcaccgagcagcaggaaatgatattcggtcaacgcggctaccgttgcggggagggagtcgggcgcatcaaggatgatttgccagttcgggtaagaatactttaaaacctatgctatctggttgttcggtaggactcttttggtgagagctcggtgtgcctaggtagttcatacacgcatgtttaaaatagcaccgaagatcatacccatctctgtatatcgtcgtacttaaatatacttgtggtgtcccatgacatcgttataagacacagggttcaatgtgaggggattttcggcatgcagtctgaattgaggggcttgcagcaggccgttgtcaaatacgaaaccccgctatatatcgatcgaagtggcatgcattgtctgcgagaagagctacgaagatgttgaagacgagagccttctgattggtggacgctaatcttacatgcatgagtgagaaaggtacgctgcagcaactgtgctcagcggcttggtttgtcctaccattcgaatgcgaccttcccacgccacatgcaatgaaacggtgcgttgatacgcaatacgggaggacacgcgtgcagcagatgcatcaacgaccttgcaactgaggattttcgtacacgtggggcacctcagtatgtagcagtaggattgtctcgagcataacgtcg

SEQ ID NO: 13846 - DNA, 1107 bp, Muscodor strobelii
  misc_feature: SGI cDNA ID NO. 564550
  misc_feature: Encodes the peptide sequence at SEQ ID NO 13847
atgagtggaattccgcaagaagagatcgatcgccagctagctcatatcaacgatgacttaagcactaccgtcatcggcgtgtcggccgcctttacaggtattgccattatcgccgttgttttgcgcgtgatatcgaggcgtcagaaaggggtccgactgtggtgggacgattggctcgcgattgcctcggtggtacccttgatcgagttagatatcgcgacatcattatccgcacactacgggaccggacgacatttactatgggtgttgcagtacggaaatctaactagcctcggaaaggcgcaacttggaatctcagccggttataactttacaatgctctttggcaaactatcagtccttgcactctacgcgcgagtctttaccttacaggagcgatacatgagatggggcgtttggtctgtcgggatcttgattggcgcgtggttcttgagcggcacattgggtgtatttctgatctgtcgacctcttagcaagatatggggtgtgcctgaacaatgtctccctcccaaatcatcaagcgtcacttttgcggcagtcaacttcgtaaccgacgtcttcgttctggctcttccccagcccgcgatctggaagttacaacgtacgacatcacacaagctgagtatcagttttgtgtttttacttggtatcttcgctacaactattactctcgtgcgactagttctccttgaccactcagctgttcatcagtctccatatgacagtacatacacaaccgttgtaaccatagtgttcaccgtgcttgagcctgcttttgttgtgttgtgcggatcattgccaatgctagcccggtttttcaagcgcagcaaagcgccaacgctgaaatccgacaaccttgccaactcgaagacgtcaagtcaaggatactttcgatggaaatcatctcgagagggctctgcaatcccagcgtcgaagtccgccaagtcttatgaccagcaatctcagagtagccgaggacctatcaagacgtctggcgaacatagatctgaaagcactgagatgcctaccaagctatccgcgagcttctcgtcattcccaccattcttgaagcggaagataggttga

SEQ ID NO: 13847 - protein, 368 aa, Muscodor strobelii
  misc_feature: SGI Peptide ID NO. 564550
  misc_feature (14)..(336): NCBI GI: 242760617 Blast Desc: conserved [Talaromyces stipitatus ATCC 10500] gi|242760622|ref|XP_002340028.1| conserved [Talaromyces stipitatus ATCC 10500] gi|218723223|gb|EED22640.1| conserved ATCC
  misc_feature (23)..(349): NCBI GI: 121719918 Blast Desc: integral membrane protein [Aspergillus clavatus NRRL 1] gi|119404869|gb|EAW15231.1| integral membrane protein [Aspergillus clavatus NRRL 1]
  misc_feature (18)..(364): NCBI GI: 261359081 Blast Desc: integral membrane protein [Verticillium albo-atrum VaMs.102]
  misc_feature (24)..(347): NCBI GI: 115401548 Blast Desc: conserved [Aspergillus terreus NIH2624] gi|114190303|gb|EAU32003.1| conserved [Aspergillus terreus NIH2624]
  misc_feature (28)..(342): NCBI GI: 70981734 Blast Desc: integral membrane protein [Aspergillus fumigatus Af293] gi|66844018|gb|EAL84358.1| integral membrane protein [Aspergillus fumigatus Af293] gi|159121997|gb|EDP47120.1| protein
  misc_feature (17)..(313): NCBI GI: 154300400 Blast Desc: BC1G_11389 [Botryotinia fuckeliana B05.10] gi|150856712|gb|EDN31904.1| BC1G_11389 [Botryotinia fuckeliana B05.10]
  misc_feature (7)..(347): NCBI GI: 169597711 Blast Desc: SNOG_01643 [Phaeosphaeria nodorum SN15] gi|160707575|gb|EAT91292.2| SNOG_01643 [Phaeosphaeria nodorum SN15]
  misc_feature (3)..(311): NCBI GI: 119473139 Blast Desc: NFIA_059740 [Neosartorya fischeri NRRL 181] gi|119406668|gb|EAW16619.1| conserved [Neosartorya fischeri NRRL 181]
  misc_feature (23)..(323): NCBI GI: 70983652 Blast Desc: integral membrane protein [Aspergillus fumigatus Af293] gi|66844979|gb|EAL85315.1| integral membrane protein [Aspergillus fumigatus Af293] gi|159123642|gb|EDP48761.1| protein
  misc_feature (28)..(357): NCBI GI: 239612727 Blast Desc: conserved [Ajellomyces dermatitidis ER-3]
MSGIPQEEIDRQLAHINDDLSTTVIGVSAAFTGIAIIAVVLRVISRRQKGVRLWWDDWLAIASVVPLIELDIATSLSAHYGTGRHLLWVLQYGNLTSLGKAQLGISAGYNFTMLFGKLSVLALYARVFTLQERYMRWGVWSVGILIGAWFLSGTLGVFLICRPLSKIWGVPEQCLPPKSSSVTFAAVNFVTDVFVLALPQPAIWKLQRTTSHKLSISFVFLLGIFATTITLVRLVLLDHSAVHQSPYDSTYTTVVTIVFTVLEPAFVVLCGSLPMLARFFKRSKAPTLKSDNLANSKTSSQGYFRWKSSREGSAIPASKSAKSYDQQSQSSRGPIKTSGEHRSESTEMPTKLSASFSSFPPFLKRKIG

SEQ ID NO: 13848 - DNA, 2137 bp, Muscodor strobelii
  misc_feature: SGI EST ID NO. CUFF.33175.0
  misc_feature: Variant of the nucleotide sequence at SEQ ID NO 13846
gaaacgcgtccgatggtctcaatacgacggaatgagaagaaaatacgagcatcattgttgaagtaacagcattcttaatcgttcgtctctgaagtcacaccggagcaactcgatacgccaaccctaacccatgtacgcagacgaaggctgcttgtaattccggggtctgatcacatgcacagtggccatctactgtctcgactgtcacctactgaaaatgagtactcgtacatctctgttccatgttgtcagcaaatgcagaaggatcattaccccaattattcggggaggtacacacgggatagagacgctttcagctcactgcaccacgagacattgagtgttgccattcgcgacccttcaatccttttgaccaggactgcactgatcgacatgtcagcgttggagatggtagcctgaatcgtcgcagctcggcaggaccctttgaggccaaatgaaatacacgctttctcgtgacagggtgcaagaagaccctggaagcggctattatggtgggtgaaagccacttcgtttactgaattcctgatatctgtcgtcttttacaattattcgatattctatatctgcgcggcgatctttagtcgcatctcgcacgccgacaatcatgagtggaattccgcaagaagagatcgatcgccagctagctcatatcaacgatgacttaagcactaccgtcatcggcgtgtcggccgcctttacaggtattgccattatcgccgttgttttgcgcgtgatatcgaggcgtcagaaaggggtccgactgtggtgggacgattggctcgcgattgcctcggtggtacccttgatcgagttagatatcgcgacatcattatccgcacactacgggaccggacgacatttactatgggtgttgcagtacggaaatctaactagcctcggaaaggcgcaacttggaatctcagccggttataactttacaatgctctttggcaaactatcagtccttgcactctacgcgcgagtctttaccttacaggagcgatacatgagatggggcgtttggtctgtcgggatcttgattggcgcgtggttcttgagcggcacattgggtgtatttctgatctgtcgacctcttagcaagatatggggtgtgcctgaacaatgtctccctcccaaatcatcaagcgtcacttttgcggcagtcaacttcgtaaccgacgtcttcgttctggctcttccccagcccgcgatctggaagttacaacgtacgacatcacacaagctgagtatcagttttgtgtttttacttggtatcttcgctacaactattactctcgtgcgactagttctccttgaccactcagctgttcatcagtctccatatgacagtacatacacaaccgttgtaaccatagtgttcaccgtgcttgagcctgcttttgttgtgttgtgcggatcattgccaatgctagcccggtttttcaagcgcagcaaagcgccaacgctgaaatccgacaaccttgccaactcgaagacgtcaagtcaaggatactttcgatggaaatcatctcgagagggctctgcaatcccagcgtcgaagtccgccaagtcttatgaccagcaatctcagagtagccgaggacctatcaagacgtctggcgaacatagatctgaaagcactgagatgtttgatctagaggctacagcagagactgactcgtatcatgctcaactatacccaggcctaccaagctatccgcgagcttctcgtcattcccaccattcttgaagcggaagataggttgaaagggtttcggtagttttggatttgtacataactatttgcccgaagtttactaatgcggctcacgtatgatcatgagttacacgatctgtacgactgcacgatgtttatatctaattatcgatagagttggatagtatatgactggaaatgatacccatacttcaattccgagactgcccttcggacaccatcagaatattcttatgcaattattcccaggacgttaacacccgttcaccgtccctttgttacatgaccgtaatatggggatgagttaacatgagattgactttgagactttcacttcagctgacggctttcagatagcggaagtgtcaaaaatctctt

SEQ ID NO: 13849 - DNA, 1578 bp, Muscodor strobelii
  misc_feature: SGI cDNA ID NO. 564551
  misc_feature: Encodes the peptide sequence at SEQ ID NO 13850
atgaatgggcaattaatggatatagaaaaaaatccctatacatgggatcacttttggcgaggtatacgggttctatgcctgggttggcttgccgctaccatcgtcgatctactctatcgtgagtatgtccgagtccctgcgccgaggattgggaagaacccgtggatttcgggcctttggcgcgcccgtgccgacttcttcaagcgcggaaaagatctgacaagagatggctatgcgcagtacaaagattccatgtactgggtgcagactggcgacatggagcgccttgtgctctcaacacagtttcttgacgagttacggaagttgcccaactccatactagatagtagaacggcagtcgtcgagcgaaatctaggctggtataaccgcgtcgatatcatattgaaaagcacatcccatgttgacgtgtgtcgaacccagctcgtacagaatctggcgcgggtggttgatgaccaggtcaacgatctcgatcgaattttcaagcacgagcttagtatctgctatgatgcgaaggaaaggtccgtaatccatttcttcaacgccgctgaagtgtttttgaacctggtgaatcgaagtgttgccaaaacactcgtcggaccagagcttgatcgcaatgagcgctggttgcagaccagcttagacacaacagtggcaactggaaaaatttgccgcgatctacaaggctatccaggaattcttcgcagcattgtgtatccttttctacaggcacggaagaccctaaataccaacttcgacaatgccatgggattgctacggcctatcattagtggccgtcaaaggggagacgcaaatgcggatatcttgcagtggctgatagacagctataaagcagatgacgagggcaaagaactagatatcccttttctcaccaatcagactctgtttgttgccatcgccgctacaagatcaacagccagctcaatcgtgaatactatattcgacttgatacatcactcggaataccaggacgatctccgaagcgagattgacgaggcgctatctgttcatggggcatggtgtttgggtgcccttgatcatatgaaaaagctcgacagcttcatgaaggaatcgcaaaggatgaatcaccatattttgctatcatttaatcgcaaagtacggcacagcgtcacactttcaaacggtgtttcaattccacccggcactttcatctcgacaccagcttactgggcggctagagatatggatggcaagggcgagaatttcgagccttggcgatttctgcatatgagggagcacgcggaggcgcacgggaagagcacagttccatttctttccagtacaccgagtgcccatgatcttcattggggttatgggcggaacgcgtgtcccggacgctttatggcggcagcagaggtcaaacttatgctagcttggatactctggcattttgagataacgtttccggaccaacaaacatctagaccagaaagtatctttgttgatgagcgagtaattccagatccgacgcagacgatcggattcagattgcgcgaaatgaagagaccatccgtgtag

SEQ ID NO: 13850 - protein, 525 aa, Muscodor strobelii
  misc_feature: SGI Peptide ID NO. 564551
  misc_feature (43)..(515): Pfam Id: PF00067 Pfam Desc: Cytochrome P450
  misc_feature (318)..(414): Pfam Id: PF00067 Pfam Desc: Cytochrome P450
  misc_feature (457)..(492): Pfam Id: PF00067 Pfam Desc: Cytochrome P450
  misc_feature (45)..(520): NCBI GI: 240108704 Blast Desc: Cytochrome P450 family protein [Coccidioides posadasii C735 delta SOWgp]
  misc_feature (22)..(507): NCBI GI: 154308603 Blast Desc: BC1G_07724 [Botryotinia fuckeliana B05.10] gi|150852675|gb|EDN27867.1| BC1G_07724 [Botryotinia fuckeliana B05.10]
  misc_feature (37)..(520): NCBI GI: 258578343 Blast Desc: conserved [Uncinocarpus reesii 1704] gi|237903619|gb|EEP78020.1| conserved [Uncinocarpus reesii 1704]
  misc_feature (24)..(523): NCBI GI: 67522282 Blast Desc: AN1598.2 [Aspergillus nidulans FGSC A4] gi|40745149|gb|EAA64305.1| AN1598.2 [Aspergillus nidulans FGSC A4]
  misc_feature (24)..(523): NCBI GI: 259486929 Blast Desc: TPA: cytochrome P450, (Eurofung) [Aspergillus nidulans FGSC A4]
  misc_feature (22)..(518): NCBI GI: 119494789 Blast Desc: cytochrome P450 monooxygenase, [Neosartorya fischeri NRRL 181] gi|119412362|gb|EAW22303.1| cytochrome P450 monooxygenase, [Neosartorya fischeri NRRL 181]
  misc_feature (28)..(521): NCBI GI: 74676162 Blast Desc: KO1_GIBFU RecName: Full=Ent-kaurene oxidase; AltName: Full=Cytochrome P450-4; AltName: Full=Cytochrome P450 503A1 gi|4127832|emb|CAA76703.1| cytochrome P450 [Gibberella fujikuroi]
  misc_feature (28)..(521): NCBI GI: 74691493 Blast Desc: KO1_GIBIN RecName: Full=Ent-kaurene oxidase; AltName: Full=Cytochrome P450-4; AltName: Full=Cytochrome P450 503A1 gi|42661491|emb|CAF31352.1| ent-kaurene oxidase [Fusarium
  misc_feature (22)..(521): NCBI GI: 211970315 Blast Desc: ent-kaurene oxidase [Gibberella moniliformis]
  misc_feature (43)..(519): NCBI GI: 259485760 Blast Desc: TPA: cytochrome P450, (Eurofung) [Aspergillus nidulans FGSC A4]
  misc_feature (28)..(521): SWISSPROT Homolog: EC 1.14.13.78 Ent-kaurene oxidase
MNGQLMDIEKNPYTWDHFWRGIRVLCLGWLAATIVDLLYREYVRVPAPRIGKNPWISGLWRARADFFKRGKDLTRDGYAQYKDSMYWVQTGDMERLVLSTQFLDELRKLPNSILDSRTAVVERNLGWYNRVDIILKSTSHVDVCRTQLVQNLARVVDDQVNDLDRIFKHELSICYDAKERSVIHFFNAAEVFLNLVNRSVAKTLVGPELDRNERWLQTSLDTTVATGKICRDLQGYPGILRSIVYPFLQARKTLNTNFDNAMGLLRPIISGRQRGDANADILQWLIDSYKADDEGKELDIPFLTNQTLFVAIAATRSTASSIVNTIFDLIHHSEYQDDLRSEIDEALSVHGAWCLGALDHMKKLDSFMKESQRMNHHILLSFNRKVRHSVTLSNGVSIPPGTFISTPAYWAARDMDGKGENFEPWRFLHMREHAEAHGKSTVPFLSSTPSAHDLHWGYGRNACPGRFMAAAEVKLMLAWILWHFEITFPDQQTSRPESIFVDERVIPDPTQTIGFRLREMKRPSV

SEQ ID NO: 13851 - DNA, 4132 bp, Muscodor strobelii
  misc_feature: SGI EST ID NO. CUFF.33171.0
  misc_feature: Variant of the nucleotide sequence at SEQ ID NO 13849
cggaagaaggcgtaggatctagtttcggagacggggcactactcaattgcttaagttctccgaaagtttatgcagctagtttgtcagattgttacatcactgcattcagagaaccatggttcactgaggatctctatcataagacttactccgcatccaggactaacagttcctcagttgcctagaaacataagctctgcccacagtacattctagcccaccgaaatgtattcgacggaacatgagagagcccttaattcgtcttctgtttaagagactatgaggaatgcgataccgaaagggggttttatgcatattgctagttagaaacatggatgagactaaggtagacctaagcagcatcccatgatggggaagagccagcagatacaatagtgtcaagttgtgatctgagatattattcgccctgaggaaaaaaagtccataccggatgacaagtagtaaacatgatgaacgtctcccaaactattgtctattgagcgtgaagcacaggtcgaacgtaacatcgacggctagtgtaacagcatcctccactagaacaacatgaatgggcaattaatggatatagaaaaaaatccctatacatgggatcacttttggcgaggtatacgggttctatgcctgggttggcttgccgctaccatcgtcgatctactctatcgtgagtatgtccgagtccctgcgccgaggattgggaagaacccgtggatttcgggcctttggcgcgcccgtgccgacttcttcaagcgcggaaaagatctgacaagagatggctatgcgcagtacaaagattccatgtactgggtgcagactggcgacatggagcgccttgtgctctcaacacagtttcttgacgagttacggaagttgcccaactccatactagatagtagaacggcagtcgtcgagcgaaatctaggctggtataaccgcgtcgatatcatattgaaaagcacatcccatgttgacgtgtgtcgaacccagctcgtacagaatctggcgcgggtggttgatgaccaggtcaacgatctcgatcgaattttcaagcacgagcttagtatctgctatgatgcgaaggaaaggtccgtaatccatttcttcaacgccgctgaagtgtttttgaacctggtgaatcgaagtgttgccaaaacactcgtcggaccagagcttgatcgcaatgagcgctggttgcagaccagcttagacacaacagtggcaactggaaaaatttgccgcgatctacaaggctatccaggaattcttcgcagcattgtgtatccttttctacaggcacggaagaccctaaataccaacttcgacaatgccatgggattgctacggcctatcattagtggccgtcaaaggggagacgcaaatgcggatatcttgcagtggctgatagacagctataaagcagatgacgagggcaaagaactagatatcccttttctcaccaatcagactctgtttgttgccatcgccgctacaagatcaacagccagctcaatcgtgaatactatattcgacttgatacatcactcggaataccaggacgatctccgaagcgagattgacgaggcgctatctgttcatggggcatggtgtttgggtgcccttgatcatatgaaaaagctcgacagcttcatgaaggaatcgcaaaggatgaatcaccatattttgctatcatttaatcgcaaagtacggcacagcgtcacactttcaaacggtgtttcaattccacccggcactttcatctcgacaccagcttactgggcggctagagatatggatggcaagggcgagaatttcgagccttggcgatttctgcatatgagggagcacgcggaggcgcacgggaagagcacagttccatttctttccagtacaccgagtgcccatgatcttcattggggttatgggcggaacgcgtgtcccggacgctttatggcggcagcagaggtcaaacttatgctagcttggatactctggcattttgagataacgtttccggaccaacaaacatctagaccagaaagtatctttgttgatgagcgagtaattccagatccgacgcagacgatcggattcagattgcgcgaaatgaagagaccatccgtgtagatacatcgtcggaccagtcgtagcagaaagacactttcaataagagaccttgttttgtagactataaactcaccgtagagtctgacataaattcactggcagttcaaagatgctgaaaactatactgaaactgatcggattcgcgccttttggccaaattgtaacttgaggaacctgcttcagaggtgtccagaatgaggccttaatcggtagacgttgatatcagaatcatgacagtcaaaaaaaagtgaatatgaaacttgatgtgatatttggcattgttgcattcaatgtaattgactttgtaataggcactgagtgtgctctttcggtgtgccagtaacactgtcgcgaaactaagcacttcggagttcataatactgtatgaattcaggatccttgatcaatctctcaaattggctcttctccatatcgagaagtatttcgacttcgtggtcatttttctttggcatcaatgcacacatgcctggccgatgatctgtgggaaagcgcaagaactccggtttgccctcggggccgaacagagggccccagtcacttctgcaaagattcatgtcacgccatgaagtcatgacgagatcctgtatcattgtatttgagaaaagcggacggcgaagaccaggctcaggaagtatgcgggacagcctgatggcatcgcgcgctgtgttcgcgtttcgcgccgtttctaatgaggatcgaatcatgggagcgatctgagctgcgttcttagattccacgagaaactctaaaggtacctcagttacgctgttcatgaaaacatttccggggaaatcgtctgaaatgcctaatgacttgcgcaagccaactggtacacggagacgcgacactttattagtagtgggctgaagatcatcttttctcgcgcgcataatgcattgccagacgtgagttgcttccgcgtcaaaggtcgatatgccttgagatgacttcatcgattctcttaagcgagcaatagacgtcttgggagcagaaaatacagccgttatcctgtcgcgaggtgcaggtcgtactataggtccactcgattcctcctgaagcccgagaagctgccatagtgaactattttctgcaatatcttcctgttgatcaggcgtcattgggtctagctcctcgcgaaagatctcaggcagatccagcgagacctctggagtaccatcggagtgttccgagatactcgatggctgagtctcgtcactcaaagctgtcaagtcgtcgcccttctcctgaagtgctttgcagtgttgtgaccatgatgtgaacagattcgattgaggcggaccatctccgaaggtatgattgacacatacggtcagtagacagccgccagggatgaagttggcctgggcgacgacaagtgacgatttcaacgcgtcttgaccaatcgatggctcgaacgttgtgggcactagataggagaagggcattccccgtcgtcgaagctcctcgtaagacgtattccattcattggactttgttgtcagatcattcatgaatatcggaactggtgtctgcttcaggtcttggtaggtgagctgtagtctgccgtcatgcacgctcacccgccctgccaagtatggcttttgctctatcgtcctcgcaagacccttcttgagtatgccgaacatactcttcctgttagactgagcacatgggaagcagaatatccagctttgtatgacgggcggccatatgctgtccagtgagctagacacgtatcgcttggcgctgttcatcttgacagtcagccatgaaagtcagagtccaatgctaatattccattcacggtcgctgagttccataccgatcatttgggtgacggtaccctcacctacatacatgtaggccctatgatagaataagcattcactttgcgctatttgcatacacgtctagactttgacaaatgcgattaatgcatagtgtgcgttgagatatatcgcagttcaaa

SEQ ID NO: 13852 - DNA, 1158 bp, Muscodor strobelii
  misc_feature: SGI cDNA ID NO. 564552
  misc_feature: Encodes the peptide sequence at SEQ ID NO 13853
atgaatgggcaattaatggatatagaaaaaaatccctatacatgggatcacttttggcgaggtatacgggttctatgcctgggttggcttgccgctaccatcgtcgatctactctatcgtgagtatgtccgagtccctgcgccgaggattgggaagaacccgtggatttcgggcctttggcgcgcccgtgccgacttcttcaagcgcggaaaagatctgacaagagatggctatgcgcagtacaaagattccatgtactgggtgcagactggcgacatggagcgccttgtgctctcaacacagtttcttgacgagttacggaagttgcccaactccatactagatagtagaacggcagtcgtcgagcgaaatctaggctggtataaccgcgtcgatatcatattgaaaagcacatcccatgttgacgtgtgtcgaacccagctcgtacagaatctggcgcgggtggttgatgaccaggtcaacgatctcgatcgaattttcaagcacgagcttagtatctgctatgatgcgaaggaaaggtccgtaatccatttcttcaacgccgctgaagtgtttttgaacctggtgaatcgaagtgttgccaaaacactcgtcggaccagagcttgatcgcaatgagcgctggttgcagaccagcttagacacaacagtggcaactggaaaaatttgccgcgatctacaaggctatccaggaattcttcgcagcattgtgtatccttttctacaggcacggaagaccctaaataccaacttcgacaatgccatgggattgctacggcctatcattagtggccgtcaaaggggagacgcaaatgcggatatcttgcagtggctgatagacagctataaagcagatgacgagggcaaagaactagatatcccttttctcaccaatcagactctgtttgttgccatcgccgctacaagatcaacagccagctcaatcgtgaatactatattcgacttgatacatcactcggaataccaggacgatctccgaagcgagattgacgaggcgctatctgttcatggggcatggtgtttgggtgcccttgatcatatgaaaaagctcgacagcttcatgaaggaatcgcaaaggatgaatcaccatattttgcgtaagtctatctcgtggtga

SEQ ID NO: 13853 - protein, 385 aa, Muscodor strobelii
  misc_feature: SGI Peptide ID NO. 564552
  misc_feature (22)..(376): NCBI GI: 154308603 Blast Desc: BC1G_07724 [Botryotinia fuckeliana B05.10] gi|150852675|gb|EDN27867.1| BC1G_07724 [Botryotinia fuckeliana B05.10]
  misc_feature (45)..(375): NCBI GI: 240108704 Blast Desc: Cytochrome P450 family protein [Coccidioides posadasii C735 delta SOWgp]
  misc_feature (37)..(384): NCBI GI: 258578343 Blast Desc: conserved [Uncinocarpus reesii 1704] gi|237903619|gb|EEP78020.1| conserved [Uncinocarpus reesii 1704]
  misc_feature (24)..(375): NCBI GI: 67522282 Blast Desc: AN1598.2 [Aspergillus nidulans FGSC A4] gi|40745149|gb|EAA64305.1| AN1598.2 [Aspergillus nidulans FGSC A4]
  misc_feature (24)..(375): NCBI GI: 259486929 Blast Desc: TPA: cytochrome P450, (Eurofung) [Aspergillus nidulans FGSC A4]
  misc_feature (22)..(385): NCBI GI: 169783730 Blast Desc: [Aspergillus oryzae RIB40] gi|83775071|dbj|BAE65194.1| protein product [Aspergillus oryzae]
  misc_feature (47)..(375): NCBI GI: 119494789 Blast Desc: cytochrome P450 monooxygenase, [Neosartorya fischeri NRRL 181] gi|119412362|gb|EAW22303.1| cytochrome P450 monooxygenase, [Neosartorya fischeri NRRL 181]
  misc_feature (53)..(383): NCBI GI: 238493559 Blast Desc: cytochrome P450, [Aspergillus flavus NRRL3357] gi|220696510|gb|EED52852.1| cytochrome P450, [Aspergillus flavus NRRL3357]
  misc_feature (53)..(383): NCBI GI: 162286824 Blast Desc: cytochrome P450 monooxygenase AtmP [Aspergillus flavus]
  misc_feature (22)..(375): NCBI GI: 74676162 Blast Desc: KO1_GIBFU RecName: Full=Ent-kaurene oxidase; AltName: Full=Cytochrome P450-4; AltName: Full=Cytochrome P450 503A1 gi|4127832|emb|CAA76703.1| cytochrome P450 [Gibberella fujikuroi]
  misc_feature (22)..(375): SWISSPROT Homolog: EC 1.14.13.78 Ent-kaurene oxidase
MNGQLMDIEKNPYTWDHFWRGIRVLCLGWLAATIVDLLYREYVRVPAPRIGKNPWISGLWRARADFFKRGKDLTRDGYAQYKDSMYWVQTGDMERLVLSTQFLDELRKLPNSILDSRTAVVERNLGWYNRVDIILKSTSHVDVCRTQLVQNLARVVDDQVNDLDRIFKHELSICYDAKERSVIHFFNAAEVFLNLVNRSVAKTLVGPELDRNERWLQTSLDTTVATGKICRDLQGYPGILRSIVYPFLQARKTLNTNFDNAMGLLRPIISGRQRGDANADILQWLIDSYKADDEGKELDIPFLTNQTLFVAIAATRSTASSIVNTIFDLIHHSEYQDDLRSEIDEALSVHGAWCLGALDHMKKLDSFMKESQRMNHHILRKSISW

SEQ ID NO: 13854 - DNA, 4132 bp, Muscodor strobelii; identical to SEQ ID NO: 13851
  misc_feature: SGI EST ID NO. CUFF.33171.0
  misc_feature: Variant of the nucleotide sequence at SEQ ID NO 13852

SEQ ID NO: 13855 - DNA, 1419 bp, Muscodor strobelii
  misc_feature: SGI cDNA ID NO. 564553
  misc_feature: Encodes the peptide sequence at SEQ ID NO 13856
atgaacagcgccaagcgatacgtgtctagctcactggacagcatatggccgcccgtcatacaaagctggatattctgcttcccatgtgctcagtctaacaggaagagtatgttcggcatactcaagaagggtcttgcgaggacgatagagcaaaagccatacttggcagggcgggtgagcgtgcatgacggcagactacagctcacctaccaagacctgaagcagacaccagttccgatattcatgaatgatctgacaacaaagtccaatgaatggaatacgtcttacgaggagcttcgacgacggggaatgcccttctcctatctagtgcccacaacgttcgagccatcgattggtcaagacgcgttgaaatcgtcacttgtcgtcgcccaggccaacttcatccctggcggctgtctactgaccgtatgtgtcaatcataccttcggagatggtccgcctcaatcgaatctgttcacatcatggtcacaacactgcaaagcacttcaggagaagggcgacgacttgacagctttgagtgacgagactcagccatcgagtatctcggaacactccgatggtactccagaggtctcgctggatctgcctgagatctttcgcgaggagctagacccaatgacgcctgatcaacaggaagatattgcagaaaatagttcactatggcagcttctcgggcttcaggaggaatcgagtggacctatagtacgacctgcacctcgcgacaggataacggctgtattttctgctcccaagacgtctattgctcgcttaagagaatcgatgaagtcatctcaaggcatatcgacctttgacgcggaagcaactcacgtctggcaatgcattatgcgcgcgagaaaagatgatcttcagcccactactaataaagtgtcgcgtctccgtgtaccagttggcttgcgcaagtcattaggcatttcagacgatttccccggaaatgttttcatgaacagcgtaactgaggtacctttagagtttctcgtggaatctaagaacgcagctcagatcgctcccatgattcgatcctcattagaaacggcgcgaaacgcgaacacagcgcgcgatgccatcaggctgtcccgcatacttcctgagcctggtcttcgccgtccgcttttctcaaatacaatgatacaggatctcgtcatgacttcatggcgtgacatgaatctttgcagaagtgactggggccctctgttcggccccgagggcaaaccggagttcttgcgctttcccacagatcatcggccaggcatgtgtgcattgatgccaaagaaaaatgaccacgaagtcgaaatacttctcgatatggagaagagccaatttgagagattgatcaaggatcctgaattcatacagtattatgaactccgaagtgcttag

SEQ ID NO: 13856 - protein, 472 aa, Muscodor strobelii
  misc_feature: SGI Peptide ID NO. 564553
  misc_feature (1)..(464): Pfam Id: PF02458 Pfam Desc: Transferase family
  misc_feature (10)..(472): NCBI GI: 121712473 Blast Desc: transferase family protein [Aspergillus clavatus NRRL 1] gi|119402000|gb|EAW12422.1| transferase family protein [Aspergillus clavatus NRRL 1]
  misc_feature (10)..(470): NCBI GI: 255931845 Blast Desc: Pc12g06370 [Penicillium chrysogenum Wisconsin 54-1255] gi|211582098|emb|CAP80264.1| Pc12g06370 [Penicillium chrysogenum Wisconsin 54-1255]
  misc_feature (10)..(472): NCBI GI: 67525641 Blast Desc: AN3278.2 [Aspergillus nidulans FGSC A4] gi|40744066|gb|EAA63246.1| AN3278.2 [Aspergillus nidulans FGSC A4] gi|259485755|tpe|CBF83044.1| TPA: conserved [Aspergillus FGSC
  misc_feature (23)..(469): NCBI GI: 46105218 Blast Desc: FG00237.1 [Gibberella zeae PH-1]
  misc_feature (23)..(465): NCBI GI: 256721019 Blast Desc: NECHADRAFT_52814 [Nectria haematococca mpVI 77-13-4]
  misc_feature (25)..(466): NCBI GI: 169786073 Blast Desc: [Aspergillus oryzae RIB40] gi|83776245|dbj|BAE66364.1| protein product [Aspergillus oryzae]
  misc_feature (25)..(466): NCBI GI: 238507007 Blast Desc: two-component sensor protein histidine protein kinase, [Aspergillus flavus NRRL3357] gi|220689418|gb|EED45769.1| two-component sensor protein histidine protein kinase, flavus
  misc_feature (38)..(466): NCBI GI: 121711952 Blast Desc: transferase family protein [Aspergillus clavatus NRRL 1] gi|119401743|gb|EAW12165.1| transferase family protein [Aspergillus clavatus NRRL 1]
  misc_feature (25)..(460): NCBI GI: 154290025 Blast Desc: BC1G_15841 [Botryotinia fuckeliana B05.10] gi|150848490|gb|EDN23683.1| BC1G_15841 [Botryotinia fuckeliana B05.10]
  misc_feature (10)..(470): NCBI GI: 145236314 Blast Desc: protein product [Aspergillus niger] gi|134075257|emb|CAK44898.1| protein product [Aspergillus niger]
MNSAKRYVSSSLDSIWPPVIQSWIFCFPCAQSNRKSMFGILKKGLARTIEQKPYLAGRVSVHDGRLQLTYQDLKQTPVPIFMNDLTTKSNEWNTSYEELRRRGMPFSYLVPTTFEPSIGQDALKSSLVVAQANFIPGGCLLTVCVNHTFGDGPPQSNLFTSWSQHCKALQEKGDDLTALSDETQPSSISEHSDGTPEVSLDLPEIFREELDPMTPDQQEDIAENSSLWQLLGLQEESSGPIVRPAPRDRITAVFSAPKTSIARLRESMKSSQGISTFDAEATHVWQCIMRARKDDLQPTTNKVSRLRVPVGLRKSLGISDDFPGNVFMNSVTEVPLEFLVESKNAAQIAPMIRSSLETARNANTARDAIRLSRILPEPGLRRPLFSNTMIQDLVMTSWRDMNLCRSDWGPLFGPEGKPEFLRFPTDHRPGMCALMPKKNDHEVEILLDMEKSQFERLIKDPEFIQYYELRSA

SEQ ID NO: 13857 - DNA, 960 bp, Muscodor strobelii
  misc_feature: SGI cDNA ID NO. 564554
  misc_feature: Encodes the peptide sequence at SEQ ID NO 13858
atggccccccagctcatatttggtacggcgtctttcggtatgcccaagaccgaatttcaagatgccgaggcggtcaaatctttgctgggaacgctaaaggagctgggcatcacacgtctagactcaggagcccgatatcctccgccgaaacctggaagatcggaggaattgattggcgaatctcagtgttccgacttcctcattgataccaagattttcacagataccgcaacagatggtagtggggaccttacaggcgaagctgttgtcaagtctgccaacgcgagtttgaaacgtctccagaaagaaagcgtcaatgtgcttcatatccacagagcggacccggccacgccggtcgaggagcaagttcgggccttcgccgaccagattgccaaaggtcattgtacaaagtggggtgtatccaatgtaccagttcctatgttagaggagatggtgaggatttgcgaacagaatggctggcagaaacctagctgctaccaaggagtctacaatcttgtgtctcgtggaatggagaacaaattgctgcctgtactacgaaagcatggcatcacatataattgtttccaaccccttgcggcaggttttctcacgggcaatttggtcaataacaagcaagaagggactcgatttggagacgatcatccgctcggagcaatcgcgcgacgcatgtttggaggagaagacttgatgagtgcaatgaagaaattcgacgcagaggtgaaagctcagggccttgtcccagttgaagtggctatccgctggcttgcatatcactcctctttgaccgacgacgacggtatcgttttgggcgccagcaagccctctcaggtcatagatactgttggtttgattcaaagaggccctcttcccgattacatactccctcttgtagatgagctctgggatagtgttaaaggcacccgtagcgagattgtctaa

SEQ ID NO: 13858 - protein, 319 aa, Muscodor strobelii
  misc_feature: SGI Peptide ID NO. 564554
  misc_feature (2)..(309): Pfam Id: PF00248 Pfam Desc: Aldo/keto reductase family
  misc_feature (51)..(205): Pfam Id: PF00248 Pfam Desc: Aldo/keto reductase family
  misc_feature (1)..(319): NCBI GI: 242816449 Blast Desc: oxidoreductase, [Talaromyces stipitatus ATCC 10500] gi|218715119|gb|EED14542.1| oxidoreductase, [Talaromyces stipitatus ATCC 10500]
  misc_feature (1)..(301): NCBI GI: 242798377 Blast Desc: aldo/keto reductase, [Talaromyces stipitatus ATCC 10500] gi|218716502|gb|EED15923.1| aldo/keto reductase, [Talaromyces stipitatus ATCC 10500]
  misc_feature (3)..(319): NCBI GI: 154316678 Blast Desc: BC1G_04270 [Botryotinia fuckeliana B05.10] gi|150846070|gb|EDN21263.1| BC1G_04270 [Botryotinia fuckeliana B05.10]
  misc_feature (3)..(307): NCBI GI: 46109720 Blast Desc: FG01742.1 [Gibberella zeae PH-1]
  misc_feature (2)..(297): NCBI GI: 242799919 Blast Desc: aldo/keto reductase, [Talaromyces stipitatus ATCC 10500] gi|218716824|gb|EED16245.1| aldo/keto reductase, [Talaromyces stipitatus ATCC 10500]
  misc_feature (3)..(319): NCBI GI: 255950784 Blast Desc: Pc22g22650 [Penicillium chrysogenum Wisconsin 54-1255] gi|211593176|emb|CAP99553.1| Pc22g22650 [Penicillium chrysogenum Wisconsin 54-1255]
  misc_feature (4)..(312): NCBI GI: 242771299 Blast Desc: aldo/keto reductase, [Talaromyces stipitatus ATCC 10500] gi|218721434|gb|EED20852.1| aldo/keto reductase, [Talaromyces stipitatus ATCC 10500]
  misc_feature (4)..(311): NCBI GI: 169772957 Blast Desc: [Aspergillus oryzae RIB40] gi|83768808|dbj|BAE58945.1| protein product [Aspergillus oryzae]
  misc_feature (4)..(312): NCBI GI: 119499147 Blast Desc: aldehyde reductase (GliO), [Neosartorya fischeri NRRL 181] gi|119414495|gb|EAW24434.1| aldehyde reductase (GliO), [Neosartorya fischeri NRRL 181]
  misc_feature (2)..(300): NCBI GI: 212541014 Blast Desc: aldo/keto reductase, [Penicillium marneffei ATCC 18224] gi|210067961|gb|EEA22053.1| aldo/keto reductase, [Penicillium marneffei ATCC 18224]
MAPQLIFGTASFGMPKTEFQDAEAVKSLLGTLKELGITRLDSGARYPPPKPGRSEELIGESQCSDFLIDTKIFTDTATDGSGDLTGEAVVKSANASLKRLQKESVNVLHIHRADPATPVEEQVRAFADQIAKGHCTKWGVSNVPVPMLEEMVRICEQNGWQKPSCYQGVYNLVSRGMENKLLPVLRKHGITYNCFQPLAAGFLTGNLVNNKQEGTRFGDDHPLGAIARRMFGGEDLMSAMKKFDAEVKAQGLVPVEVAIRWLAYHSSLTDDDGIVLGASKPSQVIDTVGLIQRGPLPDYILPLVDELWDSVKGTRSEIV

SEQ ID NO: 13859 - DNA, 1439 bp, Muscodor strobelii
  misc_feature: SGI EST ID NO. CUFF.33290.1
  misc_feature: Variant of the nucleotide sequence at SEQ ID NO 13857
caaagtagcatccctcagtcacatactgatgtacatacagaatgtaatacccaagatgaatagaatttgggcatacgcgacggcgtaaaacaagtaacgctacttggccatactgttgtactcaccaattcgtttttccgtttgtccaccccgattctccattccgttcctccatcctccgctcggcttacgaacctataacggcggggaagcttcagaagaacaaatcatattaaaaggcttaagtttatcgctagagcacctagttcgccaaggaaacatggccccccagctcatatttggtacggcgtctttcggtatgcccaagaccgaatttcaagatgccgaggcggtcaaatctttgctgggaacgctaaaggagctgggcatcacacgtctagactcaggagcccgatatcctccgccgaaacctggaagatcggaggaattgattggcgaatctcagtgttccgacttcctcattgataccaagattttcacagataccgcaacagatggtagtggggaccttacaggcgaagctgttgtcaagtctgccaacgcgagtttgaaacgtctccagaaagaaagcgtcaatgtgcttcatatccacagagcggacccggccacgccggtcgaggagcaagttcgggccttcgccgaccagattgccaaaggtcattgtacaaagtggggtgtatccaatgtaccagttcctatgttagaggagatggtgaggatttgcgaacagaatggctggcagaaacctagctgctaccaaggagtctacaatcttgtgtctcgtggaatggagaacaaattgctgcctgtactacgaaagcatggcatcacatataattgtttccaaccccttgcggcaggttttctcacgggcaatttggtcaataacaagcaagaagggactcgatttggagacgatcatccgctcggagcaatcgcgcgacgcatgtttggaggagaagacttgatgagtgcaatgaagaaattcgacgcagaggtgaaagctcagggccttgtcccagttgaagtggctatccgctggcttgcatatcactcctctttgaccgacgacgacggtatcgttttgggcgccagcaagccctctcaggtcatagatactgttggtttgattcaaagaggccctcttcccgattacatactccctcttgtagatgagctctgggatagtgttaaaggcacccgtagcgagattgtctaagcagactttagatggagttcaattatgtagctaggtagctacaaccaattatcctcaagacgaatccagtctggaagggaaaagcgtagcccatattaaaagcgctatagtatatgctaaatgcgaagatttctcagacgtttcgattcatagtgtttcagtccttatccgaaatacgtacgaagtgcgtgcgcattcg

SEQ ID NO: 13860 - DNA, 1011 bp, Muscodor strobelii
  misc_feature: SGI cDNA ID NO. 564555
  misc_feature: Encodes the peptide sequence at SEQ ID NO 13861
atggccccccagctcatatttggtacggcgtctttcggtatgcccaagaccgaatttcaagatgccgaggcggtcaaatctttgctgggaacgctaaaggagctgggcatcacacgtctagactcaggagcccgatatcctccgccgaaacctggaagatcggaggaattgattggcgaatctcagtgttccgacttcctcattgataccaagattttcacagataccgcaacagatggtagtggggaccttacaggcgaagctgttgtcaagtctgccaacgcgagtttgaaacgtctccagaaagaaagcgtaaatagaacctcatctttatacccaagctttgctgaacatttttcacaggtcaatgtgcttcatatccacagagcggacccggccacgccggtcgaggagcaagttcgggccttcgccgaccagattgccaaaggtcattgtacaaagtggggtgtatccaatgtaccagttcctatgttagaggagatggtgaggatttgcgaacagaatggctggcagaaacctagctgctaccaaggagtctacaatcttgtgtctcgtggaatggagaacaaattgctgcctgtactacgaaagcatggcatcacatataattgtttccaaccccttgcggcaggttttctcacgggcaatttggtcaataacaagcaagaagggactcgatttggagacgatcatccgctcggagcaatcgcgcgacgcatgtttggaggagaagacttgatgagtgcaatgaagaaattcgacgcagaggtgaaagctcagggccttgtcccagttgaagtggctatccgctggcttgcatatcactcctctttgaccgacgacgacggtatcgttttgggcgccagcaagccctctcaggtcatagatactgttggtttgattcaaagaggccctcttcccgattacatactccctcttgtagatgagctctgggatagtgttaaaggcacccgtagcgagattgtctaa

SEQ ID NO: 13861 - protein, 336 aa, Muscodor strobelii
  misc_feature: SGI Peptide ID NO. 564555
  misc_feature (2)..(326): Pfam Id: PF00248 Pfam Desc: Aldo/keto reductase family
  misc_feature (124)..(222): Pfam Id: PF00248 Pfam Desc: Aldo/keto reductase family
  misc_feature (1)..(336): NCBI GI: 242816449 Blast Desc: oxidoreductase, [Talaromyces stipitatus ATCC 10500] gi|218715119|gb|EED14542.1| oxidoreductase, [Talaromyces stipitatus ATCC 10500]
  misc_feature (1)..(318): NCBI GI: 242798377 Blast Desc: aldo/keto reductase, [Talaromyces stipitatus ATCC 10500] gi|218716502|gb|EED15923.1| aldo/keto reductase, [Talaromyces stipitatus ATCC 10500]
  misc_feature (3)..(336): NCBI GI: 154316678 Blast Desc: BC1G_04270 [Botryotinia fuckeliana B05.10] gi|150846070|gb|EDN21263.1| BC1G_04270 [Botryotinia fuckeliana B05.10]
  misc_feature (3)..(324): NCBI GI: 46109720 Blast Desc: FG01742.1 [Gibberella zeae PH-1]
  misc_feature (2)..(314): NCBI GI: 242799919 Blast Desc: aldo/keto reductase, [Talaromyces stipitatus ATCC 10500] gi|218716824|gb|EED16245.1| aldo/keto reductase, [Talaromyces stipitatus ATCC 10500]
  misc_feature (3)..(336): NCBI GI: 255950784 Blast Desc: Pc22g22650 [Penicillium chrysogenum Wisconsin 54-1255] gi|211593176|emb|CAP99553.1| Pc22g22650 [Penicillium chrysogenum Wisconsin 54-1255]
  misc_feature (4)..(329): NCBI GI: 242771299 Blast Desc: aldo/keto reductase, [Talaromyces stipitatus ATCC 10500] gi|218721434|gb|EED20852.1| aldo/keto reductase, [Talaromyces stipitatus ATCC 10500]
  misc_feature (4)..(328): NCBI GI: 169772957 Blast Desc: [Aspergillus oryzae RIB40] gi|83768808|dbj|BAE58945.1| protein product [Aspergillus oryzae]
  misc_feature (2)..(317): NCBI GI: 212541014 Blast Desc: aldo/keto reductase, [Penicillium marneffei ATCC 18224] gi|210067961|gb|EEA22053.1| aldo/keto reductase, [Penicillium marneffei ATCC 18224]
  misc_feature (4)..(329): NCBI GI: 119499147 Blast Desc: aldehyde reductase (GliO), [Neosartorya fischeri NRRL 181] gi|119414495|gb|EAW24434.1| aldehyde reductase (GliO), [Neosartorya fischeri NRRL 181]
MAPQLIFGTASFGMPKTEFQDAEAVKSLLGTLKELGITRLDSGARYPPPKPGRSEELIGESQCSDFLIDTKIFTDTATDGSGDLTGEAVVKSANASLKRLQKESVNRTSSLYPSFAEHFSQVNVLHIHRADPATPVEEQVRAFADQIAKGHCTKWGVSNVPVPMLEEMVRICEQNGWQKPSCYQGVYNLVSRGMENKLLPVLRKHGITYNCFQPLAAGFLTGNLVNNKQEGTRFGDDHPLGAIARRMFGGEDLMSAMKKFDAEVKAQGLVPVEVAIRWLAYHSSLTDDDGIVLGASKPSQVIDTVGLIQRGPLPDYILPLVDELWDSVKGTRSEIV

SEQ ID NO: 13862 - DNA, 1439 bp, Muscodor strobelii; identical to SEQ ID NO: 13859
  misc_feature: SGI EST ID NO. CUFF.33290.1
  misc_feature: Variant of the nucleotide sequence at SEQ ID NO 13860

SEQ ID NO: 13863 - DNA, 990 bp, Muscodor strobelii
  misc_feature: SGI cDNA ID NO. 564556
  misc_feature: Encodes the peptide sequence at SEQ ID NO 13864
atggcgcaacaacacggcttcttccagtatttgcgcctgaaactcatggtcactcttctccgaatttggctcaactcaaattcaaaggaagcccgaaaacgtgacgacgacctcatcccacctgaggtccccatagagcgcttgagcatctcatcccgcgaccagggacgcagtattagcgcgtatctctatctgccgccaggatactcgccatctacatcaaaaccgctgcccgttctactcaactttcatggcagcggtttcattttccacttgctaggcaccgatgggctttttagctcacgcctcgcacgtgatgctggcatcgcggtcctagacgctgactatcgcaaagggcctgaggatccattcccaggcgcaatacatgacgccgaggacctcttgcgctggattgcgtcgcaggaccatcgttttgatcggacgcgggtagctgtttctggtttcagcgcgggtgcaaatgttgcgatcgtgtgcgcaacggctttgcgaaaacagttcctttctgaaaatcgccttctagacattcggatggtattttcgatttacggtttgattgacatggtcacgccgccggaggacaaaatagtcccacatcccatcaatcggcatccgctctgggctctgcatctgttcaatgacagctatgcaccagacgttgattcgcggacagatccgatgatttcgccatgtttcgccgagctagatgactttccacaaactgttgtaatcattactcctgatggcgataccttgaagcctgaagctgatgctttggctgaccgcctaattgctaaaacaaacaagaaagtcatccatgagactccggcagacatgcctcacgcatttgacaaaggctgtgaggaaggtagtctcggatggactcgtcgtgaggaattatactccttagtgacaaagctgctcagggagtcacttgtcgcacaagagggtcgacttagcgaagagctatag

SEQ ID NO: 13864 - protein, 329 aa, Muscodor strobelii
  misc_feature: SGI Peptide ID NO. 564556
  misc_feature (80)..(291): Pfam Id: PF07859 Pfam Desc: alpha/beta hydrolase fold
  misc_feature (5)..(315): NCBI GI: 256730298 Blast Desc: NECHADRAFT_82652 [Nectria haematococca mpVI 77-13-4]
  misc_feature (5)..(318): NCBI GI: 46115932 Blast Desc: FG03808.1 [Gibberella zeae PH-1]
  misc_feature (10)..(317): NCBI GI: 256728625 Blast Desc: NECHADRAFT_50954 [Nectria haematococca mpVI 77-13-4]
  misc_feature (41)..(314): NCBI GI: 121704958 Blast Desc: esterase/lipase, [Aspergillus clavatus NRRL 1] gi|119398888|gb|EAW09316.1| esterase/lipase, [Aspergillus clavatus NRRL 1]
  misc_feature (63)..(318): NCBI GI: 256719834 Blast Desc: NECHADRAFT_89544 [Nectria haematococca mpVI 77-13-4]
  misc_feature (7)..(314): NCBI GI: 115385132 Blast Desc: conserved [Aspergillus terreus NIH2624] gi|114196805|gb|EAU38505.1| conserved [Aspergillus terreus NIH2624]
  misc_feature (10)..(314): NCBI GI: 159127895 Blast Desc: esterase/lipase, [Aspergillus fumigatus A1163]
  misc_feature (10)..(316): NCBI GI: 115385605 Blast Desc: conserved [Aspergillus terreus NIH2624] gi|114187796|gb|EAU29496.1| conserved [Aspergillus terreus NIH2624]
  misc_feature (7)..(314): NCBI GI: 119492857 Blast Desc: esterase/lipase, [Neosartorya fischeri NRRL 181] gi|119411886|gb|EAW21829.1| esterase/lipase, [Neosartorya fischeri NRRL 181]
  misc_feature (10)..(314): NCBI GI: 71000375 Blast Desc: esterase/lipase [Aspergillus fumigatus Af293] gi|66852519|gb|EAL92844.1| esterase/lipase, [Aspergillus fumigatus Af293]
MAQQHGFFQYLRLKLMVTLLRIWLNSNSKEARKRDDDLIPPEVPIERLSISSRDQGRSISAYLYLPPGYSPSTSKPLPVLLNFHGSGFIFHLLGTDGLFSSRLARDAGIAVLDADYRKGPEDPFPGAIHDAEDLLRWIASQDHRFDRTRVAVSGFSAGANVAIVCATALRKQFLSENRLLDIRMVFSIYGLIDMVTPPEDKIVPHPINRHPLWALHLFNDSYAPDVDSRTDPMISPCFAELDDFPQTVVIITPDGDTLKPEADALADRLIAKTNKKVIHETPADMPHAFDKGCEEGSLGWTRREELYSLVTKLLRESLVAQEGRLSEEL

SEQ ID NO: 13865 - DNA, 1648 bp, Muscodor strobelii
  misc_feature: SGI EST ID NO. CUFF.33177.0
  misc_feature: Variant of the nucleotide sequence at SEQ ID NO 13863
tactagctgatctgtcgtcgcaccctaaattacctaaagcatggcgcaacaacacggcttcttccagtatttgcgcctgaaactcatggtcactcttctccgaatttggctcaactcaaattcaaaggaagcccgaaaacgtgacgacgacctcatcccacctgaggtccccatagagcgcttgagcatctcatcccgcgaccagggacgcagtattagcgcgtatctctatctgccgccaggatactcgccatctacatcaaaaccgctgcccgttctactcaactttcatggcagcggtttcattttccacttgctaggcaccgatgggctttttagctcacgcctcgcacgtgatgctggcatcgcggtcctagacgctgactatcgcaaagggcctgaggatccattcccaggcgcaatacatgacgccgaggacctcttgcgctggattgcgtcgcaggaccatcgttttgatcggacgcgggtagctgtttctggtttcagcgcgggtgcaaatgttgcgatcgtgtgcgcaacggctttgcgaaaacagttcctttctgaaaatcgccttctagacattcggatggtattttcgatttacggtttgattgacatggtcacgccgccggaggacaaaatagtcccacatcccatcaatcggcatccgctctgggctctgcatctgttcaatgacagctatgcaccagacgttgattcgcggacagatccgatgatttcgccatgtttcgccgagctagatgactttccacaaactgttgtaatcattactcctgatggcgataccttgaagcctgaagctgatgctttggctgaccgcctaattgctaaaacaaacaagaaagtcatccatgagactccggcagacatgcctcacgcatttgacaaaggctgtgaggaaggtagtctcggatggactcgtcgtgaggaattatactccttagtgacaaagctgctcagggagtcacttgtcgcacaagagggtcgacttagcgaagagctatagagagtgactgtcgacacatgttgaagaactctgtcgcgaggattagcttatggcgtaaagcagttcgcaaatgaccggggtcctgagctaagcttaggttaatcatttaaaggtgtaatgtattactgaatcagttgcatcttggagcagattatctcggtttagagtcgaggcttcgttttattcgctgttgctctgaaagtagacgacagagcttaggaagtctgtacttgacgtcgtagtcttctatttgtaatataagactaactacttaaccgtcagtcgactgggtacaaggctggggggaagagtatgtcacgcagagaggctttacccaatttaagtgagcctatcatcgaacactatagccggtgcgactttcatatgagacttattttcatagatgtcaaaatagaccagttttgcgcccttcgaacagtagtcgacggagcgctcgagtacgtgatgcgaacccgtcgcctcaactgcaatgtcgaagttgtaattatccctgactaaattaaagccgactcatctccaaccgtccactgcgcttatgaagctgataaacttcgtcttctgtcttcttcgttttgttaataaattatatgttctaaa

SEQ ID NO: 13866 - DNA, 672 bp, Muscodor strobelii
  misc_feature: SGI cDNA ID NO. 564557
  misc_feature: Encodes the peptide sequence at SEQ ID NO 13867
atgtctctcaagcccatcaagctctatggcgtcttcggacccaatgcgttcaaagtccttgtgattcttgaagagctcggcctcgcatgggacaattcaggggtcacaatcgcggacgtcaagaagcccgactatcttgccgtgaaccccaacggccgactacctgctatctacgaccccaacacggacctcacactttgggaatcgggtgctatcattgaatatctcattgagacatacgacatagaaaccaccattagtttccccaagggctccaaggaatcctatttatgcaagcaatggttatactaccaagcttctgggcaaggtccctactacgggcaggctgtctggttcaccaaataccaccaggacaaggtgcctagtgctattgagcgatacgtgaaggaaatcaatcgcgtaaccggcgttttggagagcgttttatcagctgcaaataaagccaatagcgacagctcttacttggtcggtaacaagctgacttttgccgatatcgcattttactcgtggcagacaacgattgtgttggcaatgggcgaggacgtcattgattacaaagtctttccgagagttgaggcttgggtcgagaaaatgggccaactgcagtctgtcaagaacgccataatggttgctaacaacaaccgtgagtaa

SEQ ID NO: 13867 - protein, 223 aa, Muscodor strobelii
  misc_feature: SGI Peptide ID NO. 564557
  misc_feature (4)..(78): Pfam Id: PF02798 Pfam Desc: Glutathione S-transferase, N-terminal domain
  misc_feature (145)..(209): Pfam Id: PF00043 Pfam Desc: Glutathione S-transferase, C-terminal domain
  misc_feature (3)..(215): NCBI GI: 115433877 Blast Desc: ATEG_08454 [Aspergillus terreus NIH2624] gi|114189927|gb|EAU31627.1| ATEG_08454 [Aspergillus terreus NIH2624]
  misc_feature (1)..(215): NCBI GI: 169609038 Blast Desc: SNOG_07604 [Phaeosphaeria nodorum SN15] gi|111063950|gb|EAT85070.1| SNOG_07604 [Phaeosphaeria nodorum SN15]
  misc_feature (3)..(215): NCBI GI: 70993064 Blast Desc: glutathione S-transferase Ure2-like [Aspergillus fumigatus Af293] gi|66849014|gb|EAL89342.1| glutathione S-transferase Ure2-like, [Aspergillus fumigatus Af293]
  misc_feature (3)..(215): NCBI GI: 59799755 Blast Desc: glutathione transferase 2 [Aspergillus fumigatus]
  misc_feature (2)..(215): NCBI GI: 85095248 Blast Desc: NCU05780 [Neurospora crassa OR74A] gi|28921499|gb|EAA30804.1| NCU05780 [Neurospora crassa OR74A]
  misc_feature (2)..(215): NCBI GI: 116179510 Blast Desc: CHGG_00383 [Chaetomium globosum CBS 148.51] gi|88184680|gb|EAQ92148.1| CHGG_00383 [Chaetomium globosum CBS 148.51]
  misc_feature (3)..(215): NCBI GI: 119499680 Blast Desc: glutathione S-transferase, [Neosartorya fischeri NRRL 181] gi|119414762|gb|EAW24700.1| glutathione S-transferase, [Neosartorya fischeri NRRL 181]
  misc_feature (2)..(215): NCBI GI: 39957013 Blast Desc: MGG_09138 [Magnaporthe grisea 70-15] gi|149210947|ref|XP_001522848.1| MGCH7_ch7g943 [Magnaporthe grisea 70-15] gi|86196898|gb|EAQ71536.1| MGCH7_ch7g943 grisea
  misc_feature (3)..(213): NCBI GI: 145233877 Blast Desc: An02g11830 [Aspergillus niger] gi|134057249|emb|CAK96412.1| protein product [Aspergillus niger]
  misc_feature (2)..(215): NCBI GI: 115398221 Blast Desc: ATEG_05524 [Aspergillus terreus NIH2624] gi|114192893|gb|EAU34593.1| ATEG_05524 [Aspergillus terreus NIH2624]
  misc_feature (13)..(205): SWISSPROT Homolog: EC 2.5.1.18 Glutathione transferase
MSLKPIKLYGVFGPNAFKVLVILEELGLAWDNSGVTIADVKKPDYLAVNPNGRLPAIYDPNTDLTLWESGAIIEYLIETYDIETTISFPKGSKESYLCKQWLYYQASGQGPYYGQAVWFTKYHQDKVPSAIERYVKEINRVTGVLESVLSAANKANSDSSYLVGNKLTFADIAFYSWQTTIVLAMGEDVIDYKVFPRVEAWVEKMGQLQSVKNAIMVANNNRE

SEQ ID NO: 13868 - DNA, 1341 bp, Muscodor strobelii
  misc_feature: SGI EST ID NO. CUFF.33180.0
  misc_feature: Variant of the nucleotide sequence at SEQ ID NO 13866
caacatcattgttcagcagttgatgacaaaaagcatctttttcaacatggcaagacggagaatatgattcaaatgattccaaagattgaatacatataggcatgattctcaatgccgtcaatcgcatcctcttctagcccttagcataatctagcaaattcaagcatctaatctcgttcaagagctacttactccaacaaaatataccgaatttctcgcaaatatacaagaaaacatcctaaaacatgtctctcaagcccatcaagctctatggcgtcttcggacccaatgcgttcaaagtccttgtgattcttgaagagctcggcctcgcatgggacaattcaggggtcacaatcgcggacgtcaagaagcccgactatcttgccgtgaaccccaacggccgactacctgctatctacgaccccaacacggacctcacactttgggaatcgggtgctatcattgaatatctcattgagacatacgacatagaaaccaccattagtttccccaagggctccaaggaatcctatttatgcaagcaatggttatactaccaagcttctgggcaaggtccctactacgggcaggctgtctggttcaccaaataccaccaggacaaggtgcctagtgctattgagcgatacgtgaaggaaatcaatcgcgtaaccggcgttttggagagcgttttatcagctgcaaataaagccaatagcgacagctcttacttggtcggtaacaagctgacttttgccgatatcgcattttactcgtggcagacaacgattgtgttggcaatgggcgaggacgtcattgattacaaagtctttccgagagttgaggcttgggtcgagaaaatgggccaactgcagtctgtcaagaacgccataatggttgctaacaacaaccgtgagtaaaaagattgctatcttcaggcgccatatgcttagtatccttgcgtaaggccaaagcatgaattgtcattactagttcaaaacatattaatcaggctttatgatattgccttcatttgcataccgagactgctcgcacgcaacacgcaattatgtatgcgagtttctaggatccggacatcagcgtcgattgaacaaaaatggcatgtattctctaacaaattctaacttagttcgatacactgtagcaccttcgaattgatattaatgtcggtgtctgacctcgactcctatgctcccattcgtcttgcagcccatcgcgaccacttccaaggagcctcataaccaccgggctcagcatcatagaagtcgaagccacccacacctccgaaatccgcatactgatcaacaagcttctcaatagttg

SEQ ID NO: 13869 - DNA, 768 bp, Muscodor strobelii
  misc_feature: SGI cDNA ID NO. 564558
  misc_feature: Encodes the peptide sequence at SEQ ID NO 13870
atgaaaaacattcttgctaaagcattcgtattattgccagcccttggctctgcagtagttagtgctgggcaacaatcctgcactaaaagagtggtccaatactacggaatacaagtcaacgaccagggatcaaagtttcacatttcacaattagtcaataatacggataacaaaacgtatgcgacaaatgtcctcatgggcgaattcgacttgctcaagaacaaaacgatgggtttgaacgcaggagatcccgccaaggaagccaacaactggttctgggacgaaatcaagatggtgcaaaacggtggtgtcaagcgtctacgatcggactttggctccgacttcatcataacgctcgcacccgtatccaatgccctcctgtcacagtccgagagtgttagccaattcagctatcaggcccttgaaaagcaagccggcagtgacatcgactggtacaatgcacagttctatggcggttcatggcaaggcctgaagactcctgcgttctacaagcgatgcatcgaagagggagggtggaagccggatcgaattgtaacaacaattactacaagctctgatttcacatatccttatcctcgatctagttgggttggactgaatgagacaggcccaactattgagaagcttgttgatcagtatgcggatttcggaggtgtgggtggcttcgacttctatgatgctgagcccggtggttatgaggctccttggaagtggtcgcgatgggctgcaagacgaatgggagcatag

SEQ ID NO: 13870 - protein, 255 aa, Muscodor strobelii
  misc_feature: SGI Peptide ID NO. 564558
  misc_feature (104)..(254): NCBI GI: 238839322 Blast Desc: chitinase 3 [Microsporum canis CBS 113480]
  misc_feature (104)..(253): NCBI GI: 284033338 Blast Desc: coagulation factor 5/8 type domain protein [Kribbella flavida DSM 17836] gi|283812631|gb|ADB34470.1| coagulation factor 5/8 type domain protein [Kribbella flavida DSM 17836]
  misc_feature (104)..(247): NCBI GI: 46123183 Blast Desc: FG05969.1 [Gibberella zeae PH-1]
  misc_feature (104)..(246): NCBI GI: 171693585 Blast Desc: protein product [Podospora anserina] gi|170946741|emb|CAP73545.1| protein product [Podospora anserina]
  misc_feature (104)..(247): NCBI GI: 256731096 Blast Desc: glycoside hydrolase family 18 [Nectria haematococca mpVI 77-13-4]
  misc_feature (104)..(246): NCBI GI: 145242750 Blast Desc: An09g06340 [Aspergillus niger] gi|134078504|emb|CAK40426.1| protein product [Aspergillus niger]
  misc_feature (104)..(254): NCBI GI: 255949086 Blast Desc: Pc22g13860 [Penicillium chrysogenum Wisconsin 54-1255] gi|211592327|emb|CAP98674.1| Pc22g13860 [Penicillium chrysogenum Wisconsin 54-1255]
  misc_feature (104)..(247): NCBI GI: 164426270 Blast Desc: NCU01393 [Neurospora crassa OR74A] gi|28950104|emb|CAD70866.1| related to chitinase [Neurospora crassa] gi|157071267|gb|EAA31386.2| NCU01393 [Neurospora crassa
  misc_feature (104)..(246): NCBI GI: 119498783 Blast Desc: class III chitinase, [Neosartorya fischeri NRRL 181] gi|119414313|gb|EAW24252.1| class III chitinase, [Neosartorya fischeri NRRL 181]
  misc_feature (104)..(246): NCBI GI: 119183278 Blast Desc: CIMG_06595 [Coccidioides immitis RS]
MKNILAKAFVLLPALGSAVVSAGQQSCTKRVVQYYGIQVNDQGSKFHISQLVNNTDNKTYATNVLMGEFDLLKNKTMGLNAGDPAKEANNWFWDEIKMVQNGGVKRLRSDFGSDFIITLAPVSNALLSQSESVSQFSYQALEKQAGSDIDWYNAQFYGGSWQGLKTPAFYKRCIEEGGWKPDRIVTTITTSSDFTYPYPRSSWVGLNETGPTIEKLVDQYADFGGVGGFDFYDAEPGGYEAPWKWSRWAARRMGA

SEQ ID NO: 13871 - DNA, 567 bp, Muscodor strobelii
  misc_feature: SGI cDNA ID NO. 564559
  misc_feature: Encodes the peptide sequence at SEQ ID NO 13872
tccgagggcgaactgctcgttgcggaggtccagcaactcttcggcgatggcgcagccgttcttcatactcgatcgcttaaatacggaaagttgcgtaatggactgttcgtagcggtcagtggcacaggtggagggggaggagtcgtacgagcccgtcgccaggcattcgccatggatataggcacaggtcacgcagacgatgccgagaagatcgatgtcatacttggtgttaatgggtatatatggatcagcaagcatatcgagggcgaagggccgacgtctgaggcgagtaccaccgccattactagggtcgaggagagtgttgggttgaatgtctattcgagtcagaatgatgagatttcggtctctactatgcgggagattgcacgcgtcaggggtgtgatcgaggcgctggttgagaatggactgagggtcgatgaggattatgtcgttagggggtatgcggaggctgttgagatggcgaggggcgatggagatggggaggaaacgctgtatcttggtggggaacgggggaggaggttggctgctgctttggttgggcggtag

SEQ ID NO: 13872 - protein, 188 aa, Muscodor strobelii
  misc_feature: SGI Peptide ID NO. 564559
  misc_feature (1)..(187): NCBI GI: 46136891 Blast Desc: FG09961.1 [Gibberella zeae PH-1]
  misc_feature (1)..(185): NCBI GI: 256732108 Blast Desc: [Nectria haematococca mpVI 77-13-4]
  misc_feature (1)..(187): NCBI GI: 29150123 Blast Desc: related to 3'->5' exoribonuclease [Neurospora crassa]
  misc_feature (1)..(185): NCBI GI: 164426690 Blast Desc: NCU04009 [Neurospora crassa OR74A] gi|157071436|gb|EAA28388.2| conserved [Neurospora crassa OR74A]
  misc_feature (1)..(185): NCBI GI: 171677939 Blast Desc: protein product [Podospora anserina] gi|170937038|emb|CAP61697.1| protein product [Podospora anserina]
  misc_feature (1)..(188): NCBI GI: 145612113 Blast Desc: MGG_08100 [Magnaporthe grisea 70-15] gi|145019344|gb|EDK03572.1| MGG_08100 [Magnaporthe grisea 70-15]
  misc_feature (1)..(185): NCBI GI: 154316807 Blast Desc: BC1G_03821 [Botryotinia fuckeliana B05.10] gi|150845433|gb|EDN20626.1| BC1G_03821 [Botryotinia fuckeliana B05.10]
  misc_feature (1)..(187): NCBI GI: 261351727 Blast Desc: exosome complex exonuclease RRP4 [Verticillium albo-atrum VaMs.102]
  misc_feature (1)..(179): NCBI GI: 156043601 Blast Desc: SS1G_10804 [Sclerotinia sclerotiorum 1980] gi|154695191|gb|EDN94929.1| SS1G_10804 [Sclerotinia sclerotiorum 1980]
  misc_feature (1)..(188): NCBI GI: 238845799 Blast Desc: exosome complex exonuclease RRP4 [Microsporum canis CBS 113480]
SEGELLVAEVQQLFGDGAAVLHTRSLKYGKLRNGLFVAVSGTGGGGGVVRARRQAFAMDIGTGHADDAEKIDVILGVNGYIWISKHIEGEGPTSEASTTAITRVEESVGLNVYSSQNDEISVSTMREIARVRGVIEALVENGLRVDEDYVVRGYAEAVEMARGDGDGEETLYLGGERGRRLAAALVGR

SEQ ID NO: 13873 - DNA, 1542 bp, Muscodor strobelii
  misc_feature: SGI cDNA ID NO. 564560
  misc_feature: Encodes the peptide sequence at SEQ ID NO 13874
atgacatcagacatcaagcttgcgcccttcgaggcaacgcctctagatgagatcgccagaatatctgcctcggtgcgcgcagcctatgcctcacaaaagacgaaagacgtagaatggcgtctcgtacagctccggaagctctactggggcgtcaccgactacacaccacagcttgttgcagcgctgacacaagatattggcaaatcagctcccgaagccaccatgacggaagtagtacacttcctctctgatctccagaacaccatcaagaaactcaagacctggatcaaagacgacacgaatctagagtaccctatcgcattcatggctctgaaaccgcgtcttcgcaaagagccattaggcccagctctcatcatcgggccttacaatttcccgttcatgctgaattttgctcccttcgctggtgcgatcgccgctggatgtactgccatcatcaagccgtccgagagtgcaccagccacggctatggtgatgaaggagatcgtcgacaagtacctagacccgggttctttctacatcgtgaacggcgctgtccccgagacgacggcacttttgaatgagaagtgggagaagatcttctacacaggcaacccgacggttgcccgcatcatcgctaagaaggccgccgagaccttgacgccggtcgttcttgagcttggtggcaggaatcccgccttcatctccaaggctgctaacttaccgctcgcagcacgcagactcttatggggaaagacggttaacgttggacaagtctgcctgtctcacaactacgtctgcgtcgagagagaacttgttgacgacttcatcaagtatctcaacgcgacatacaaagagttcttccccaacggtgcaaaagccagcgctgactacggaaaaatcatcaacgagcggcaattcgaccgcatgaagaagatgctggacacgacgaacggcaagatcgtcatgggcggtgagacagatagagaaagtctgttcattgcaccaactgctgtgctagtcgactcgatcgacgacccgatgatgactgacgaatcgttcggtcccatctggtctatttaccctgtcgccgatgtcaatgaggctatcaaggtaatgaacaaggttgatcatacgccgttgagtctcatgacatttggctccaaggctgagaacgaacttatcctaaacagcgtaacatcaggcggcgcatccctaaacgactcgtacatgcacggctgcgtctcaacgctccccttcggcggcgtaggcgagtcgggaacaggtgcctaccacgggaaatcgtccttcgacaccttcacccacagtcgcaccatcgtcgcgacgccgagctggatggacaacctgatgcgcgccagatatgccccgcacagcccgaaagattacaagcagttcgtctggctcaatagcgcgaagcccgacttcgaccgcgacgggaagcagatcacgggcttggggtactggatctggatgatctttggtctgggcggaccgactgctaaaggtcctgaagccaagctctga

SEQ ID NO: 13874 - protein, 513 aa, Muscodor strobelii
  misc_feature: SGI Peptide ID NO. 564560
  misc_feature (6)..(445): Pfam Id: PF00171 Pfam Desc: Aldehyde dehydrogenase family
  misc_feature (116)..(373): Pfam Id: PF00171 Pfam Desc: Aldehyde dehydrogenase family
  misc_feature (400)..(445): Pfam Id: PF00171 Pfam Desc: Aldehyde dehydrogenase family
  misc_feature (3)..(502): NCBI GI: 85086113 Blast Desc: NCU04013 [Neurospora crassa OR74A] gi|28918722|gb|EAA28392.1| conserved [Neurospora crassa OR74A] gi|29150126|emb|CAD79686.1| related to aldehyde dehydrogenase
  misc_feature (3)..(513): NCBI GI: 154316797 Blast Desc: BC1G_03816 [Botryotinia fuckeliana B05.10] gi|150845428|gb|EDN20621.1| BC1G_03816 [Botryotinia fuckeliana B05.10]
  misc_feature (3)..(508): NCBI GI: 156043591 Blast Desc: SS1G_10799 [Sclerotinia sclerotiorum 1980] gi|154695186|gb|EDN94924.1| SS1G_10799 [Sclerotinia sclerotiorum 1980]
  misc_feature (10)..(508): NCBI GI: 171677937 Blast Desc: protein product [Podospora anserina] gi|170937037|emb|CAP61696.1| protein product [Podospora anserina]
  misc_feature (1)..(508): NCBI GI: 116201533 Blast Desc: CHGG_08651 [Chaetomium globosum CBS 148.51] gi|88177169|gb|EAQ84637.1| CHGG_08651 [Chaetomium globosum CBS 148.51]
  misc_feature (10)..(512): NCBI GI: 145612641 Blast Desc: MGG_07270 [Magnaporthe grisea 70-15] gi|145019774|gb|EDK04002.1| MGG_07270 [Magnaporthe grisea 70-15]
  misc_feature (10)..(501): NCBI GI: 189193167 Blast Desc: fatty aldehyde dehydrogenase [Pyrenophora tritici-repentis Pt-1C-BFP] gi|187978486|gb|EDU45112.1| fatty aldehyde dehydrogenase [Pyrenophora tritici-repentis Pt-1C-BFP]
  misc_feature (4)..(508): NCBI GI: 261355721 Blast Desc: aldehyde dehydrogenase 3I1 [Verticillium albo-atrum VaMs.102]
  misc_feature (6)..(494): NCBI GI: 169605505 Blast Desc: SNOG_05777 [Phaeosphaeria nodorum SN15] gi|111065721|gb|EAT86841.1| SNOG_05777 [Phaeosphaeria nodorum SN15]
  misc_feature (7)..(502): NCBI GI: 238838485 Blast Desc: aldehyde dehydrogenase 3B1 [Microsporum canis CBS 113480]
  misc_feature (15)..(466): SWISSPROT Homolog: EC 1.2.1.5 Aldehyde dehydrogenase (NAD(P)(+))
  misc_feature: Useful for introducing or modulating the production of volatile compounds
  misc_feature: Useful for fungicidal and/or biocontrol applications
MTSDIKLAPFEATPLDEIARISASVRAAYASQKTKDVEWRLVQLRKLYWGVTDYTPQLVAALTQDIGKSAPEATMTEVVHFLSDLQNTIKKLKTWIKDDTNLEYPIAFMALKPRLRKEPLGPALIIGPYNFPFMLNFAPFAGAIAAGCTAIIKPSESAPATAMVMKEIVDKYLDPGSFYIVNGAVPETTALLNEKWEKIFYTGNPTVARIIAKKAAETLTPVVLELGGRNPAFISKAANLPLAARRLLWGKTVNVGQVCLSHNYVCVERELVDDFIKYLNATYKEFFPNGAKASADYGKIINERQFDRMKKMLDTTNGKIVMGGETDRESLFIAPTAVLVDSIDDPMMTDESFGPIWSIYPVADVNEAIKVMNKVDHTPLSLMTFGSKAENELILNSVTSGGASLNDSYMHGCVSTLPFGGVGESGTGAYHGKSSFDTFTHSRTIVATPSWMDNLMRARYAPHSPKDYKQFVWLNSAKPDFDRDGKQITGLGYWIWMIFGLGGPTAKGPEAKL

SEQ ID NO: 13875 - DNA, 2867 bp, Muscodor strobelii
  misc_feature: SGI EST ID NO. CUFF.33335.1
  misc_feature: Variant of the nucleotide sequence at SEQ ID NO 13873
ccggcagatgagaaacggcggaagcaaccgtcttcgtcttagcttcagatagcttcaccctgtcataagtgatcatcaaagctctcgactgtagcctcatgtatgcctcggccgtgctaagtctcagcaccctggtcaacgcaactagtcccattacctaaagcagcaaacctcacattgttgaacgatcgagttcccctcaacgctctcacgggttgccaccgtatataatttttttattgaaatactctacttaccaaccaggccgcttttctatcctttcttcgttaagactcatcaaaaccgtgtatactaaagctcagtaatcatgacatcagacatcaagcttgcgcccttcgaggcaacgcctctagatgagatcgccagaatatctgcctcggtgcgcgcagcctatgcctcacaaaagacgaaagacgtagaatggcgtctcgtacagctccggaagctctactggggcgtcaccgactacacaccacagcttgttgcagcgctgacacaagatattggcaaatcagctcccgaagccaccatgacggaagtagtacacttcctctctgatctccagaacaccatcaagaaactcaagacctggatcaaagacgacacgaatctagagtaccctatcgcattcatggctctgaaaccgcgtcttcgcaaagagccattaggcccagctctcatcatcgggccttacaatttcccgttcatgctgaattttgctcccttcgctggtgcgatcgccgctggatgtactgccatcatcaagccgtccgagagtgcaccagccacggctatggtgatgaaggagatcgtcgacaagtacctagacccgggttctttctacatcgtgaacggcgctgtccccgagacgacggcacttttgaatgagaagtgggagaagatcttctacacaggcaacccgacggttgcccgcatcatcgctaagaaggccgccgagaccttgacgccggtcgttcttgagcttggtggcaggaatcccgccttcatctccaaggctgctaacttaccgctcgcagcacgcagactcttatggggaaagacggttaacgttggacaagtctgcctgtctcacaactacgtctgcgtcgagagagaacttgttgacgacttcatcaagtatctcaacgcgacatacaaagagttcttccccaacggtgcaaaagccagcgctgactacggaaaaatcatcaacgagcggcaattcgaccgcatgaagaagatgctggacacgacgaacggcaagatcgtcatgggcggtgagacagatagagaaagtctgttcattgcaccaactgctgtgctagtcgactcgatcgacgacccgatgatgactgacgaatcgttcggtcccatctggtctatttaccctgtcgccgatgtcaatgaggctatcaaggtaatgaacaaggttgatcatacgccgttgagtctcatgacatttggctccaaggctgagaacgaacttatcctaaacagcgtaacatcaggcggcgcatccctaaacgactcgtacatgcacggctgcgtctcaacgctccccttcggcggcgtaggcgagtcgggaacaggtgcctaccacgggaaatcgtccttcgacaccttcacccacagtcgcaccatcgtcgcgacgccgagctggatggacaacctgatgcgcgccagatatgccccgcacagcccgaaagattacaagcagttcgtctggctcaatagcgcgaagcccgacttcgaccgcgacgggaagcagatcacgggcttggggtactggatctggatgatctttggtctgggcggaccgactgctaaaggtcctgaagccaagctctgagtttcgaccgggttcgaatgcgtcggtacgggcacccccttgctttggttgcccgattgtctagaagcggaagcgtgtatatcttatgaagtaatgggattagaaacatattgtccgaaaatgcatatatacatcttgtattagttgactgctctcctcctagcccgaggtcgctttcctatgtttatgaatataattactgttgaacttaggttttcatttgccatgcaagcttattaagtttcttcgtctagctttcgtaggctatccccaccacacttgagggtttgtaacatagactctatgccgtaagcatcgcgagattaggcatacttgtctataagcccctggtatcattcataatctctcatacacactctcacacattctcttctcgcctctcttccgtaactcaactcaacccaccgtagctaccgcccaaccaaagcagcagccaacctcctcccccgttccccaccaagatacagcgtttcctccccatctccatcgcccctcgccatctcaacagcctccgcataccccctaacgacataatcctcatcgaccctcagtccattctcaaccagcgcctcgatcacacccctgacgcgtgcaatctcccgcatagtagagaccgaaatctcatcattctgactcgaatagacattcaacccaacactctcctcgaccctagtaatggcggtggtactcgcctcagacgtcggcccttcgccctcgatatgcttgctgatccatatatacccattaacaccaagtatgacatcgatcttctcggcatcgtctgcgtgacctgtgcctatatccatggcgaatgcctggcgacgggctcgtacgactcctccccctccacctgtgccactgaccgctacgaacagtccattacgcaactttccgtatttaagcgatcgagtatgaagaacggctgcgccatcgccgaagagttgctggacctccgcaacgagcagttcgccctcgg

SEQ ID NO: 13876 - DNA, 1632 bp, Muscodor strobelii
  misc_feature: SGI cDNA ID NO. 564561
  misc_feature: Reduced expression when VOC is produced
  misc_feature: Encodes the peptide sequence at SEQ ID NO 13877
atgacatcagacatcaagcttgcgcccttcgaggcaacgcctctagatgagatcgccagaatatctgcctcggtgcgcgcagcctatgcctcacaaaagacgaaagacgtagaatggcgtctcgtacagctccggaagctctactggggcgtcaccgactacacaccacagcttgttgcagcgctgacacaagatattggcaaatcagctcccgaagccaccatgacggaagtagtacacttcctctctgatctccagaacaccatcaagaaactcaagacctggatcaaagacgacacgaatctagagtaccctatcgcattcatggctctgaaaccgcgtcttcgcaaagagccattaggcccagctctcatcatcgggccttacaatttcccgttcatgctgaattttgctcccttcgctggtgcgatcgccgctggatgtactgccatcatcaagccgtccgagagtgcaccagccacggctatggtgatgaaggagatcgtcgacaagtacctagacccgggttctttctacatcgtgaacggcgctgtccccgagacgacggcacttttgaatgagaagtgggagaagatcttctacacaggcaacccgacggttgcccgcatcatcgctaagaaggccgccgagaccttgacgccggtcgttcttgagcttggtggcaggaatcccgccttcatctccaaggctgctaacttaccgctcgcagcacgcagactcttatggggaaagacggttaacgttggacaagtctgcctgtctcacaactacgtctgcgtcgagagagaacttgttgacgacttcatcaagtatctcaacgcgacatacaaagagttcttccccaacggtgcaaaagccagcgctgactacggaaaaatcatcaacgagcggcaattcgaccgcatgaagaagatgctggacacgacgaacggcaagatcgtcatgggcggtgagacagatagagaaagtctgttcattgcaccaactgctgtgctagtcgactcgatcgacgacccgatgatgactgacgaatcgttcggtcccatctggtctatttaccctgtcgccgatgtcaatgaggctatcaaggtaatgaacaaggttgatcatacgccgttgagtctcatgacatttggctccaaggctgagaacgaacttatcctaaacagcgtaacatcaggcggcgcatccctaaacgactcgtacatgcacggctgcgtctcaacgctccccttcggcggcgtaggcgagtcgggaacaggtgcctaccacgggaaatcgtccttcgacaccttcacccacagtcgcaccatcgtcgcgacgccgagctggatggacaacctgatgcgcgccagatatgccccgcacagcccgaaagattacaagcagttcgtctggctcaatagcgcgaagcccgacttcgaccgcgacgggaagcagatcacgggcttggggtactggatctggatgatctttggtctgggcggaccgactgctaaaggtgcgttgatgagatgggctcttgtgtttgtgtctggttatgcgcttttgcagactcagggagggcatagttcgtcgttgttttcgagggtttcgagtctttttaactga

SEQ ID NO: 13877 - protein, 543 aa, Muscodor strobelii
  misc_feature: SGI Peptide ID NO. 564561
  misc_feature (6)..(445): Pfam Id: PF00171 Pfam Desc: Aldehyde dehydrogenase family
  misc_feature (116)..(373): Pfam Id: PF00171 Pfam Desc: Aldehyde dehydrogenase family
  misc_feature (400)..(445): Pfam Id: PF00171 Pfam Desc: Aldehyde dehydrogenase family
  misc_feature (3)..(523): NCBI GI: 85086113 Blast Desc: NCU04013 [Neurospora crassa OR74A] gi|28918722|gb|EAA28392.1| conserved [Neurospora crassa OR74A] gi|29150126|emb|CAD79686.1| related to aldehyde dehydrogenase
  misc_feature (3)..(522): NCBI GI: 156043591 Blast Desc: SS1G_10799 [Sclerotinia sclerotiorum 1980] gi|154695186|gb|EDN94924.1| SS1G_10799 [Sclerotinia sclerotiorum 1980]
  misc_feature (6)..(521): NCBI GI: 171677937 Blast Desc: protein product [Podospora anserina] gi|170937037|emb|CAP61696.1| protein product [Podospora anserina]
  misc_feature (3)..(512): NCBI GI: 154316797 Blast Desc: BC1G_03816 [Botryotinia fuckeliana B05.10] gi|150845428|gb|EDN20621.1| BC1G_03816 [Botryotinia fuckeliana B05.10]
  misc_feature (10)..(525): NCBI GI: 145612641 Blast Desc: MGG_07270 [Magnaporthe grisea 70-15] gi|145019774|gb|EDK04002.1| MGG_07270 [Magnaporthe grisea 70-15]
  misc_feature (1)..(508): NCBI GI: 116201533 Blast Desc: CHGG_08651 [Chaetomium globosum CBS 148.51] gi|88177169|gb|EAQ84637.1| CHGG_08651 [Chaetomium globosum CBS 148.51]
  misc_feature (4)..(520): NCBI GI: 261355721 Blast Desc: aldehyde dehydrogenase 3I1 [Verticillium albo-atrum VaMs.102]
  misc_feature (10)..(501): NCBI GI: 189193167 Blast Desc: fatty aldehyde dehydrogenase [Pyrenophora tritici-repentis Pt-1C-BFP] gi|187978486|gb|EDU45112.1| fatty aldehyde dehydrogenase [Pyrenophora tritici-repentis Pt-1C-BFP]
  misc_feature (6)..(494): NCBI GI: 169605505 Blast Desc: SNOG_05777 [Phaeosphaeria nodorum SN15] gi|111065721|gb|EAT86841.1| SNOG_05777 [Phaeosphaeria nodorum SN15]
  misc_feature (2)..(537): NCBI GI: 46136889 Blast Desc: FG09960.1 [Gibberella zeae PH-1]
  misc_feature (15)..(466): SWISSPROT Homolog: EC 1.2.1.5 Aldehyde dehydrogenase (NAD(P)(+))
  misc_feature: Useful for introducing or modulating the production of volatile compounds
  misc_feature: Useful for fungicidal and/or biocontrol applications
MTSDIKLAPFEATPLDEIARISASVRAAYASQKTKDVEWRLVQLRKLYWGVTDYTPQLVAALTQDIGKSAPEATMTEVVHFLSDLQNTIKKLKTWIKDDTNLEYPIAFMALKPRLRKEPLGPALIIGPYNFPFMLNFAPFAGAIAAGCTAIIKPSESAPATAMVMKEIVDKYLDPGSFYIVNGAVPETTALLNEKWEKIFYTGNPTVARIIAKKAAETLTPVVLELGGRNPAFISKAANLPLAARRLLWGKTVNVGQVCLSHNYVCVERELVDDFIKYLNATYKEFFPNGAKASADYGKIINERQFDRMKKMLDTTNGKIVMGGETDRESLFIAPTAVLVDSIDDPMMTDESFGPIWSIYPVADVNEAIKVMNKVDHTPLSLMTFGSKAENELILNSVTSGGASLNDSYMHGCVSTLPFGGVGESGTGAYHGKSSFDTFTHSRTIVATPSWMDNLMRARYAPHSPKDYKQFVWLNSAKPDFDRDGKQITGLGYWIWMIFGLGGPTAKGALMRWALVFVSGYALLQTQGGHSSSLFSRVSSLFN

SEQ ID NO: 13878 - DNA, 2867 bp, Muscodor strobelii; identical to SEQ ID NO: 13875
  misc_feature: SGI EST ID NO. CUFF.33335.1
  misc_feature: Variant of the nucleotide sequence at SEQ ID NO 13876

SEQ ID NO: 13879 - DNA, 1053 bp, Muscodor strobelii
  misc_feature: SGI cDNA ID NO. 564562
  misc_feature: Encodes the peptide sequence at SEQ ID NO 13880
atgagcaagcatccactcctatcgatagcatctgaagctcatggagatgccctcgaagatagtcagtatagcttggctcatattcgtgccaacaatattctcgccgagatacttgactgcgaatccgaatggagtgccgttgaagcagccatcggcaagaaacgagcattcgattcagaagcttggactcgcgtctgtctcgatggtatcgaaacaatacttgttgatgatggcttgaatggaccagaacaggtagaatcatactcttggcacgactcttttacgcaaagcaaatgcaaaaggatcgttcggattgaagctctggccgaagactggattgccgataaatgtaggttagtcacgaccaaaacacgtgggccctatgtcgaggatgagatcatatggggaatccgtagacaccttaagcattgcctagacgatcccgaagtagtaggattcaaatcagtcatctgctatcggggtggcctcgacataccatctgcgtataatgtgagcgaggatgctgcaaaggaggccttgtcaacgctcatcgacaagcatctgtctggagccaacgacttcatcaagaacaagaggcttcagcatccggctataaaccactggcttgtccacttgatagcaacattgatggcagagaatcctgatcaagtgaagaagccaattcaattccacacagggcttggagataatgacattgtgagtaatatctgtctcgaacaagaacccgactacggcgtgacatgcagatcctcgaactttgtccctggtcgaaaatactctggagtactgatgggcactggtttccggaaacgtatctggctagctacagtccaagtccgttctgtgttgaagactgtcatcggagagctcgtttccacccgtcaaatccgtgagaagcaggcttatgatctaatttgcgcgatcatgttcagaaactccgagaaattatacaagttgacctcgcttaagagggtaccgccgacatatgaacaggctcgcaactatcaaggcttctcgagctctaagggctga

SEQ ID NO: 13880 - protein, 350 aa, Muscodor strobelii
  misc_feature: SGI Peptide ID NO. 564562
  misc_feature (3)..(326): NCBI GI: 156061017 Blast Desc: SS1G_02651 [Sclerotinia sclerotiorum 1980] gi|154700055|gb|EDN99793.1| SS1G_02651 [Sclerotinia sclerotiorum 1980]
  misc_feature (1)..(326): NCBI GI: 256732067 Blast Desc: NECHADRAFT_41904 [Nectria haematococca mpVI 77-13-4]
  misc_feature (1)..(326): NCBI GI: 261352112 Blast Desc: fluG [Verticillium albo-atrum VaMs.102]
  misc_feature (1)..(239): NCBI GI: 116197801 Blast Desc: CHGG_07056 [Chaetomium globosum CBS 148.51] gi|88178335|gb|EAQ85803.1| CHGG_07056 [Chaetomium globosum CBS 148.51]
  misc_feature (1)..(326): NCBI GI: 46137055 Blast Desc: FG10043.1 [Gibberella zeae PH-1]
  misc_feature (1)..(326): NCBI GI: 85102001 Blast Desc: NCU04264 [Neurospora crassa OR74A] gi|12718441|emb|CAC28748.1| related to fluG protein [Neurospora crassa] gi|28922797|gb|EAA32019.1| conserved [Neurospora crassa
  misc_feature (2)..(326): NCBI GI: 261204697 Blast Desc: FLU1-I [Ajellomyces dermatitidis SLH14081] gi|239587347|gb|EEQ69990.1| FLU1-I [Ajellomyces dermatitidis SLH14081]
  misc_feature (2)..(326): NCBI GI: 239614114 Blast Desc: FLU1-I [Ajellomyces dermatitidis ER-3]
  misc_feature (3)..(239): NCBI GI: 171693747 Blast Desc: protein product [Podospora anserina] gi|170946822|emb|CAP73626.1| protein product [Podospora anserina]
  misc_feature (3)..(342): NCBI GI: 154273973 Blast Desc: developmental protein FluG [Ajellomyces capsulatus NAm1] gi|150415446|gb|EDN10799.1| developmental protein FluG [Ajellomyces capsulatus NAm1]
MSKHPLLSIASEAHGDALEDSQYSLAHIRANNILAEILDCESEWSAVEAAIGKKRAFDSEAWTRVCLDGIETILVDDGLNGPEQVESYSWHDSFTQSKCKRIVRIEALAEDWIADKCRLVTTKTRGPYVEDEIIWGIRRHLKHCLDDPEVVGFKSVICYRGGLDIPSAYNVSEDAAKEALSTLIDKHLSGANDFIKNKRLQHPAINHWLVHLIATLMAENPDQVKKPIQFHTGLGDNDIVSNICLEQEPDYGVTCRSSNFVPGRKYSGVLMGTGFRKRIWLATVQVRSVLKTVIGELVSTRQIREKQAYDLICAIMFRNSEKLYKLTSLKRVPPTYEQARNYQGFSSSKG

SEQ ID NO: 13881 - DNA, 1215 bp, Muscodor strobelii
  misc_feature: SGI cDNA ID NO. 564563
  misc_feature: Reduced expression when VOC is produced
  misc_feature: Encodes the peptide sequence at SEQ ID NO 13882
atgtcgtcttcagactcttcagacgaagaaacaccagtctcccaagcggaacccacatcccccaacccaaccaagaagcgcaaaacccacgacgaaatcgaagtcgacctcaacctccccgaaccaccctcaaagaaagccaagcgtctcctcaagaaaggcaaacccctacccatcaaacccaccagcgatgacgaagcagacgacggattacccgtccccaagaccaaagacccgaaagagaagaagcgatcagactacgggatatggataggcaatctctcattcaccatgacgaggacagccctcttcaagtggattgtcgaggcttcaggcggcgcagtaaaagaagagaacatcacacgagtcaatctccccctgagcaaaaaccgagaagccgtgccagtcagaccgcacagaggcgacgatgcgccggcgacgcagcgccagaataaggggttcgcgtatatcgatttcgacacggaagctgctgctgtggcggccatggcgctcacggagacggagctcaatggacggaaagtgttgatcaagaatgctacttcgtttgagggtagaccgcagaaggaagctgctcctgctactgaggggggtgagaatggggcgaaggtggaagctacgccgacgaatacgagtaagaagatatatgttggtaatctttcctttcaagttacggaagaggatgttcgcgcacagtttgagaagtgtggtgagatcgaatgggtcaaagtcgctacgtttgaggatagcggaaaatgcaaaggctacggttgggtcaagttcaaggaagcagatgctgctgggtgggcagtgaagggctttgttaagattaaggaggagatcgagacggaagacgatttccgcgaggatggcgatgaggacgaggatacgaagaaggagaagaagtaccagatgcgcaagtggtgggtcaataggcttcatggccgtgagctcaagattgagctcgctgaagatgatcagacgaggtataagaagagatatggaaagggagctcagaataagggtggcaaggacagagatactaagcggccggacacgagaagaccgactgcggagagggagaatggtgggattggaaaaacagttgcgaaacctgcgtatggcgatgcggctgttgcatcttataagaccggtgcggtcgtcaaatctgccggaaagaaggtcacgtttgattaa

SEQ ID NO: 13882 - protein, 404 aa, Muscodor strobelii
  misc_feature: SGI Peptide ID NO. 564563
  misc_feature (221)..(289): Pfam Id: PF00076 Pfam Desc: RNA recognition motif. (a.k.a. RRM, RBD, or RNP domain)
  misc_feature (221)..(273): Pfam Id: PF00076 Pfam Desc: RNA recognition motif. (a.k.a. RRM, RBD, or RNP domain)
  misc_feature (150)..(183): Pfam Id: PF00076 Pfam Desc: RNA recognition motif. (a.k.a. RRM, RBD, or RNP domain)
  misc_feature (10)..(404): NCBI GI: 116197837 Blast Desc: CHGG_07074 [Chaetomium globosum CBS 148.51] gi|88178353|gb|EAQ85821.1| CHGG_07074 [Chaetomium globosum CBS 148.51]
  misc_feature (13)..(404): NCBI GI: 46137281 Blast Desc: FG10156.1 [Gibberella zeae PH-1]
  misc_feature (24)..(404): NCBI GI: 171694269 Blast Desc: protein product [Podospora anserina] gi|170947083|emb|CAP73888.1| protein product [Podospora anserina]
  misc_feature (19)..(404): NCBI GI: 256731770 Blast Desc: NECHADRAFT_40832 [Nectria haematococca mpVI 77-13-4]
  misc_feature (11)..(404): NCBI GI: 261352113 Blast Desc: conserved [Verticillium albo-atrum VaMs.102]
  misc_feature (13)..(404): NCBI GI: 39973737 Blast Desc: MGG_00985 [Magnaporthe grisea 70-15] gi|145018060|gb|EDK02339.1| MGG_00985 [Magnaporthe grisea 70-15]
  misc_feature (32)..(404): NCBI GI: 85100982 Blast Desc: NCU04273 [Neurospora crassa OR74A] gi|12718432|emb|CAC28739.1| conserved [Neurospora crassa] gi|28922601|gb|EAA31827.1| [Neurospora crassa OR74A]
  misc_feature (23)..(403): NCBI GI: 156055150 Blast Desc: SS1G_04926 [Sclerotinia sclerotiorum 1980] gi|154702711|gb|EDO02450.1| SS1G_04926 [Sclerotinia sclerotiorum 1980]
  misc_feature (25)..(342): NCBI GI: 169617435 Blast Desc: SNOG_11896 [Phaeosphaeria nodorum SN15] gi|111059820|gb|EAT80940.1| SNOG_11896 [Phaeosphaeria nodorum SN15]
  misc_feature (20)..(404): NCBI GI: 225685148 Blast Desc: conserved [Paracoccidioides brasiliensis Pb03] gi|226294474|gb|EEH49894.1| conserved [Paracoccidioides brasiliensis Pb18]
  misc_feature: Useful for introducing or modulating the production of volatile compounds
MSSSDSSDEETPVSQAEPTSPNPTKKRKTHDEIEVDLNLPEPPSKKAKRLLKKGKPLPIKPTSDDEADDGLPVPKTKDPKEKKRSDYGIWIGNLSFTMTRTALFKWIVEASGGAVKEENITRVNLPLSKNREAVPVRPHRGDDAPATQRQNKGFAYIDFDTEAAAVAAMALTETELNGRKVLIKNATSFEGRPQKEAAPATEGGENGAKVEATPTNTSKKIYVGNLSFQVTEEDVRAQFEKCGEIEWVKVATFEDSGKCKGYGWVKFKEADAAGWAVKGFVKIKEEIETEDDFREDGDEDEDTKKEKKYQMRKWWVNRLHGRELKIELAEDDQTRYKKRYGKGAQNKGGKDRDTKRPDTRRPTAERENGGIGKTVAKPAYGDAAVASYKTGAVVKSAGKKVTFD

SEQ ID NO: 13883 - DNA, 774 bp, Muscodor strobelii
  misc_feature: SGI cDNA ID NO. 564564
  misc_feature: Encodes the peptide sequence at SEQ ID NO 13884
atggatgaccaggtcacaaaattggttgacaaggcatggagccaattcctcgagaagcccgaggatcaacgattcatgatagcaataggcggtatccccggttcaggtataatcattggatcatatgccaccgtccgtcttcattctaataagctctcgtcaggaaagacaacactctccgaaatcgtgacaaaagctctcaatgcacgtcataaggaacaacgtccagattgctcgggtcccatagccgcatttgtgccaatggacggataccacctgacgcgtgctcaactttctgccatgccagatccagagaacgctcatgctcgccgaggcgcagagttcacatttgacgggccggcattcttctctctcgtaaaggcactgcgggagcctctcacagacagttctcagacgatatacgcaccgtcttttgaccacgctgtcaaggacccgaaagagaacgatattccgatcctgccagaatacagaatcatagtattcgagggtaactatgttgtactggataagaagccatggaatgaggcggcagatctcatggatgaacgatggtttgtggaagttgatatcccagttgctaggaagagactagtcgcgagacacgtcaaagctggtattgcggagaatgaggaggccgctggaaaaagggctgatgagaacgatctacctaatggggtcgagattcagaataatcggtatcgcgttagtgagactgtttatagccgtgatgatgaggcttggaggcatgagtga

SEQ ID NO: 13884 - protein, 257 aa, Muscodor strobelii
  misc_feature: SGI Peptide ID NO. 564564
  misc_feature (1)..(255): NCBI GI: 156059408 Blast Desc: SS1G_03716 [Sclerotinia sclerotiorum 1980] gi|154701503|gb|EDO01242.1| SS1G_03716 [Sclerotinia sclerotiorum 1980]
  misc_feature (1)..(255): NCBI GI: 225560470 Blast Desc: phosphoribulokinase/uridine kinase [Ajellomyces capsulatus G186AR]
  misc_feature (1)..(255): NCBI GI: 240280030 Blast Desc: phosphoribulokinase/uridine kinase [Ajellomyces capsulatus H143]
  misc_feature (1)..(254): NCBI GI: 242765895 Blast Desc: kinase-related protein [Talaromyces stipitatus ATCC 10500] gi|242765900|ref|XP_002341067.1| kinase-related protein [Talaromyces stipitatus ATCC 10500] gi|218724262|gb|EED23679.1|
  misc_feature (1)..(255): NCBI GI: 261197199 Blast Desc: phosphoribulokinase/uridine kinase [Ajellomyces dermatitidis SLH14081] gi|239595632|gb|EEQ78213.1| phosphoribulokinase/uridine kinase [Ajellomyces dermatitidis
  misc_feature (1)..(255): NCBI GI: 240107962 Blast Desc: conserved [Coccidioides posadasii C735 delta SOWgp]
  misc_feature (1)..(255): NCBI GI: 119188105 Blast Desc: CIMG_04100 [Coccidioides immitis RS]
  misc_feature (1)..(255): NCBI GI: 225683654 Blast Desc: phosphoribulokinase/uridine kinase family protein [Paracoccidioides brasiliensis Pb03]
  misc_feature (1)..(255): NCBI GI: 226281833 Blast Desc: conserved [Paracoccidioides brasiliensis Pb01]
  misc_feature (1)..(255): NCBI GI: 226293009 Blast Desc: conserved [Paracoccidioides brasiliensis Pb18]
  misc_feature (53)..(238): SWISSPROT Homolog: EC 2.7.1.48 Uridine kinase
MDDQVTKLVDKAWSQFLEKPEDQRFMIAIGGIPGSGIIIGSYATVRLHSNKLSSGKTTLSEIVTKALNARHKEQRPDCSGPIAAFVPMDGYHLTRAQLSAMPDPENAHARRGAEFTFDGPAFFSLVKALREPLTDSSQTIYAPSFDHAVKDPKENDIPILPEYRIIVFEGNYVVLDKKPWNEAADLMDERWFVEVDIPVARKRLVARHVKAGIAENEEAAGKRADENDLPNGVEIQNNRYRVSETVYSRDDEAWRHE

SEQ ID NO: 13885 - DNA, 1372 bp, Muscodor strobelii
  misc_feature: SGI EST ID NO. CUFF.33350.0
  misc_feature: Variant of the nucleotide sequence at SEQ ID NO 13883
cgccgtcttcgacttttacgctataagtgtcttttacgatctgccagtctgcttccgattgtcctgttcgctcttcttgtgtgggtttcttgggcgtgttctcggtctctgagtcggagagggctattgcgaagaggcctgagtctagggctgtgtccgtttctgttgacattttgagactgggtgtttgtttggttatgctgtaagattttcatttttggacgtgttgagtgtggtgaagtttgaggtaggttgtaggccactggcgcttgtgctctagcggggctttggaggggcagctaacattattcagtgttacgacggagctctgccaatatagagcattccaataacgtcaatctagaagttggagttggggcccagaaatgatattctgtttaatagaattttacttattctctcaatccttttcttcccacttttatgtcaatgctctagtgtaatccgacaccaaatatggatgaccaggtcacaaaattggttgacaaggcatggagccaattcctcgagaagcccgaggatcaacgattcatgatagcaataggcggtatccccggttcaggtataatcattggatcatatgccaccgtccgtcttcattctaataagctctcgtcaggaaagacaacactctccgaaatcgtgacaaaagctctcaatgcacgtcataaggaacaacgtccagattgctcgggtcccatagccgcatttgtgccaatggacggataccacctgacgcgtgctcaactttctgccatgccagatccagagaacgctcatgctcgccgaggcgcagagttcacatttgacgggccggcattcttctctctcgtaaaggcactgcgggagcctctcacagacagttctcagacgatatacgcaccgtcttttgaccacgctgtcaaggacccgaaagagaacgatattccgatcctgccagaatacagaatcatagtattcgagggtaactatgttgtactggataagaagccatggaatgaggcggcagatctcatggatgaacgatggtttgtggaagttgatatcccagttgctaggaagagactagtcgcgagacacgtcaaagctggtattgcggagaatgaggaggccgctggaaaaagggctgatgagaacgatctacctaatggggtcgagattcagaataatcggtatcgcgttagtgagactgtttatagccgtgatgatgaggcttggaggcatgagtgatgactagtatcatgctcgcgagctgcattttgtcaaatacataagatagacggaaatggcaacatggatcctgaaacttgaagccatactctgctcgcgaaatataacaagtcgaagaacc

SEQ ID NO: 13886 - DNA, 408 bp, Muscodor strobelii
  misc_feature: SGI cDNA ID NO. 564565
  misc_feature: Encodes the peptide sequence at SEQ ID NO 13887
atgtcaacagaaacggacacagccctagactcaggcctcttcgcaatagccctctccgactcagagaccgagaacacgcccaagaaacccacacaagaagagcgaacaggacaatcggaagcagactggcagatcgtaaaagacacttatagcgtaaaagtcgaagacggcgagatatggaagactgtctctctcccgctcggtccgcgggtttcgaaacccgaggctcagaccctcttacatgccgtcgaagagctgtactttttccgacggtttgatgaagctgcgcagtttgttgccaaggtgttggatagtgcggaggagggatgtatggatgaggatgtgttaaagacgttacggtattatgaaaagaaatgtagggagaaggctgacgtcgcggaatcatag

SEQ ID NO: 13887 - protein, 135 aa, Muscodor strobelii
  misc_feature: SGI Peptide ID NO. 564565
  misc_feature (1)..(132): NCBI GI: 85100403 Blast Desc: NCU04308 [Neurospora crassa OR74A] gi|28922488|gb|EAA31718.1| [Neurospora crassa OR74A] gi|28950169|emb|CAD71037.1| [Neurospora crassa]
  misc_feature (13)..(129): NCBI GI: 145610693 Blast Desc: [Magnaporthe grisea 70-15] gi|145018080|gb|EDK02359.1| [Magnaporthe grisea 70-15]
  misc_feature (35)..(129): NCBI GI: 46137615 Blast Desc: FG10323.1 [Gibberella zeae PH-1]
  misc_feature (5)..(133): NCBI GI: 154310230 Blast Desc: [Botryotinia fuckeliana B05.10] gi|150851596|gb|EDN26789.1| [Botryotinia fuckeliana B05.10]
  misc_feature (5)..(126): NCBI GI: 156059410 Blast Desc: [Sclerotinia sclerotiorum 1980] gi|154701504|gb|EDO01243.1| [Sclerotinia sclerotiorum 1980]
MSTETDTALDSGLFAIALSDSETENTPKKPTQEERTGQSEADWQIVKDTYSVKVEDGEIWKTVSLPLGPRVSKPEAQTLLHAVEELYFFRRFDEAAQFVAKVLDSAEEGCMDEDVLKTLRYYEKKCREKADVAES

SEQ ID NO: 13888 - DNA, 1827 bp, Muscodor strobelii
  misc_feature: SGI EST ID NO. CUFF.33349.1
  misc_feature: Variant of the nucleotide sequence at SEQ ID NO 13886
caaagccccgctagagcacaagcgccagtggcctacaacctacctcaaacttcaccacactcaacacgtccaaaaatgaaaatcttacagcataaccaaacaaacacccagtctcaaaatgtcaacagaaacggacacagccctagactcaggcctcttcgcaatagccctctccgactcagagaccgagaacacgcccaagaaacccacacaagaagagcgaacaggacaatcggaagcagactggcagatcgtaaaagacacttatagcgtaaaagtcgaagacggcgagatatggaagactgtctctctcccgctcggtccgcgggtttcgaaacccgaggctcagaccctcttacatgccgtcgaagagctgtactttttccgacggtttgatgaagctgcgcagtttgttgccaaggtgttggatagtgcggaggagggatgtatggatgaggatgtgttaaagacgttacggtattatgaaaagaaatgtagggagaaggctgacgtcgcggaatcatagtgggaaatgagtcagatagtcaggacttaggatacccattacacgtcacaaatcatagcaaaggatgaaagtctagtgaagttggatgtgaagagtgtggtattaatctagtagtaccggggtctttcgaccgtctatctcatctaaagtctgttgtatgccaatccgaaagtggaatcgactatcaaaagagtccagcgatctctaatctttatgaatccaatcgctgggtatgcccggaacgccatgctttttacttttggtttgaatcagaccctaacaccccttggagatgcccgaattctaatgaagttcgttatacagtcgtgtctagggggagtaggtggcgagttgtgtttttggtatttctttgtgcgaagtgatgcgaaactatgccaccatcacctggctctggctgcgtagtttctccttctcgcgttcctccgcaaagacccgtcggctcatctcgagaacgcactcgaagccttccttacccttcaaggcgttctcgcggaagcgggtgacgagggtgtcttcgataccgttcttaatgcgttgccagccaccacacagcgccgttatcctcgcggattgctcgaactgggtctgggttgcgctgagaggcttgtagataacggtttcttggacactgacaaggttggccagcgtcaagttctgcgaaaccatggtaacggtcttgtcggcgggattgacgtaggaagtctcaaagacctggctcgtgtcggcacagcccaggatgggcttcagccattcgggagcggcctgcttgcaggtgatgagacgctcagtgcggagaatgccagtctccgcgtcgacggatcgtgacagcgtgtcgacggcgatgacgtgaggcgacttgtcgttccatgggcagtacttccgccaattggcagttgatacctcttcccaggagtaatcgaatgtgcacgtgttggaaaagaccttcattttcggaaaggcggtgattgtacggccctgaaggcgatgggtgacagtggtgtatcttctaggctgatgaagagatcgtgttttgtgtcccgatggacgaagagatttgccgtggcaaaatgattgatgaagccgatcggagattcggctgctcacgcgatgatgttttcgggtaagcgattggagtggtgttacaaaaacaagatgctgtctagtcttcttttctagtaaacaaattgattggaactcttttctcgttctaatgttttgttgatataaagaaggtgatattggacgtgtagtgccaggatgatagggagaagaagattgag

SEQ ID NO: 13889 - DNA, 579 bp, Muscodor strobelii
  misc_feature: SGI cDNA ID NO. 564566
  misc_feature: Reduced expression when VOC is produced
  misc_feature: Encodes the peptide sequence at SEQ ID NO 13890
atgaaggtcttttccaacacgtgcacattcgattactcctgggaagaggtatcaactgccaattggcggaagtactgcccatggaacgacaagtcgcctcacgtcatcgccgtcgacacgctgtcacgatccgtcgacgcggagactggcattctccgcactgagcgtctcatcacctgcaagcaggccgctcccgaatggctgaagcccatcctgggctgtgccgacacgagccaggtctttgagacttcctacgtcaatcccgccgacaagaccgttaccatggtttcgcagaacttgacgctggccaaccttgtcagtgtccaagaaaccgttatctacaagcctctcagcgcaacccagacccagttcgagcaatccgcgaggataacggcgctgtgtggtggctggcaacgcattaagaacggtatcgaagacaccctcgtcacccgcttccgcgagaacgccttgaagggtaaggaaggcttcgagtgcgttctcgagatgagccgacgggtctttgcggaggaacgcgagaaggagaaactacgcagccagagccaggtgatggtggcatag

SEQ ID NO: 13890 - protein, 192 aa, Muscodor strobelii
  misc_feature: SGI Peptide ID NO. 564566
  misc_feature (15)..(173): Pfam Id: PF04707 Pfam Desc: PRELI-like family
  misc_feature (1)..(183): NCBI GI: 116197783 Blast Desc: CHGG_07047 [Chaetomium globosum CBS 148.51] gi|88178326|gb|EAQ85794.1| CHGG_07047 [Chaetomium globosum CBS 148.51]
  misc_feature (1)..(185): NCBI GI: 261353172 Blast Desc: MSF1 [Verticillium albo-atrum VaMs.102]
  misc_feature (1)..(183): NCBI GI: 85100399 Blast Desc: protein MSF1 [Neurospora crassa OR74A] gi|28922487|gb|EAA31717.1| protein MSF1 [Neurospora crassa OR74A] gi|28950168|emb|CAD71036.1| protein involved in protein sorting
  misc_feature (1)..(182): NCBI GI: 156059412 Blast Desc: SS1G_03718 [Sclerotinia sclerotiorum 1980] gi|154701505|gb|EDO01244.1| SS1G_03718 [Sclerotinia sclerotiorum 1980]
  misc_feature (1)..(183): NCBI GI: 171693729 Blast Desc: protein product [Podospora anserina] gi|170946813|emb|CAP73617.1| protein product [Podospora anserina]
  misc_feature (1)..(182): NCBI GI: 154310234 Blast Desc: BC1G_07037 [Botryotinia fuckeliana B05.10] gi|150851598|gb|EDN26791.1| BC1G_07037 [Botryotinia fuckeliana B05.10]
  misc_feature (1)..(186): NCBI GI: 39973777 Blast Desc: conserved [Magnaporthe grisea 70-15] gi|145018079|gb|EDK02358.1| conserved [Magnaporthe grisea 70-15]
  misc_feature (1)..(183): NCBI GI: 256732237 Blast Desc: [Nectria haematococca mpVI 77-13-4]
  misc_feature (1)..(183): NCBI GI: 46137607 Blast Desc: FG10319.1 [Gibberella zeae PH-1]
  misc_feature (1)..(186): NCBI GI: 58257403 Blast Desc: MSF1 protein-like protein [Magnaporthe grisea]
  misc_feature: Useful for introducing or modulating the production of volatile compounds
MKVFSNTCTFDYSWEEVSTANWRKYCPWNDKSPHVIAVDTLSRSVDAETGILRTERLITCKQAAPEWLKPILGCADTSQVFETSYVNPADKTVTMVSQNLTLANLVSVQETVIYKPLSATQTQFEQSARITALCGGWQRIKNGIEDTLVTRFRENALKGKEGFECVLEMSRRVFAEEREKEKLRSQSQVMVA

SEQ ID NO: 13891 - DNA, 1552 bp, Muscodor strobelii
  misc_feature: SGI EST ID NO. CUFF.33349.2
  misc_feature: Variant of the nucleotide sequence at SEQ ID NO 13889
ctcaatcttcttctccctatcatcctggcactacacgtccaatatcaccttctttatatcaacaaaacattagaacgagaaaagagttccaatcaatttgtttactagaaaagaagactagacagcatcttgtttttgtaacaccactccaatcgcttacccgaaaacatcatcgcgtgagcagccgaatctccgatcggcttcatcaatcattttgccacggcaaatctcttcgtccatcgggacacaaaacacgatctcttcatcagcctagaagatacaccactgtcacccatcgccttcagggccgtacaatcaccgcctttccgaaaatgaaggtcttttccaacacgtgcacattcgattactcctgggaagaggtatcaactgccaattggcggaagtactgcccatggaacgacaagtcgcctcacgtcatcgccgtcgacacgctgtcacgatccgtcgacgcggagactggcattctccgcactgagcgtctcatcacctgcaagcaggccgctcccgaatggctgaagcccatcctgggctgtgccgacacgagccaggtctttgagacttcctacgtcaatcccgccgacaagaccgttaccatggtttcgcagaacttgacgctggccaaccttgtcagtgtccaagaaaccgttatctacaagcctctcagcgcaacccagacccagttcgagcaatccgcgaggataacggcgctgtgtggtggctggcaacgcattaagaacggtatcgaagacaccctcgtcacccgcttccgcgagaacgccttgaagggtaaggaaggcttcgagtgcgttctcgagatgagccgacgggtctttgcggaggaacgcgagaaggagaaactacgcagccagagccaggtgatggtggcatagtttcgcatcacttcgcacaaagaaataccaaaaacacaactcgccacctactccccctagacacgactgtataacgaacttcattagaattcgggcatctccaaggggtgttagggtctgattcaaaccaaaagtaaaaagcatggcgttccgggcatacccagcgattggattcataaagattagagatcgctggactcttttgatagtcgattccactttcggattggcatacaacagactttagatgagatagacggtcgaaagaccccggtactactagattaataccacactcttcacatccaacttcactagactttcatcctttgctatgatttgtgacgtgtaatgggtatcctaagtcctgactatctgactcatttcccactatgattccgcgacgtcagccttctccctacatttcttttcataataccgtaacgtctttaacacatcctcatccatacatccctcctccgcactatccaacaccttggcaacaaactgcgcagcttcatcaaaccgtcggaaaaagtacagctcttcgacggcatgtaagagggtctgagcctcgggtttcgaaacccgcggaccgagcgggagagagacagtcttccatatctgtttccatatgtaag

SEQ ID NO: 13892 - DNA, 1410 bp, Muscodor strobelii
  misc_feature: SGI cDNA ID NO. 564567
  misc_feature: Encodes the peptide sequence at SEQ ID NO 13893
atggcaaacaccttgaacgcaaaactatggtccatagacaaggatgcttcctgcgcttccatgcattctcgacaattggagaatggcatgaacccttctttccccgacttgccttggaaatggattcaatcattcgcggaacttcgagctttaggagacaatctgcatctaattgggtttgactgcgaatttcttgatgcagaggctggtcttgccacgcaagtcggcttctgcagttcatatcagttgctcacttgtcctaagattcacgaagatgctacactgaacgaattctacgagcatgtcaaagccaaagtgtgttgcataatgatcaaggagcgacaaatcgagtacctagaaaggcagcgggcaaagaattcgctaatgtccaccgaagatttccttcttggtgaagaagaggaagaatgggtggaacagagtgcgactgatcagcacatccacaacaagcttgagcaatacaaagaattgcaccccgagaaagctctagttctagttggctatgatatgggcagcgaccttgcatgtatgcagcgggactttccttccatggccaaattctttccgtactgtatcgacatacgcgaattactatgggatttagctgccgatccaacgtcagttacaagaacaccaggagtcaggacctctatgcagttactgggctacaaattccaacgccacgaaaagatgggcaagcacggcgcggggaacgacgctgtgagacatttggctgtgctccacggctatttggatcctgagaatattgagaagctggcgttgtaccgaacaatacctatggacacgggtctctataagacgcaaggggcacctatgcatagtgtccctgaccgtgctgttgatgtacaaatcatagaaagtaccacaacgaacaatcctttctgctcgctactacattttgctgcttttggacttcgctttgccgagcttgaagcagcaggtctcccaacggcttcgaataatgcatggttgcaattcaaaagtgcggaagacgccgagagattcatatcaaagacaaacaatatttggcttgatggcaatctgttcaaaactagattgattgaacatataaggaacgaaagagaaattgaggagaacattcggcacgaagactcaagatcgctgatatttcctttgcctggttgggcaagtcccccttcagagagggagaaggcagaggagaaagaaaaggactcccgaccccgaacaatgagggaatggaaagagagaaagagacaggagaggagagaccgacgagcagagcaagacgctgcgagagcttattggaagccacacgactcaacagggccacatttgattgatatggttgaagaggacgatacaggtatattcggcgcactcctagtctag

SEQ ID NO: 13893 - protein, 469 aa, Muscodor strobelii
  misc_feature: SGI Peptide ID NO. 564567
MANTLNAKLWSIDKDASCASMHSRQLENGMNPSFPDLPWKWIQSFAELRALGDNLHLIGFDCEFLDAEAGLATQVGFCSSYQLLTCPKIHEDATLNEFYEHVKAKVCCIMIKERQIEYLERQRAKNSLMSTEDFLLGEEEEEWVEQSATDQHIHNKLEQYKELHPEKALVLVGYDMGSDLACMQRDFPSMAKFFPYCIDIRELLWDLAADPTSVTRTPGVRTSMQLLGYKFQRHEKMGKHGAGNDAVRHLAVLHGYLDPENIEKLALYRTIPMDTGLYKTQGAPMHSVPDRAVDVQIIESTTTNNPFCSLLHFAAFGLRFAELEAAGLPTASNNAWLQFKSAEDAERFISKTNNIWLDGNLFKTRLIEHIRNEREIEENIRHEDSRSLIFPLPGWASPPSEREKAEEKEKDSRPRTMREWKERKRQERRDRRAEQDAARAYWKPHDSTGPHLIDMVEEDDTGIFGALLV

SEQ ID NO: 13894 - DNA, 259 bp, Muscodor strobelii
  misc_feature: SGI EST ID NO. CUFF.33217.0
  misc_feature: Variant of the nucleotide sequence at SEQ ID NO 13892
cgagtacctagaaaggcagcgggcaaagaattcgctaatgtccaccgaagatttccttcttggtgaagaagaggaagaatgggtggaacagagtgcgactgatcagcacatccacaacaagcttgagcaatacaaagaattgcaccccgagaaagctctagttctagttggctatgatatgggcagcgaccttgcatgtatgcagcgggactttccttccatggccaaattctttccgtactgtatcgacatacgcgaa

SEQ ID NO: 13895 - DNA, 510 bp, Muscodor strobelii
  misc_feature: SGI cDNA ID NO. 564568
  misc_feature: Reduced expression when VOC is produced
  misc_feature: Encodes the peptide sequence at SEQ ID NO 13896
atgcctcaataccaagtaatccacagctacccgctcacccggcagcaaaaagacacactggcccgcgaaatcacacgaatccacgcgcacaaattcacaaccccctcattcttcgtacacgtggaattccagcgtttcgacacttcggtcgacgactactaccttgctcaaacccgtctcgaacacgtgaattacatcgtcgggaacgtccgcacgtcaccaactaggactaaggccgattttgacgctgcgtctgtgcagatggaggaagcctggtatgaagttgtgggaagagagccgagtgggcagctccagatgattaggatgatgccccttgttgctattcgggagcaaggattggaaggccctgtggcgggtcaggaggctgagtggtttaagaagttctggactgagttggatcgtcgggctgcggcgggagataagaatgttgagagtatgattagggagattgagactagggatgaccttaaggcctggacaaggtcatga

SEQ ID NO: 13896 - protein, 169 aa, Muscodor strobelii
  misc_feature: SGI Peptide ID NO. 564568
  misc_feature (1)..(164): NCBI GI: 256724856 Blast Desc: NECHADRAFT_102460 [Nectria haematococca mpVI 77-13-4]
  misc_feature (1)..(146): NCBI GI: 46110659 Blast Desc: FG02211.1 [Gibberella zeae PH-1]
  misc_feature (1)..(115): NCBI GI: 145244172 Blast Desc: An11g06050 [Aspergillus niger] gi|134079278|emb|CAK40760.1| [Aspergillus niger]
  misc_feature (1)..(164): NCBI GI: 256735597 Blast Desc: [Nectria haematococca mpVI 77-13-4]
  misc_feature: Useful for introducing or modulating the production of volatile compounds
MPQYQVIHSYPLTRQQKDTLAREITRIHAHKFTTPSFFVHVEFQRFDTSVDDYYLAQTRLEHVNYIVGNVRTSPTRTKADFDAASVQMEEAWYEVVGREPSGQLQMIRMMPLVAIREQGLEGPVAGQEAEWFKKFWTELDRRAAAGDKNVESMIREIETRDDLKAWTRS

SEQ ID NO: 13897 - DNA, 1088 bp, Muscodor strobelii
  misc_feature: SGI EST ID NO. CUFF.33417.0
  misc_feature: Variant of the nucleotide sequence at SEQ ID NO 13895
gctcgctttcgcgttctcgcgctcgcgatggtgcaactcctgaactcctatcgcgatgatgcaaatgctaggctcttgtcgcgacagcgacatatgttcgtctttacacgcgaagatgcaagcaccatcgaatagactatctagggcacagcatgcaatcactcaagagaactcgagtataaatgaagctcgtttcttccatatgatcccactgttctgaagagccactacactcatcagcattacagtcacagtcttcacacttaatcgcgacaggcaacctacttttcaactccatttataccaactccaaatacttcagcacaatgcctcaataccaagtaatccacagctacccgctcacccggcagcaaaaagacacactggcccgcgaaatcacacgaatccacgcgcacaaattcacaaccccctcattcttcgtacacgtggaattccagcgtttcgacacttcggtcgacgactactaccttgctcaaacccgtctcgaacacgtgaattacatcgtcgggaacgtccgcacgtcaccaactaggactaaggccgattttgacgctgcgtctgtgcagatggaggaagcctggtatgaagttgtgggaagagagccgagtgggcagctccagatgattaggatgatgccccttgttgctattcgggagcaaggattggaaggccctgtggcgggtcaggaggctgagtggtttaagaagttctggactgagttggatcgtcgggctgcggcgggagataagaatgttgagagtatgattagggagattgagactagggatgaccttaaggcctggacaaggtcatgatttggtctttgaattcgcgagggcttgtcgatacgttttgttcgtattgacctggacctttctttggctgatctgaagctactgtttgatatagaggtatatacatgctgggatagactatgacctgccgaacttcggtcggatgccactcgttagatagttttcaatctcatttttctgtgttaatctcatgtatgatgatctcgtgtgactcttgcttcctggcgtcatggccttggtccacaaataggg

SEQ ID NO: 13898 - DNA, 1338 bp, Muscodor strobelii
  misc_feature: SGI cDNA ID NO. 564569
  misc_feature: Elevated expression when VOC is produced
  misc_feature: Encodes the peptide sequence at SEQ ID NO 13899
atggctgccaaggtgcctcaagacgaactccagaagctcagtgtgagcgataccaacggttccgcgcagaaagcagcaaacggcgcacccgatgctgacgccgcagagaactcgggtgatgactctgaagacgatgccgacggccaagtagccgaggccaccggcgccgcaaagaagaagaagaaaaataagaagagaaagcccaagaagaagaacaagaaacccactgctcagactgaccctccgagtgtactgatctccgatctcttccccaatgattcttaccccaaaggcgaagagtgcgagtacttgaatgagaacgcttatcgcactacgaatgaagagaagagacacctagacaatctcaataccgagttcctctctgattatcgtcaagcggctgagacgcatcgccaagtgcgccagtgggcccagaagaacattaagccgggccagacattgaccgagatcgccaatggtattgaggacagtgttcgtagacttgtcggacacgatggtctcagtgaaggggatgcgattgtcgctggcatgggcttccccaccggtctcaatcttgatcatatcgctgctcactacagcccgaatgctgggaataagatggttcttcagcagagcaatgtcatgaaagttgatatcggcgtccacgtcaacggacgcatcgtcgatagtgcgttcactatgtcatttgaccctatgtatgacaacctattagccgccgtaaaagacgccacgaacactggcgtcaaagaggccggcattgacgtccgcttgggagaacttggagagaagattcaggaagcaatggagagctacgagtgcgagattaacggcacgacatatcccgttaaatcgattcgcaacttgtctgggcacaccattctgccctacagcatccacgggacgaaaagtgtgccgattgtcaagtcggcggacactactaagatggaggaaggtgatgtattcgccatcgagactttcggcagtaccggaaacggttatgttcacgatgaaggagaagtctcacattacgctctgaagagcgatgcgcctaaagtcgatctgcgactttcgtctgcaaagagtcttctgaatgttatcaagaagaacttcagcactatcccctggtgcagacggtacctggatagactcgggcaggagaaatacctgctaggtctgaataaccttgtccaatctggaattgtcgaggattatcctccgctggttgacaagaaggggtcttacactgcccagttcgaacacactatattgctccgaccgaatgtgaaagaggtcattagccgcggcgaggactactaa

SEQ ID NO: 13899 - protein, 445 aa, Muscodor strobelii
  misc_feature: SGI Peptide ID NO. 564569
  misc_feature (128)..(382): Pfam Id: PF00557 Pfam Desc: metallopeptidase family M24
  misc_feature (128)..(353): Pfam Id: PF00557 Pfam Desc: metallopeptidase family M24
  misc_feature (1)..(445): NCBI GI: 46137609 Blast Desc: FG10320.1 [Gibberella zeae PH-1]
  misc_feature (1)..(445): NCBI GI: 116197781 Blast Desc: CHGG_07046 [Chaetomium globosum CBS 148.51] gi|88178325|gb|EAQ85793.1| CHGG_07046 [Chaetomium globosum CBS 148.51]
  misc_feature (78)..(445): NCBI GI: 119483536 Blast Desc: methionine aminopeptidase [Neosartorya fischeri NRRL 181] gi|119409827|gb|EAW19774.1| methionine aminopeptidase [Neosartorya fischeri NRRL 181]
  misc_feature (10)..(445): NCBI GI: 70983271 Blast Desc: methionine aminopeptidase, type II [Aspergillus fumigatus Af293] gi|66844788|gb|EAL85125.1| methionine aminopeptidase, type II, [Aspergillus fumigatus Af293]
  misc_feature (10)..(445): NCBI GI: 159124049 Blast Desc: methionine aminopeptidase, type II, [Aspergillus fumigatus A1163]
  misc_feature (1)..(445): NCBI GI: 171693727 Blast Desc: protein product [Podospora anserina] gi|170946812|emb|CAP73616.1| protein product [Podospora anserina]
  misc_feature (1)..(445): NCBI GI: 28950167 Blast Desc: methionyl aminopeptidase [Neurospora crassa]
  misc_feature (1)..(445): NCBI GI: 261353171 Blast Desc: methionine aminopeptidase [Verticillium albo-atrum VaMs.102]
  misc_feature (1)..(445): NCBI GI: 145610691 Blast Desc: MGG_00966 [Magnaporthe grisea 70-15] gi|145018078|gb|EDK02357.1| MGG_00966 [Magnaporthe grisea 70-15]
  misc_feature (1)..(445): NCBI GI: 225680188 Blast Desc: methionine aminopeptidase [Paracoccidioides brasiliensis Pb03]
  misc_feature (78)..(445): SWISSPROT Homolog: EC 3.4.11.18 Methionyl aminopeptidase
  misc_feature: Useful for introducing or modulating the production of volatile compounds
MAAKVPQDELQKLSVSDTNGSAQKAANGAPDADAAENSGDDSEDDADGQVAEATGAAKKKKKNKKRKPKKKNKKPTAQTDPPSVLISDLFPNDSYPKGEECEYLNENAYRTTNEEKRHLDNLNTEFLSDYRQAAETHRQVRQWAQKNIKPGQTLTEIANGIEDSVRRLVGHDGLSEGDAIVAGMGFPTGLNLDHIAAHYSPNAGNKMVLQQSNVMKVDIGVHVNGRIVDSAFTMSFDPMYDNLLAAVKDATNTGVKEAGIDVRLGELGEKIQEAMESYECEINGTTYPVKSIRNLSGHTILPYSIHGTKSVPIVKSADTTKMEEGDVFAIETFGSTGNGYVHDEGEVSHYALKSDAPKVDLRLSSAKSLLNVIKKNFSTIPWCRRYLDRLGQEKYLLGLNNLVQSGIVEDYPPLVDKKGSYTAQFEHTILLRPNVKEVISRGEDY

SEQ ID NO: 13900 - DNA, 1727 bp, Muscodor strobelii
  misc_feature: SGI EST ID NO. CUFF.33431.0
  misc_feature: Variant of the nucleotide sequence at SEQ ID NO 13898
gcacagcattataaaatcaggttcgaggtaggcttacgacttgagctggatggactgttctgctcacagtctatacaatcatggctgccaaggtgcctcaagacgaactccagaagctcagtggtgagttttccagggcctacggatctttgatcaccatacttttaactgtcatgttctaggttggctaacacagcccagtgagcgataccaacggttccgcgcagaaagcagcaaacggcgcacccgatgctgacgccgcagagaactcgggtgatgactctgaagacgatgccgacggccaagtagccgaggccaccggcgccgcaaagaagaagaagaaaaataagaagagaaagcccaagaagaagaacaagaaacccactgctcagactgaccctccgagtgtactgatctccgatctcttccccaatgattcttaccccaaaggcgaagagtgcgagtacttgaatgagaacgcttatcgcactacgaatgaagagaagagacacctagacaatctcaataccgagttcctctctgattatcgtcaagcggctgagacgcatcgccaagtgcgccagtgggcccagaagaacattaagccgggccagacattgaccgagatcgccaatggtattgaggacagtgttcgtagacttgtcggacacgatggtctcagtgaaggggatgcgattgtcgctggcatgggcttccccaccggtctcaatcttgatcatatcgctgctcactacagcccgaatgctgggaataagatggttcttcagcagagcaatgtcatgaaagttgatatcggcgtccacgtcaacggacgcatcgtcgatagtgcgttcactatgtcatttgaccctatgtatgacaacctattagccgccgtaaaagacgccacgaacactggcgtcaaagaggccggcattgacgtccgcttgggagaacttggagagaagattcaggaagcaatggagagctacgagtgcgagattaacggcacgacatatcccgttaaatcgattcgcaacttgtctgggcacaccattctgccctacagcatccacgggacgaaaagtgtgccgattgtcaagtcggcggacactactaagatggaggaaggtgatgtattcgccatcgagactttcggcagtaccggaaacggttatgttcacgatgaaggagaagtctcacattacgctctgaagagcgatgcgcctaaagtcgatctgcgactttcgtctgcaaagagtcttctgaatgttatcaagaagaacttcagcactatcccctggtgcagacggtacctggatagactcgggcaggagaaatacctgctaggtctgaataaccttgtccaatctggaattgtcgaggattatcctccgctggttgacaagaaggggtcttacactgcccagttcgaacacactatattgctccgaccgaatgtgaaagaggtcattagccgcggcgaggactactaaacgcgccgagatgcgtatatttcggtagcttttggtgggttgctgaaatagctcccacactacagcgcatgatttatgaaaatgggaatgggcaattaggggaaaagtaacggaaagttatgagtagaaatcaaaacatgctacatcgaatgcatcatctttttgcagaaggctatacccgtgacgtcattgcatctctcttcagctaatgcattactgttcaaacaccac

SEQ ID NO: 13901 - DNA, 1074 bp, Muscodor strobelii
  misc_feature: SGI cDNA ID NO. 564570
  misc_feature: Encodes the peptide sequence at SEQ ID NO 13902
atgtcgggactattcgggtcgtcgtcgacggcggcgagctctgggaacactatgggcgacctgaagaacgacgtgcccatctcgaatcctcccgaagacaccgtttccgacctcacattcgccccgaacgccgatatccttgctgttgcgagctgggataagaaagttagactctaccagatcgccgccaacggcaacagcgaaggcaaacacatctacgaacacgaggctcccgtcctgagtgtcgatttctcaaaggatggcaccaagctggtctcagccggcgccgacaagcaggccaagctctgcgatctccagactcttcagaccacccaggttgccgcacacgactctgccatcaagtgcgcccgcttcttcgattcgccgggatccagtagtcccatgctagtcaccggttcatgggacaagactgtcaagtactgggatctgagagcgtcgactcccgtaggcacggtcgcgtgccaggaacgtgtatactccatggacgttcgaaattcgcttctcgtcatcggcactgcagaccgctacatcaacgtggtcaacctcgcagaccccttgaagttctacaagaccctgcagagccccctcaagtggcaaacacgagttgtgagctgcttcaccgacgcctctggttttgctattggtagcattgagggacgttgtgccattcagtatgtggaagacaaggactcgagctccaacttctcgtttaaatgccaccgtgaccctccctcgggttcaatcacgcaggtttattccgttaacgatatctcattccatcctcagcatggaacattcagcacagccggctccgatgggacattccacttctgggataaggacgccaaacatcgcctcaagggctacccaactgtaggcggtagcattacagccacgaccttcaatagctctggcacgatatttgcctacgctgtgggttatgactggagtaaaggctatatgggcaacaaccagcagtacccgaataaggtagttttacacccaatccagggtgatgagtgcaagcctcgtccgagcgtgaaaaagcgatag

SEQ ID NO: 13902 - protein, 357 aa, Muscodor strobelii
  misc_feature: SGI Peptide ID NO. 564570
  misc_feature (107)..(149): Pfam Id: PF00400 Pfam Desc: WD domain, G-beta repeat
  misc_feature (66)..(104): Pfam Id: PF00400 Pfam Desc: WD domain, G-beta repeat
  misc_feature (22)..(60): Pfam Id: PF00400 Pfam Desc: WD domain, G-beta repeat
  misc_feature (260)..(286): Pfam Id: PF00400 Pfam Desc: WD domain, G-beta repeat
  misc_feature (1)..(357): NCBI GI: 116197809 Blast Desc: conserved [Chaetomium globosum CBS 148.51] gi|88178339|gb|EAQ85807.1| conserved [Chaetomium globosum CBS 148.51]
  misc_feature (1)..(357): NCBI GI: 171693755 Blast Desc: protein product [Podospora anserina] gi|170946826|emb|CAP73630.1| protein product [Podospora anserina]
  misc_feature (1)..(357): NCBI GI: 85101044 Blast Desc: Poly(A)+ RNA export protein [Neurospora crassa OR74A] gi|28922616|gb|EAA31842.1| Poly(A)+ RNA export protein [Neurospora crassa OR74A]
  misc_feature (1)..(357): NCBI GI: 11611450 Blast Desc: nuclear pore complex protein sonA [Neurospora crassa]
  misc_feature (1)..(357): NCBI GI: 256731827 Blast Desc: [Nectria haematococca mpVI 77-13-4]
  misc_feature (1)..(357): NCBI GI: 46137529 Blast Desc: FG10280.1 [Gibberella zeae PH-1]
  misc_feature (1)..(357): NCBI GI: 261353164 Blast Desc: Poly(A)+ RNA export protein [Verticillium albo-atrum VaMs.102]
  misc_feature (1)..(357): NCBI GI: 145239047 Blast Desc: An08g00520 [Aspergillus niger] gi|134076673|emb|CAK45204.1| protein product [Aspergillus niger]
  misc_feature (1)..(357): NCBI GI: 70994986 Blast Desc: nuclear pore complex protein (SonA) [Aspergillus fumigatus Af293] gi|66849904|gb|EAL90231.1| nuclear pore complex protein (SonA), [Aspergillus fumigatus Af293] nuclear pore A1163]
  misc_feature (1)..(357): NCBI GI: 119496179 Blast Desc: nuclear pore complex protein (SonA), [Neosartorya fischeri NRRL 181] gi|119413025|gb|EAW22966.1| nuclear pore complex protein (SonA), [Neosartorya fischeri NRRL 181]
  misc_feature (33)..(285): SWISSPROT Homolog: EC 2.7.11.1 Non-specific serine/threonine protein kinase
MSGLFGSSSTAASSGNTMGDLKNDVPISNPPEDTVSDLTFAPNADILAVASWDKKVRLYQIAANGNSEGKHIYEHEAPVLSVDFSKDGTKLVSAGADKQAKLCDLQTLQTTQVAAHDSAIKCARFFDSPGSSSPMLVTGSWDKTVKYWDLRASTPVGTVACQERVYSMDVRNSLLVIGTADRYINVVNLADPLKFYKTLQSPLKWQTRVVSCFTDASGFAIGSIEGRCAIQYVEDKDSSSNFSFKCHRDPPSGSITQVYSVNDISFHPQHGTFSTAGSDGTFHFWDKDAKHRLKGYPTVGGSITATTFNSSGTIFAYAVGYDWSKGYMGNNQQYPNKVVLHPIQGDECKPRPSVKKR

SEQ ID NO: 13903 - DNA, 1537 bp, Muscodor strobelii
  misc_feature: SGI EST ID NO. CUFF.33224.0
  misc_feature: Variant of the nucleotide sequence at SEQ ID NO 13901
tttaggaaaagatcgattcaattgattgtttgtttgattatgcgaactacaagtagaagctctattcgccatagtctttgatgctctatgccattggggtgtaccttacttatgtatccagccgcaccagccccatattttccgcggacagctcttagtaccttaggtactaaattgaatgttaaagactactaccagtatgcgccgctatctataaacaggccccgatcacgaatatcctccggaaaacctagatatcgacaaacaacacgatgtcgggactattcgggtcgtcgtcgacggcggcgagctctgggaacactatgggcgacctgaagaacgacgtgcccatctcgaatcctcccgaagacaccgtttccgacctcacattcgccccgaacgccgatatccttgctgttgcgagctgggataagaaagttagactctaccagatcgccgccaacggcaacagcgaaggcaaacacatctacgaacacgaggctcccgtcctgagtgtcgatttctcaaaggatggcaccaagctggtctcagccggcgccgacaagcaggccaagctctgcgatctccagactcttcagaccacccaggttgccgcacacgactctgccatcaagtgcgcccgcttcttcgattcgccgggatccagtagtcccatgctagtcaccggttcatgggacaagactgtcaagtactgggatctgagagcgtcgactcccgtaggcacggtcgcgtgccaggaacgtgtatactccatggacgttcgaaattcgcttctcgtcatcggcactgcagaccgctacatcaacgtggtcaacctcgcagaccccttgaagttctacaagaccctgcagagccccctcaagtggcaaacacgagttgtgagctgcttcaccgacgcctctggttttgctattggtagcattgagggacgttgtgccattcagtatgtggaagacaaggactcgagctccaacttctcgtttaaatgccaccgtgaccctccctcgggttcaatcacgcaggtttattccgttaacgatatctcattccatcctcagcatggaacattcagcacagccggctccgatgggacattccacttctgggataaggacgccaaacatcgcctcaagggctacccaactgtaggcggtagcattacagccacgaccttcaatagctctggcacgatatttgcctacgctgtgggttatgactggagtaaaggctatatgggcaacaaccagcagtacccgaataaggtagttttacacccaatccagggtgatgagtgcaagcctcgtccgagcgtgaaaaagcgatagacgagccacggtggcgcaccagggcccagtaacgcaccagagctcgcgggaatgggcctcgatcttgtgccttatgctagtgccaaagattgcacacgtgcccccgatggcacgataatagatgataccacgtagctagacgatagcatgcaaaagttatgaataatacagacgattccctctatcatcca

SEQ ID NO: 13904 - DNA, 1380 bp, Muscodor strobelii
  misc_feature: SGI cDNA ID NO. 564571
  misc_feature: Reduced expression when VOC is produced
  misc_feature: Encodes the peptide sequence at SEQ ID NO 13905
atgtcacgctctgcgggcggcgtcacgcccatccagggcaccattccctttttctcgaccaacatctggggcggtggcagcagcagcaacggcacatcaaaggcagaaaagacagagtcgaattttgtatcagcggcgcagcagagcgggaaggagaacgtcagcagcagatcacgtcccggcaccagctcaggcgaccaaccacagtcggccgcttcagccaaggatcacagccggaaaccatccttcggccgtaaatcctccttctcgtcgcccgtcaagggcaaacgtcgcgccagctcgtcggcttcgaatggcggttggggaacccagatcataaccgacgcaactgtcccgccggccctgcccgactacgccctcgccgcggctgccaagatatcgaaggacgcggacacggtcgtgtcgccgacctctgtcgactccttcaccaagatgatgagtcgcacgggcacgacaccgtccctaggggcagtgggagccatgggactctaccaggtctcgtcgcagactgtgacctctcctcagtccagcgtccccatgcttcctgctgagacgccgtccttgcacaaccatatacacgaacttgcgaacaagaggatatcgacgctggactatctgcggaaagcacacgaaggacgagtttactggttcaataccctcctcttcgacaagcccgacttagcgcggatgccgtacttcgacagtcgcaaactcgcccgtcgcgcaacaaactacctgctgctcggcctctccatccccgtcgtcatcgacctcaactctacaaccgctctcgaatttctccgctccctcaacacccttctcacagagttcgactcctaccaacaaatccacaccgagaacggcgtgaactcaagttcgctctcccgagccaggttaccgcaaatgtttcgcagacagggcggcaaaggacggcgacaatcaggagcagcggacctgggagatccgaacgcaccaaatttcaacaaagacgggtcggcgctcaacgccgcacctgcatctgtcatcaattttgggcttggaggcgaaggcaatgatttagtaccaggggaggaatacacgcatctcctaacaccaaatctaccattcgacccagatttcttcgagacctttgctacgctatgcgacgtactcatcgactgctatacccgactcatgagcatgttatccactcccaaagactgcacgccattaattgcagaattattcgctaaagccgactcgagagtacgcaaaatcatcatccagggagttgttaaagagtttgaagactcgagcagatcgggcttgaaacaagaagttgccagcgttggcaaagtcgtcttgggaggcttaatgtga

SEQ ID NO: 13905 - protein, 459 aa, Muscodor strobelii
  misc_feature: SGI Peptide ID NO. 564571
  misc_feature (79)..(459): NCBI GI: 256729541 Blast Desc: NECHADRAFT_95860 [Nectria haematococca mpVI 77-13-4]
  misc_feature (59)..(459): NCBI GI: 46117470 Blast Desc: FG04577.1 [Gibberella zeae PH-1]
  misc_feature (1)..(459): NCBI GI: 171693759 Blast Desc: protein product [Podospora anserina] gi|170946828|emb|CAP73632.1| protein product [Podospora anserina]
  misc_feature (50)..(459): NCBI GI: 156043095 Blast Desc: SS1G_10550 [Sclerotinia sclerotiorum 1980] gi|154694938|gb|EDN94676.1| SS1G_10550 [Sclerotinia sclerotiorum 1980]
  misc_feature (50)..(459): NCBI GI: 154300938 Blast Desc: BC1G_10607 [Botryotinia fuckeliana B05.10] gi|150856355|gb|EDN31547.1| BC1G_10607 [Botryotinia fuckeliana B05.10]
  misc_feature (176)..(459): NCBI GI: 258568456 Blast Desc: conserved [Uncinocarpus reesii 1704] gi|237906418|gb|EEP80819.1| conserved [Uncinocarpus reesii 1704]
  misc_feature (194)..(459): NCBI GI: 240107856 Blast Desc: CPC735_001970 [Coccidioides posadasii C735 delta SOWgp]
  misc_feature (189)..(459): NCBI GI: 119501336 Blast Desc: NFIA_110220 [Neosartorya fischeri NRRL 181] gi|119415590|gb|EAW25528.1| conserved [Neosartorya fischeri NRRL 181]
  misc_feature (189)..(459): NCBI GI: 159124854 Blast Desc: conserved [Aspergillus fumigatus A1163]
  misc_feature (190)..(459): NCBI GI: 261353165 Blast Desc: conserved [Verticillium albo-atrum VaMs.102]
  misc_feature: Useful for introducing or modulating the production of volatile compounds
MSRSAGGVTPIQGTIPFFSTNIWGGGSSSNGTSKAEKTESNFVSAAQQSGKENVSSRSRPGTSSGDQPQSAASAKDHSRKPSFGRKSSFSSPVKGKRRASSSASNGGWGTQIITDATVPPALPDYALAAAAKISKDADTVVSPTSVDSFTKMMSRTGTTPSLGAVGAMGLYQVSSQTVTSPQSSVPMLPAETPSLHNHIHELANKRISTLDYLRKAHEGRVYWFNTLLFDKPDLARMPYFDSRKLARRATNYLLLGLSIPVVIDLNSTTALEFLRSLNTLLTEFDSYQQIHTENGVNSSSLSRARLPQMFRRQGGKGRRQSGAADLGDPNAPNFNKDGSALNAAPASVINFGLGGEGNDLVPGEEYTHLLTPNLPFDPDFFETFATLCDVLIDCYTRLMSMLSTPKDCTPLIAELFAKADSRVRKIIIQGVVKEFEDSSRSGLKQEVASVGKVVLGGLM

SEQ ID NO: 13906 - DNA, 3189 bp, Muscodor strobelii
  misc_feature: SGI EST ID NO. CUFF.33227.0
  misc_feature: Variant of the nucleotide sequence at SEQ ID NO 13904
tttcttttttcctttcgtagagaacatctaatttatgccatacaaacattatgagtatattatcctccaaacttgcaggcaacaatattcacactagacaacagcttcccttcggcactgcgctccctctcttctctgtttcaccgggctggatcatcactgcaaccctagccggcgtagggtgcattcgacacacatcctcagagtgcgacatagtggtccaatcgacttagagatcttttctttaacagacggattggcggcttgttcgctcggaacttctccatcggcccatcttctcgtttgatctacagtcgttacataattccatctctctccttctcgactctcactcattgacttactgccatatacttatcatactacggagatataacgacctgcagtacctagcgtgcacacaacaacatacatacgtcactggccaaaagacgacacatcgcctgctgaggcccggtctcttgctcatttctcattttattctagaaagaattggaccgtctccacatcaattaaaggagattgggaacgtcgcccgtcgagtggcagagaccctccggagccgacgcaccaggccttgtcgacctgtcaaaaggatcgcgctagcctcttaaaataatatcccgaccaggagtccgaaaagacagccatgtcacgctctgcgggcggcgtcacgcccatccagggcaccattccctttttctcgaccaacatctggggcggtggcagcagcagcaacggcacatcaaaggcagaaaagacagagtcgaattttgtatcagcggcgcagcagagcgggaaggagaacgtcagcagcagatcacgtcccggcaccagctcaggcgaccaaccacagtcggccgcttcagccaaggatcacagccggaaaccatccttcggccgtaaatcctccttctcgtcgcccgtcaagggcaaacgtcgcgccagctcgtcggcttcgaatggcggttggggaacccagatcataaccgacgcaactgtcccgccggccctgcccgactacgccctcgccgcggctgccaagatatcgaaggacgcggacacggtcgtgtcgccgacctctgtcgactccttcaccaagatgatgagtcgcacgggcacgacaccgtccctaggggcagtgggagccatgggactctaccaggtctcgtcgcagactgtgacctctcctcagtccagcgtccccatgcttcctgctgagacgccgtccttgcacaaccatatacacgaacttgcgaacaagaggatatcgacgctggactatctgcggaaagcacacgaaggacgagtttactggttcaataccctcctcttcgacaagcccgacttagcgcggatgccgtacttcgacagtcgcaaactcgcccgtcgcgcaacaaactacctgctgctcggcctctccatccccgtcgtcatcgacctcaactctacaaccgctctcgaatttctccgctccctcaacacccttctcacagagttcgactcctaccaacaaatccacaccgagaacggcgtgaactcaagttcgctctcccgagccaggttaccgcaaatgtttcgcagacagggcggcaaaggacggcgacaatcaggagcagcggacctgggagatccgaacgcaccaaatttcaacaaagacgggtcggcgctcaacgccgcacctgcatctgtcatcaattttgggcttggaggcgaaggcaatgatttagtaccaggggaggaatacacgcatctcctaacaccaaatctaccattcgacccagatttcttcgagacctttgctacgctatgcgacgtactcatcgactgctatacccgactcatgagcatgttatccactcccaaagactgcacgccattaattgcagaattattcgctaaagccgactcgagagtacgcaaaatcatcatccagggagttgttaaagagtttgaagactcgagcagatcgggcttgaaacaagaagttgccagcgttggcaaagtcgtcttgggaggcttaatgtgacacggatattttgaggatgggacaattgtatatatcatacggggacatgacatattatcgcggcggcctaaggcgttatcatgggatatttgaacacatgcccggggaagggatatatatctgctatgtggctattctcatagacaatatcccacgcgggaaacttactaccttatcgttttattacaactatcaataccattttattactattctgttcaacgattcgcaccagctacgaaaagccgaaggacaactgtacgcgaggaaaagaagacaggagtaaacagttcatcagataccataacgcattgtgtagtcttcaaggagctaaccactttgtggatcgcctcagtgcttgactctataatggatatcatcacctgaaccatacatcctcgtcctgctgactagccagagcatcacggacaaccaaagggggacttcccacgaagtctagagtgtaaaatggtgtctagctcatagcttcggtcaaccgagacagagaactgatcaaacaaatgcagcaaagcaaatatttgcaaagattgaaccccctcgcaccaagaataagccccatcgagtaaccaagccacctgacgagcaagtaggcaaggcaatcgcataactatcgatctcgacaaaaagagtattctacccacatcatagctcccagccagccacaccagggaacacaagccacacagctcccatccaatcaccaccaagtgtacacagcgatacttcagaggaacgaaaagcacccaagccgacaggtcacggactcatatcttcgtccatggggtgacaagcaagcgaggggtacgttcgacttctatatcaggcacaaatgggagggcaactagattttgaggtaggagagggattggtgcaggtgtgaactgggcttataggaacgatgtgggtgaatgtgagccgctgtgcttctatggcggcgcgtttccgcggtctctgacgaagcagaggcgtccggggactttctcccaaagctgtatgtgagacggtaggaactgtctccgtgtgttgcttcgatagcgatttgttgggcgagggggttgaggaaggaaggaaaagagaaattctgagagatggactgaaattttagatatagcttgttg

SEQ ID NO: 13907 - DNA, 1389 bp, Muscodor strobelii
  misc_feature: SGI cDNA ID NO. 564572
  misc_feature: Encodes the peptide sequence at SEQ ID NO 13908
atgccgagggagatcatcacaatccaggctggccaatgcggcaacagcattggcagtcaattttggcagcaactatgccaagaacacggtatcaaccaagacggcaacctcgaagacttcgcgaccgaaggcggtgaccgcaaagatgtctttttctaccagagcgacgacacacgctatatcccacgagccattctcatcgacctagaaccacgcgttattaacagcatacagagcggcccctacaaaaacatatacaatcccgagaatttctacattggcaagagcggcgtaggcgctgctaacaactggggtgatgggtaccagtcaggagaggcagtacatgaagaaatcatggagatgatagatcgagaggccgacggcagcgactcgcttgagggttttatgctactacattctattgctggtggcacaggatctggcttgggttctttcctactcgaacgaatgaacgatcgattccccaagaagatcatccagacctactctgtttttccggatacgatgaatccagataatgtcgtcgttcatccctacaacagtgtattatccatgcggcgcctgacgcaaaatgccgactcggtagttgtgctcgacaacggagccctgtctcatattgcagcggacagacttcatgtacaagaaccctctttccaacagacaaatcagcttgtgtcgacagtcatgtcagcaagtacaacgactctgagatatccgggctacatgcacaacgaccttgttgggatcttagcgtcgctaattcccacaccacgatgtcatttcctcatgactgcatacaccccatttacaggagatcaagtggaacaggccaagactgtacgcaagaccaccgttttagatgtcatgcgacgattactgcagcctaagaaccggatggtgtcgacagtgccaggaaagaagagctgctacatatccattttaaatgtcattcagggcgatgttgacccgacagatgtacacaagagcttgttacgaatccgagaacggaagctggccacattcatcccctggggcccggcgagcatccaagttgcacttacgaagcgaagcccctatgttcccatgagccatcgtgtcagtggtcttatgttagcaaaccacacaagtatagcgacgctcttcaagcgtatagtcaaacagtatgatggcatgcgaaagcgcaatgcattcatcgaaggatacaaaaagacggcaccgttttccgagaatctacacgagtttgatgaggcaagagaggttgtggcagatctgatagctgagtatgaggcagcagaggacgccaactacctcaatacagatgatggagataaggcaacgtctgccgagacggacaagagaatgggatga

SEQ ID NO: 13908 - protein, 462 aa, Muscodor strobelii
  misc_feature: SGI Peptide ID NO. 564572
  misc_feature (46)..(247): Pfam Id: PF00091 Pfam Desc: Tubulin/FtsZ family, GTPase domain
  misc_feature (249)..(393): Pfam Id: PF03953 Pfam Desc: Tubulin/FtsZ family, C-terminal domain
  misc_feature (1)..(462): NCBI GI: 116805025 Blast Desc: gamma-tubulin [Hypocrea lixii]
  misc_feature (1)..(462): NCBI GI: 256731675 Blast Desc: [Nectria haematococca mpVI 77-13-4]
  misc_feature (1)..(462): NCBI GI: 171677979 Blast Desc: protein product [Podospora anserina] gi|170937058|emb|CAP61717.1| protein product [Podospora anserina]
  misc_feature (1)..(462): NCBI GI: 261353186 Blast Desc: tubulin gamma chain [Verticillium albo-atrum VaMs.102]
  misc_feature (1)..(462): NCBI GI: 85085881 Blast Desc: gamma-tubulin [Neurospora crassa OR74A] gi|1729857|sp|P53377.1|TBG_NEUCR RecName: Full=Tubulin gamma chain; AltName: Full=Gamma-tubulin gi|1430903|emb|CAA66348.1|
  misc_feature (20)..(461): NCBI GI: 156065773 Blast Desc: tubulin gamma chain [Sclerotinia sclerotiorum 1980] gi|154691756|gb|EDN91494.1| tubulin gamma chain [Sclerotinia sclerotiorum 1980]
  misc_feature (1)..(462): NCBI GI: 169615154 Blast Desc: SNOG_10731 [Phaeosphaeria nodorum SN15] gi|111061005|gb|EAT82125.1| SNOG_10731 [Phaeosphaeria nodorum SN15]
  misc_feature (1)..(451): NCBI GI: 70995908 Blast Desc: gamma tubulin MipA [Aspergillus fumigatus Af293] gi|42820747|emb|CAF32060.1| gamma tubulin, [Aspergillus fumigatus] gi|66850344|gb|EAL90671.1| gamma tubulin MipA, Af293]
  misc_feature (1)..(449): NCBI GI: 2363 Blast Desc: gamma-tubulin [Emericella nidulans] gi|259489054|tpe|CBF89007.1| TPA: Tubulin gamma chain (Gamma-tubulin) [Source:UniProtKB/Swiss-Prot;Acc:P18695] nidulans
  misc_feature (1)..(451): NCBI GI: 145240229 Blast Desc: An08g06460 [Aspergillus niger] gi|134077276|emb|CAK45616.1| protein product [Aspergillus niger]
MPREIITIQAGQCGNSIGSQFWQQLCQEHGINQDGNLEDFATEGGDRKDVFFYQSDDTRYIPRAILIDLEPRVINSIQSGPYKNIYNPENFYIGKSGVGAANNWGDGYQSGEAVHEEIMEMIDREADGSDSLEGFMLLHSIAGGTGSGLGSFLLERMNDRFPKKIIQTYSVFPDTMNPDNVVVHPYNSVLSMRRLTQNADSVVVLDNGALSHIAADRLHVQEPSFQQTNQLVSTVMSASTTTLRYPGYMHNDLVGILASLIPTPRCHFLMTAYTPFTGDQVEQAKTVRKTTVLDVMRRLLQPKNRMVSTVPGKKSCYISILNVIQGDVDPTDVHKSLLRIRERKLATFIPWGPASIQVALTKRSPYVPMSHRVSGLMLANHTSIATLFKRIVKQYDGMRKRNAFIEGYKKTAPFSENLHEFDEAREVVADLIAEYEAAEDANYLNTDDGDKATSAETDKRMG

SEQ ID NO: 13909 - DNA, 1668 bp, Muscodor strobelii
  misc_feature: SGI EST ID NO. CUFF.33257.0
  misc_feature: Variant of the nucleotide sequence at SEQ ID NO 13907
gcgaaaaatgtcgggtatctgaaccgctgacctcacagctgtagatgttcagccctgcgatcgtagacaggcatactacctaagtggtttcagtaaaggccgttcaacatcgaccgatgccgtgatcatgccgagggagatcatcacaatccaggctggccaatgcggcaacagcattggcagtcaattttggcagcaactatgccaagaacacggtatcaaccaagacggcaacctcgaagacttcgcgaccgaaggcggtgaccgcaaagatgtctttttctaccagagcgacgacacacgctatatcccacgagccattctcatcgacctagaaccacgcgttattaacagcatacagagcggcccctacaaaaacatatacaatcccgagaatttctacattggcaagagcggcgtaggcgctgctaacaactggggtgatgggtaccagtcaggagaggcagtacatgaagaaatcatggagatgatagatcgagaggccgacggcagcgactcgcttgagggttttatgctactacattctattgctggtggcacaggatctggcttgggttctttcctactcgaacgaatgaacgatcgattccccaagaagatcatccagacctactctgtttttccggatacgatgaatccagataatgtcgtcgttcatccctacaacagtgtattatccatgcggcgcctgacgcaaaatgccgactcggtagttgtgctcgacaacggagccctgtctcatattgcagcggacagacttcatgtacaagaaccctctttccaacagacaaatcagcttgtgtcgacagtcatgtcagcaagtacaacgactctgagatatccgggctacatgcacaacgaccttgttgggatcttagcgtcgctaattcccacaccacgatgtcatttcctcatgactgcatacaccccatttacaggagatcaagtggaacaggccaagactgtacgcaagaccaccgttttagatgtcatgcgacgattactgcagcctaagaaccggatggtgtcgacagtgccaggaaagaagagctgctacatatccattttaaatgtcattcagggcgatgttgacccgacagatgtacacaagagcttgttacgaatccgagaacggaagctggccacattcatcccctggggcccggcgagcatccaagttgcacttacgaagcgaagcccctatgttcccatgagccatcgtgtcagtggtcttatgttagcaaaccacacaagtatagcgacgctcttcaagcgtatagtcaaacagtatgatggcatgcgaaagcgcaatgcattcatcgaaggatacaaaaagacggcaccgttttccgagaatctacacgagtttgatgaggcaagagaggttgtggcagatctgatagctgagtatgaggcagcagaggacgccaactacctcaatacagatgatggagataaggcaacgtctgccgagacggacaagagaatgggatgaattgtgtcatcgtgaaaatgtgagccaagaacactcacggccggtttttcgtcccgcgagttggggcaaatgttacaatgtggatttcggcgttttggttgtggaactcagtcgcaggttgcagataccaatgatatgacataatgatacca

SEQ ID NO: 13910 - DNA, 327 bp, Muscodor strobelii
  misc_feature: SGI cDNA ID NO. 564573
  misc_feature: Encodes the peptide sequence at SEQ ID NO 13911
atgtcgaaatacaattggtcccgacccgtcatcttcctccggtgcaatccaatgactcacgcatctgccgaccagaagaccagcaaggtcgaggaggttcgctccaaccttcctctccccgagcagcccccggtcgcctcggactggaactcagccgatgcccgcaacgtcaacgtcggcgctggcggcgtctccagcggctccaacactgccggtgacacatctggcctccgtgagcctgcctccaaagctaccgaggatctgagctctgtcggccgccagggcaaggataacctcgacaacccgcctaaagatgcttcctactag

SEQ ID NO: 13911 - protein, 108 aa, Muscodor strobelii
  misc_feature: SGI Peptide ID NO. 564573
  misc_feature (18)..(106): NCBI GI: 171693735 Blast Desc: protein product [Podospora anserina] gi|170946816|emb|CAP73620.1| protein product [Podospora anserina]
  misc_feature (26)..(107): NCBI GI: 261353185 Blast Desc: conserved [Verticillium albo-atrum VaMs.102]
  misc_feature (24)..(107): NCBI GI: 39973783 Blast Desc: MGG_00962 [Magnaporthe grisea 70-15] gi|145018082|gb|EDK02361.1| MGG_00962 [Magnaporthe grisea 70-15]
  misc_feature (22)..(106): NCBI GI: 242774543 Blast Desc: conserved [Talaromyces stipitatus ATCC 10500] gi|218722080|gb|EED21498.1| conserved [Talaromyces stipitatus ATCC 10500]
  misc_feature (26)..(106): NCBI GI: 169763250 Blast Desc: [Aspergillus oryzae RIB40] gi|238489137|ref|XP_002375806.1| AFLA_017860 [Aspergillus flavus NRRL3357] gi|83770553|dbj|BAE60686.1| protein product oryzae]
  misc_feature (23)..(106): NCBI GI: 116197791 Blast Desc: CHGG_07051 [Chaetomium globosum CBS 148.51] gi|88178330|gb|EAQ85798.1| CHGG_07051 [Chaetomium globosum CBS 148.51]
  misc_feature (26)..(108): NCBI GI: 145240261 Blast Desc: An08g06620 [Aspergillus niger] gi|134077292|emb|CAK45632.1| protein product [Aspergillus niger]
  misc_feature (22)..(106): NCBI GI: 212532021 Blast Desc: conserved [Penicillium marneffei ATCC 18224] gi|210071531|gb|EEA25620.1| conserved [Penicillium marneffei ATCC 18224]
  misc_feature (22)..(107): NCBI GI: 85102008 Blast Desc: NCU04266 [Neurospora crassa OR74A] gi|16944484|emb|CAD11408.1| [Neurospora crassa] gi|28922799|gb|EAA32021.1| conserved [Neurospora crassa OR74A]
  misc_feature (26)..(106): NCBI GI: 42820765 Blast Desc: [Aspergillus fumigatus]
MSKYNWSRPVIFLRCNPMTHASADQKTSKVEEVRSNLPLPEQPPVASDWNSADARNVNVGAGGVSSGSNTAGDTSGLREPASKATEDLSSVGRQGKDNLDNPPKDASY

SEQ ID NO: 13912 - DNA, 712 bp, Muscodor strobelii
  misc_feature: SGI EST ID NO. CUFF.33242.0
  misc_feature: Variant of the nucleotide sequence at SEQ ID NO 13910
cggaccaaatgctccaaagatcagcctcattgagctcatcgaagcacgaggcattcggaaaggttctgtgctaataggtattaaatagcttgagatctcttcgtgatgtagaattcaatattcctgttcactaaacaactacgaacaacgaacaaaccatctccaactcatcaacaacttacatcacatacctaccgactcttcgtcaacaacacaaactcaacacaatgactcacgcatctgccgaccagaagaccagcaaggtcgaggaggttcgctccaaccttcctctccccgagcagcccccggtcgcctcggactggaactcagccgatgcccgcaacgtcaacgtcggcgctggcggcgtctccagcggctccaacactgccggtgacacatctggcctccgtgagcctgcctccaaagctaccgaggatctgagctctgtcggccgccagggcaaggataacctcgacaacccgcctaaagatgcttcctactagattgattcgtcacttgatacccacgtacacactgcatgactggatgaactggagttgattcatggttcctcaaggatgggaatgggctttgtatcaatatattaagagcatggacttgttccgtggtacgcaactaattgcattggcgactggacgagagatactggtctgcctaggatagtcaataatctgaattgacgttcccaaat

SEQ ID NO: 13913 - DNA, 756 bp, Muscodor strobelii
  misc_feature: SGI cDNA ID NO. 564574
  misc_feature: Encodes the peptide sequence at SEQ ID NO 13914
atggctgaccaagtcacacagcccatccagaagatggagtctcgtcctaagatcgtgacgctcagagccacaggcggggagatgaccttctacataccacctgaactactcgactcagtgtctagatacttccgtgccgcgctcaacagcgattttcaagaaggacgcacgtatgagttcacgttgacggagcattgcacagacgaagtcttgagactctttacttcctgggcttacttgaaaagcgggagcgctggtcttcgtggcaattgcgctcttggcgacctatacgatccggcagagttggaagtggcagtgtccgacggcgcaatttgggtgaaagcctggttatttggcgattacgttgaggccattgacttccagaatgatatcatgagagtgctattcaaaaaatggaagcagctgggcgacaaagaggtcccgtcaaccgtatggcaccacgtcccagttggttcaccgccggatagactcattctcgaatcaatatgctacggtattcaaaaacgacgagaatatggcgatttgtgggctgttttagacactgagagtgttcgtcattttccagcacatgcggcaccagaacttgccggccggctgctgtcaagatttattcagcggtcctgggatccagatgcaccaaaccgaagaagagtagcttggaaatgggtcaaactcgaggattttctcattcagaaagagaaagaaagcaaaaaaagaaaaagagatgttgaataa

SEQ ID NO: 13914 - protein, 251 aa, Muscodor strobelii
  misc_feature: SGI Peptide ID NO. 564574
MADQVTQPIQKMESRPKIVTLRATGGEMTFYIPPELLDSVSRYFRAALNSDFQEGRTYEFTLTEHCTDEVLRLFTSWAYLKSGSAGLRGNCALGDLYDPAELEVAVSDGAIWVKAWLFGDYVEAIDFQNDIMRVLFKKWKQLGDKEVPSTVWHHVPVGSPPDRLILESICYGIQKRREYGDLWAVLDTESVRHFPAHAAPELAGRLLSRFIQRSWDPDAPNRRRVAWKWVKLEDFLIQKEKESKKRKRDVE

SEQ ID NO: 13915 - DNA, 3399 bp, Muscodor strobelii
  misc_feature: SGI cDNA ID NO. 564575
  misc_feature: Encodes the peptide sequence at SEQ ID NO 13916
atggatgagagtaacaccgacgccaacaaggtcgaaatcgactatgaactgttggcccagatggatgatcttggcattcatcggaatgaagaattcgccaacgacgggcgcccagatcgtcgtcgagcacgctttgtcgaggagccacgatacgcgaacccgtcgcccattcgacgtgctcatgaacaggctcctcgcaataatctgcgcaggaatgagcctgtagcagcagctgacatgagaaacgagtggcaaaaagcaattgacgatggtgtgttcgacgatgatgacgcacgcgaagtcagaggtctgggcgagctcgatggtggaaacgccgcacgcatcaatcgagccatgagaagcactcatcaacatgacatgcccagagagcctcagctatacgacccggcatttcccgtatatcgccccggtcagagcccaaataagagccgcgtttttaggcacaaacatacgcgttctgatgtatcctctttgggtggtcttatccctccaggcggtcatgtcaaaaaatggtccaagtcgggcatcagtactacacccgctgttggccatcacagtcctcgccatgatactcctcgtcttgaggccgggcgcggtcgtggacgcggaagtggaatgcctcctccaaccctctcgcaagctggattgtctcaacaaacagtcggctatggtcgtggccgtggccgcgaaaatctacagccgggtcatcagaggcgccatactgagcatggtttcgccgtaaagcccgctttggcagctattccccgaaacgtctcaactgcagcccctccagttcgagatccgggctttgtgcctccccaccttcgccatcgatcggcagccaaacccaaggagacagacgtaatagctgaggctcccgatgatactccaactcccgtcgatgctcacgctcaagctcccatcgatgctccagtttccgtcgatgttccggcatctgacgatgctccgcttgacagcaatattccggtcccaccggtgaatacggcaagtgagccgttcgacaccctgattgtcgttatccgagaagacgttcaagttctgcacaataaggagtggcttaaaggtcgtctcgagatccacgaactgtatgatggcagatatatctgggtgctgatcgtcgaaggcaaaacaactactcgaggagacatccgcgagctcttcgagacgagtgcccatctcagcactatcaacttacgccgtgccaacaagtacgatgggggggatccagtccgtgcaacaacgcagatcaaatgctcatctccagtaaacgccctgcgtctgacgaaaaaggtcaattattatcgtacagataactgggcttcaacagaccggatctttcacgagttcacggagtccattggcattgatgcatcaaatgacgtcgaagagatcaaggatgcactcaagtctgcggacgacgctgtctcagcagtccttgcgtcaggcctcgaacctgaagccgatgatggcggagtagtgccttctccaaaagacccatcgactaccttgatttcagccgaagtagagacagcggacgttcatcaaaatacaggtgaacatgtcctgagcgaagcagggcatccttcacctccagcccagcccgcgtcgtgtattgcggtcaaggtcgataatagcaacggcgagcttcctagtgggtctggctggagtgatggcggcgaccctccgcctgatgatctagtggcaccgttgactcccaccaaagcagaggacgacgctaatcagatctctaaccaagcgggatcgagcgacccaggcgatcctccgcctgaaatcctttcggcagcattgatttccatcaaggtggaggatgttgatgacgaacgccgttgtgaaactggatggaacggcgcagatgattcgcctcctcacaacttatcggccgcgtcgtcgaccatcgaagtggaggatgatcacgagactcgcgttgcggaatgcagtaaaccagtcaatgctctgcctcaatctgctgagctggaggaacttgtctccacgaaaccggcgttcagccccgaagagcgtaagaagttgagaatggaggctacggaagcactccacactattagagaagttcttaacttccctattattctcactttgcctcttgaatccagactcctgattcatagcattactccacgggagtatgaggatatggcaaggcttgccagagaagttcgcgcttctaataagtgcagtctcaccgagaaactcatggtactccaaagcgcaattccctacctcgtcgatagagacgagttcctcttgcttgcgtacgaaaaccagcacgagatcttagtggtggtgttttacagacttctacgtttgctcgagaagtctcggatcgtccgtacgccagatggcatgaggtcgattgctcggctgtcgaacgatatccaatgccccaaggagatcgcagctttcaacgaagaacttgccgcatatagacttcttaatccaacgaagttccgtaatccacgggctactccacgaccatttgttattcctcgatcacaggctattccgaaatcgactgggcgatacgatcccgatcgtgtacgccaaatgggattggagagtgatagatacctcgaagctgagcgagcttcaactggacagacccatgattcgtggaacagtatacatgccagtgtgtctgcacctcagaaggcgtccgttgcttctcccaatgcctttagtgaaccgtctccgacagtaccttttcattctcggaatgagtctactactcttgaaagcagtgccgagagtgccggccaggccgctgctcgccatgccgcacgtgaaggaaacgaggccgcagcggaggtcgatcaaaaacctctcgaaactatcgtgcctcgtcgtcgtaactctcgatcggctacggaggaggatccaacaggacaagagctcgtagagacagggcatcgtcaggcccattccaatacccggccctctcaagtccctcgatccatccagtctcagcaacagtccccaacccaggagtctgcccagggccatcttgttcagggtcattatgctgagcatcaagtacctccccacctgcgtcgaccagccagtgaccgagcagtaggacccgctcacaccgaaggtgagaacatgaacttgggacgaagtcttgccactatgcaggatattctcatgcaggaccgagaaattgctgctcaaatccaacaggatttccgattccagccgtctgtccagcgtcaaccccctcccgtccctccgcatctccgagggcgatctgcccgcacaagtagtaattccagcgctaagagcgtgatgaccaagctggcggccgagattaatgagaagtag

SEQ ID NO: 13916 - protein, 1132 aa, Muscodor strobelii
  misc_feature: SGI Peptide ID NO. 564575
MDESNTDANKVEIDYELLAQMDDLGIHRNEEFANDGRPDRRRARFVEEPRYANPSPIRRAHEQAPRNNLRRNEPVAAADMRNEWQKAIDDGVFDDDDAREVRGLGELDGGNAARINRAMRSTHQHDMPREPQLYDPAFPVYRPGQSPNKSRVFRHKHTRSDVSSLGGLIPPGGHVKKWSKSGISTTPAVGHHSPRHDTPRLEAGRGRGRGSGMPPPTLSQAGLSQQTVGYGRGRGRENLQPGHQRRHTEHGFAVKPALAAIPRNVSTAAPPVRDPGFVPPHLRHRSAAKPKETDVIAEAPDDTPTPVDAHAQAPIDAPVSVDVPASDDAPLDSNIPVPPVNTASEPFDTLIVVIREDVQVLHNKEWLKGRLEIHELYDGRYIWVLIVEGKTTTRGDIRELFETSAHLSTINLRRANKYDGGDPVRATTQIKCSSPVNALRLTKKVNYYRTDNWASTDRIFHEFTESIGIDASNDVEEIKDALKSADDAVSAVLASGLEPEADDGGVVPSPKDPSTTLISAEVETADVHQNTGEHVLSEAGHPSPPAQPASCIAVKVDNSNGELPSGSGWSDGGDPPPDDLVAPLTPTKAEDDANQISNQAGSSDPGDPPPEILSAALISIKVEDVDDERRCETGWNGADDSPPHNLSAASSTIEVEDDHETRVAECSKPVNALPQSAELEELVSTKPAFSPEERKKLRMEATEALHTIREVLNFPIILTLPLESRLLIHSITPREYEDMARLAREVRASNKCSLTEKLMVLQSAIPYLVDRDEFLLLAYENQHEILVVVFYRLLRLLEKSRIVRTPDGMRSIARLSNDIQCPKEIAAFNEELAAYRLLNPTKFRNPRATPRPFVIPRSQAIPKSTGRYDPDRVRQMGLESDRYLEAERASTGQTHDSWNSIHASVSAPQKASVASPNAFSEPSPTVPFHSRNESTTLESSAESAGQAAARHAAREGNEAAAEVDQKPLETIVPRRRNSRSATEEDPTGQELVETGHRQAHSNTRPSQVPRSIQSQQQSPTQESAQGHLVQGHYAEHQVPPHLRRPASDRAVGPAHTEGENMNLGRSLATMQDILMQDREIAAQIQQDFRFQPSVQRQPPPVPPHLRGRSARTSSNSSAKSVMTKLAAEINEK

SEQ ID NO: 13917 - DNA, 2691 bp, Muscodor strobelii
  misc_feature: SGI cDNA ID NO. 564576
  misc_feature: Elevated expression when VOC is produced
  misc_feature: Encodes the peptide sequence at SEQ ID NO 13918
aacaatgttgactattttggtcttcagaagggtgagtcgtcaacgattgaagcgggccaagccgggaaaccgactgaagaccctttaccctctttctcagcccatgacgtgcttggtaccgaaataaatgcagttgcagagcctgatcaacagcgtcgcgcggagtcgggtgatttaatgcagattgaagaggtaaatgaggaaggcgaagattcttcagaagagaagatttcatctgctgtatttctaccacatccagggctggagccatctgcggagaagacaccttgtggtatcgagaaggttgagcctatctctcgtcgtcctagcaccaaagactttcttccgtggctcgtgaaagcagatgagccagaggccgaaggagatagcgcaaatggctcggtcgaggcagatgttaataacggtaggaagaccagcgttgcgcacgcgcgagacttacttagtaaagtaagcaacgatttcactgctggggatgacgtgaagctcccaaagaaatcccgtgatactactaccaagacttcgcaaccattgtcgcaactcgacgaatattacgtgcatgatcatcagctcactcctaagccattggaggccattgagctgataccatacaaacatcaagttggagggcataccactatatggagattttctaagcgggccgtttgcaaacagcttaataatcgagagaatgagttttacgagaatattgagcgttaccaccgagatcttctcccttttcttccaaggtatatcggtgtcctcaatgtgacatttcagaaacagccgcgacgaaaatctaccatcaagaaggatgaaggctcgagcgtcgagatcacaagcagcgaaatgagcgctctatcgaacggcaaaggtgatcatgccatgcctagcgttcgctcgcgctcgactggtcatgaggacgacaaacggcggcgagtgatcagccagtcgttgcaatctagtcacattccgattcctactgttacgtttatggacaaccagcatatcctgccgcgaagctttctccagcctgctggactatttggccaaaaagaacgtcctaggagtgcgtctgcagctacgatacagcagcatgcgagtgattcggcaaaatcgcctttcgataagcccaattcgcagcttgtccgaccgactttggaggatcgacacgctaatagctggggagccactacggtcaataagagactgcgaaatgaagtattcaacgatgcatttctgaaaaggcccatcgctgttcacaaacatcaaacacccgcttctcatcatcgttcggttccgagacgcctagcgcaatccagtcaaaaggaatcccagaccatgaccgtggcatcagaggggatggctgagagtccttcattcgtcaaccagtcacaccccctaaagtatccagcttcgcttctattcagccaaagtgatgtcggaccgaagacggatagactggacgtgcgtgacacacgtcacgtaaaagatgtcactggcacaagcgcaccggaaccagagacatttggcgatagattcccaactcaggtgcgcaagcgacgctattcaggtagtaagcttcgacgcaagccacaagaggttggagaagctcgtggtgatttaaaatactttgaggatgctgatgatgtcgggtatcggggtgatggcgaagctgatgtcttttcgccactcatagaaagtacagatgccaacaacaagatttccggttcaaacggcgtggctccacctgcaatgttagagcttcccgagtccggtctttcgtctgctttcccctcaacgataccaagccctgaagtagagatcagggagattccacgacccagcaacccaaaggaagcccaaacgcaacgcgactcgagagtggagtatttcctgttgcttgaagacctgacagctggaatgaaacggccatgtgtcatggatctgaagatggggactcgacaatacggtgttgaagccgggccaaagaaacgtgagtcgcagcgccgaaagtgtgctgagactacgtctagggagctaggtgtccgtgtctgtggcttacagacatgggatgccaagtcccagacatatgtatttcgagacaagtacttcgggcgggacctcaaagccggcgtggagttccgggacacgttgactatgtttctatatgacggggttgattacgctagcgtattgagacacatccctaacctgctacaaaaaataaatcaattggagatgaccgtccttcgactacgaggataccgattctatgctgcgagtctgctcatgttctacgatgccggggcgtctagtaacggcagcgacgcagcagtagatgactcgaccacagattttgcgacggacacggaagagacgtgggacatcaagaaacatcggaagaacaaggcagagatcgatatcaagattgccgacttcgcgaacagtgtgacacctggggatttggctggggacaagccgtgtcctccgaagcatcctgacgagccggaccgaggattcttacgaggtctctctactctccgaaagacattcttgcaaattcaaaaagacatcaggagcaaaatgggcctcgtgccactacgcagagtggggaagagtggtgatggagtaatggaggacgaatacgatgagctgagtgccagcgagtga

SEQ ID NO: 13918 - protein, 896 aa, Muscodor strobelii
  misc_feature: SGI Peptide ID NO. 564576
  misc_feature (564)..(859): Pfam Id: PF03770 Pfam Desc: Inositol polyphosphate kinase
  misc_feature (638)..(774): Pfam Id: PF03770 Pfam Desc: Inositol polyphosphate kinase
  misc_feature (4)..(896): NCBI GI: 171690064 Blast Desc: protein product [Podospora anserina] gi|170944987|emb|CAP71098.1| protein product [Podospora anserina]
  misc_feature (64)..(885): NCBI GI: 116200143 Blast Desc: CHGG_08227 [Chaetomium globosum CBS 148.51] gi|88179506|gb|EAQ86974.1| CHGG_08227 [Chaetomium globosum CBS 148.51]
  misc_feature (53)..(891): NCBI GI: 256730516 Blast Desc: NECHADRAFT_29709 [Nectria haematococca mpVI 77-13-4]
  misc_feature (4)..(896): NCBI GI: 261357216 Blast Desc: inositol hexakisphosphate kinase [Verticillium albo-atrum VaMs.102]
  misc_feature (76)..(877): NCBI GI: 85081967 Blast Desc: NCU03546 [Neurospora crassa OR74A] gi|18376053|emb|CAD21059.1| related to transcription factor KCS1 [Neurospora crassa] gi|28917903|gb|EAA27589.1| [Neurospora crassa
  misc_feature (68)..(882): NCBI GI: 46109530 Blast Desc: FG01647.1 [Gibberella zeae PH-1]
  misc_feature (51)..(871): NCBI GI: 156060653 Blast Desc: SS1G_02469 [Sclerotinia sclerotiorum 1980] gi|154699873|gb|EDN99611.1| SS1G_02469 [Sclerotinia sclerotiorum 1980]
  misc_feature (41)..(871): NCBI GI: 154314074 Blast Desc: BC1G_04980 [Botryotinia fuckeliana B05.10] gi|150849126|gb|EDN24319.1| BC1G_04980 [Botryotinia fuckeliana B05.10]
  misc_feature (390)..(889): NCBI GI: 145606320 Blast Desc: MGG_11922 [Magnaporthe grisea 70-15] gi|145014016|gb|EDJ98657.1| MGG_11922 [Magnaporthe grisea 70-15]
  misc_feature (70)..(865): NCBI GI: 115399552 Blast Desc: conserved [Aspergillus terreus NIH2624] gi|114192248|gb|EAU33948.1| conserved [Aspergillus terreus NIH2624]
  misc_feature: Useful for introducing or modulating the production of volatile compounds
NNVDYFGLQKGESSTIEAGQAGKPTEDPLPSFSAHDVLGTEINAVAEPDQQRRAESGDLMQIEEVNEEGEDSSEEKISSAVFLPHPGLEPSAEKTPCGIEKVEPISRRPSTKDFLPWLVKADEPEAEGDSANGSVEADVNNGRKTSVAHARDLLSKVSNDFTAGDDVKLPKKSRDTTTKTSQPLSQLDEYYVHDHQLTPKPLEAIELIPYKHQVGGHTTIWRFSKRAVCKQLNNRENEFYENIERYHRDLLPFLPRYIGVLNVTFQKQPRRKSTIKKDEGSSVEITSSEMSALSNGKGDHAMPSVRSRSTGHEDDKRRRVISQSLQSSHIPIPTVTFMDNQHILPRSFLQPAGLFGQKERPRSASAATIQQHASDSAKSPFDKPNSQLVRPTLEDRHANSWGATTVNKRLRNEVFNDAFLKRPIAVHKHQTPASHHRSVPRRLAQSSQKESQTMTVASEGMAESPSFVNQSHPLKYPASLLFSQSDVGPKTDRLDVRDTRHVKDVTGTSAPEPETFGDRFPTQVRKRRYSGSKLRRKPQEVGEARGDLKYFEDADDVGYRGDGEADVFSPLIESTDANNKISGSNGVAPPAMLELPESGLSSAFPSTIPSPEVEIREIPRPSNPKEAQTQRDSRVEYFLLLEDLTAGMKRPCVMDLKMGTRQYGVEAGPKKRESQRRKCAETTSRELGVRVCGLQTWDAKSQTYVFRDKYFGRDLKAGVEFRDTLTMFLYDGVDYASVLRHIPNLLQKINQLEMTVLRLRGYRFYAASLLMFYDAGASSNGSDAAVDDSTTDFATDTEETWDIKKHRKNKAEIDIKIADFANSVTPGDLAGDKPCPPKHPDEPDRGFLRGLSTLRKTFLQIQKDIRSKMGLVPLRRVGKSGDGVMEDEYDELSASE

SEQ ID NO: 13919 - DNA, 3072 bp, Muscodor strobelii
  misc_feature: SGI EST ID NO. CUFF.33388.1
  misc_feature: Variant of the nucleotide sequence at SEQ ID NO 13917
caacaatgttgactattttggtcttcagaagggtgagtcgtcaacgattgaagcgggccaagccgggaaaccgactgaagaccctttaccctctttctcagcccatgacgtgcttggtaccgaaataaatgcagttgcagagcctgatcaacagcgtcgcgcggagtcgggtgatttaatgcagattgaagaggtaaatgaggaaggcgaagattcttcagaagagaagatttcatctgctgtatttctaccacatccagggctggagccatctgcggagaagacaccttgtggtatcgagaaggttgagcctatctctcgtcgtcctagcaccaaagactttcttccgtggctcgtgaaagcagatgagccagaggccgaaggagatagcgcaaatggctcggtcgaggcagatgttaataacggtaggaagaccagcgttgcgcacgcgcgagacttacttagtaaagtaagcaacgatttcactgctggggatgacgtgaagctcccaaagaaatcccgtgatactactaccaagacttcgcaaccattgtcgcaactcgacgaatattacgtgcatgatcatcagctcactcctaagccattggaggccattgagctgataccatacaaacatcaagttggagggcataccactatatggagattttctaagcgggccgtttgcaaacagcttaataatcgagagaatgagttttacgagaatattgagcgttaccaccgagatcttctcccttttcttccaaggtatatcggtgtcctcaatgtgacatttcagaaacagccgcgacgaaaatctaccatcaagaaggatgaaggctcgagcgtcgagatcacaagcagcgaaatgagcgctctatcgaacggcaaaggtgatcatgccatgcctagcgttcgctcgcgctcgactggtcatgaggacgacaaacggcggcgagtgatcagccagtcgttgcaatctagtcacattccgattcctactgttacgtttatggacaaccagcatatcctgccgcgaagctttctccagcctgctggactatttggccaaaaagaacgtcctaggagtgcgtctgcagctacgatacagcagcatgcgagtgattcggcaaaatcgcctttcgataagcccaattcgcagcttgtccgaccgactttggaggatcgacacgctaatagctggggagccactacggtcaataagagactgcgaaatgaagtattcaacgatgcatttctgaaaaggcccatcgctgttcacaaacatcaaacacccgcttctcatcatcgttcggttccgagacgcctagcgcaatccagtcaaaaggaatcccagaccatgaccgtggcatcagaggggatggctgagagtccttcattcgtcaaccagtcacaccccctaaagtatccagcttcgcttctattcagccaaagtgatgtcggaccgaagacggatagactggacgtgcgtgacacacgtcacgtaaaagatgtcactggcacaagcgcaccggaaccagagacatttggcgatagattcccaactcaggtgcgcaagcgacgctattcaggtagtaagcttcgacgcaagccacaagaggttggagaagctcgtggtgatttaaaatactttgaggatgctgatgatgtcgggtatcggggtgatggcgaagctgatgtcttttcgccactcatagaaagtacagatgccaacaacaagatttccggttcaaacggcgtggctccacctgcaatgttagagcttcccgagtccggtctttcgtctgctttcccctcaacgataccaagccctgaagtagagatcagggagattccacgacccagcaacccaaaggaagcccaaacgcaacgcgactcgagagtggagtatttcctgttgcttgaagacctgacagctggaatgaaacggccatgtgtcatggatctgaagatggggactcgacaatacggtgttgaagccgggccaaagaaacgtgagtcgcagcgccgaaagtgtgctgagactacgtctagggagctaggtgtccgtgtctgtggcttacagacatgggatgccaagtcccagacatatgtatttcgagacaagtacttcgggcgggacctcaaagccggcgtggagttccgggacacgttgactatgtttctatatgacggggttgattacgctagcgtattgagacacatccctaacctgctacaaaaaataaatcaattggagatgaccgtccttcgactacgaggataccgattctatgctgcgagtctgctcatgttctacgatgccggggcgtctagtaacggcagcgacgcagcagtagatgactcgaccacagattttgcgacggacacggaagagacgtgggacatcaagaaacatcggaagaacaaggcagagatcgatatcaagattgccgacttcgcgaacagtgtgacacctggggatttggctggggacaagccgtgtcctccgaagcatcctgacgagccggaccgaggattcttacgaggtctctctactctccgaaagacattcttgcaaattcaaaaagacatcaggagcaaaatgggcctcgtgccactacgcagagtggggaagagtggtgatggagtaatggaggacgaatacgatgagctgagtgccagcgagtgagcttgtgctgagctcgatacttacgtttgatgatgattcccccggagggcgaaagaccggcgggatttccaatgcttacttagttgctcggaattgataccctagaatggcgtacggggatacgggattcattgtctctttgcatgggggatcggagtggagcgggccggcatttgttagtgcattttcgagagattacttgcatcttggaaggttgctggtcggcgcaaatgagaataagtgtctggttcggatcagaccagggtcgggtactcggcaagaggctacggcggctcgcctcggaacatggatctgattctagtctggggcgtatagattgatagacaaaattaattcagagtttgagatattactgcgtg

SEQ ID NO: 13920 - DNA, 1437 bp, Muscodor strobelii
  misc_feature: SGI cDNA ID NO. 564577
  misc_feature: Encodes the peptide sequence at SEQ ID NO 13921
atggctgagaaatcccctgagagcaagcagacggtggtgttcttgcaccctgatctcggcatcgggggtgctgagaggctagtcgtcgatgccgccgtcggtctgcagaagcgaggctacaagatcgtcatcttcaccagtcactgcgacccctcccactgcttcgacgagtgcagagacggcaccctcgaagtccgcgtccgcggcaacaccgtcgtccctccctccatcctgacccgattcagcatcctctgcgccattctccgccaggtccacctcatcctccagatctacctcaacggagagatttgcaaactcaaccccgacatctacttcgtcgaccagctcagcgccggtctccccttactccagttcctgcagccctcccaacgcatcttcttctactgccatttccccgatctgctgctggcccagggccgacagaaatggtggaagcgagcatacagagtccccttcgacctgtgggagcagtggagcatgagctttgccgacgccattgccgtcaactcaaacttcaccaagggcatcgtcagcaaaacatggcccacccttgtgcaacacaaggagctgctcaccgtgtacccctgtgtacccatcaagacaaagaaagaccagacggatgagaagcccctctggaatggcatgaagttcctcctcagcatcaaccgattcgagcgcaagaaagacatcgcactcgccatcaaggccttcgctggcttgagcagagagaaacgtgcaggtgtcagattggccgtcgctggcggctatgaccctcgtgtctctgagaatgttagctaccacaaggaactcgtcgagttggccgagtctctcggcctcaagaacatgacagtgaagaccccacagacggcccaggccgtccctaacgatgtcgaggtcgtcttcctccaaaacgtcaccaatatcctgaaggacatgctcctctcttcggctcggttgcttgtctacactccatccaacgaacattttggcattgtgcccctcgaggctatgttggctggtgtgccagtccttgcttgcaacacaggtggtcccacagagaccgtcgttgaggggaagactggctggttacgtcctcctggcgaggtggagcagtgggcggatgtcatggacattgctcttcatcaactaagcccggaagaagttacaaagatgtcgtgggcgggtatggagagggtcaagaccgggtttggtgaagcacagatggctgagcgcttggattctatcttcaaagatatgcagcgctctgcatggccttggcaaggcatcccgttgctattctttctcatgatcccggttgttggtgtcgcggccattctggtcaagtgtgtgactgatgcgttgggttggactcattcgggatggaatgtacagattccatttagtgctcggaattaa

SEQ ID NO: 13921 - protein, 478 aa, Muscodor strobelii
  misc_feature: SGI Peptide ID NO. 564577
  misc_feature (210)..(405): Pfam Id: PF00534 Pfam Desc: Glycosyl transferases group 1
  misc_feature (320)..(405): Pfam Id: PF00534 Pfam Desc: Glycosyl transferases group 1
  misc_feature (210)..(288): Pfam Id: PF00534 Pfam Desc: Glycosyl transferases group 1
  misc_feature (10)..(461): NCBI GI: 145606336 Blast Desc: MGG_02384 [Magnaporthe grisea 70-15] gi|145014026|gb|EDJ98667.1| MGG_02384 [Magnaporthe grisea 70-15]
  misc_feature (5)..(426): NCBI GI: 156060661 Blast Desc: SS1G_02473 [Sclerotinia sclerotiorum 1980] gi|154699877|gb|EDN99615.1| SS1G_02473 [Sclerotinia sclerotiorum 1980]
  misc_feature (7)..(450): NCBI GI: 154314064 Blast Desc: BC1G_04975 [Botryotinia fuckeliana B05.10] gi|150849121|gb|EDN24314.1| BC1G_04975 [Botryotinia fuckeliana B05.10]
  misc_feature (7)..(439): NCBI GI: 85075891 Blast Desc: mannosyltransferase [Neurospora crassa OR74A] gi|74622721|sp|Q8X0H8.1|ALG2_NEUCR RecName: Full=Alpha-1,3-mannosyltransferase alg-2; AltName: AltName: 2 to
  misc_feature (7)..(426): NCBI GI: 46109516 Blast Desc: FG01640.1 [Gibberella zeae PH-1]
  misc_feature (7)..(467): NCBI GI: 256730727 Blast Desc: NECHADRAFT_30261 [Nectria haematococca mpVI 77-13-4]
  misc_feature (4)..(473): NCBI GI: 171690038 Blast Desc: protein product [Podospora anserina] gi|170944974|emb|CAP71085.1| protein product [Podospora anserina]
  misc_feature (7)..(448): NCBI GI: 189206127 Blast Desc: mannosyltransferase [Pyrenophora tritici-repentis Pt-1C-BFP] gi|187975491|gb|EDU42117.1| mannosyltransferase [Pyrenophora tritici-repentis Pt-1C-BFP]
  misc_feature (1)..(404): NCBI GI: 261356964 Blast Desc: mannosyltransferase [Verticillium albo-atrum VaMs.102]
  misc_feature (7)..(428): NCBI GI: 169621754 Blast Desc: SNOG_14088 [Phaeosphaeria nodorum SN15] gi|160704327|gb|EAT78713.2| SNOG_14088 [Phaeosphaeria nodorum SN15]
  misc_feature (184)..(419): SWISSPROT Homolog: EC 2.4.1.13 Sucrose synthase
MAEKSPESKQTVVFLHPDLGIGGAERLVVDAAVGLQKRGYKIVIFTSHCDPSHCFDECRDGTLEVRVRGNTVVPPSILTRFSILCAILRQVHLILQIYLNGEICKLNPDIYFVDQLSAGLPLLQFLQPSQRIFFYCHFPDLLLAQGRQKWWKRAYRVPFDLWEQWSMSFADAIAVNSNFTKGIVSKTWPTLVQHKELLTVYPCVPIKTKKDQTDEKPLWNGMKFLLSINRFERKKDIALAIKAFAGLSREKRAGVRLAVAGGYDPRVSENVSYHKELVELAESLGLKNMTVKTPQTAQAVPNDVEVVFLQNVTNILKDMLLSSARLLVYTPSNEHFGIVPLEAMLAGVPVLACNTGGPTETVVEGKTGWLRPPGEVEQWADVMDIALHQLSPEEVTKMSWAGMERVKTGFGEAQMAERLDSIFKDMQRSAWPWQGIPLLFFLMIPVVGVAAILVKCVTDALGWTHSGWNVQIPFSARN

SEQ ID NO: 13922 - DNA, 1875 bp, Muscodor strobelii
  misc_feature: SGI EST ID NO. CUFF.33266.0
  misc_feature: Variant of the nucleotide sequence at SEQ ID NO 13920
caggaaggtggggtgtgtcgcggcatgtagggctgatgaaggggacaagctgttcttgcctgttcggtcgtgcagttttggcccctcattccccgtttcgtgctatgttgtagatcgatcgatacctgaaacatctgcagttgcttcccagcttgccttcgtctcattctccaaatcaccgaccacttcccagacacactagacagcagcccggatcagcgtccacagccgcacttcccagcgccgtacccaccgggcaatggcagctagcgcgcctttgtcttcaccatggctgagaaatcccctgagagcaagcagacggtggtgttcttgcaccctgatctcggcatcgggggtgctgagaggctagtcgtcgatgccgccgtcggtctgcagaagcgaggctacaagatcgtcatcttcaccagtcactgcgacccctcccactgcttcgacgagtgcagagacggcaccctcgaagtccgcgtccgcggcaacaccgtcgtccctccctccatcctgacccgattcagcatcctctgcgccattctccgccaggtccacctcatcctccagatctacctcaacggagagatttgcaaactcaaccccgacatctacttcgtcgaccagctcagcgccggtctccccttactccagttcctgcagccctcccaacgcatcttcttctactgccatttccccgatctgctgctggcccagggccgacagaaatggtggaagcgagcatacagagtccccttcgacctgtgggagcagtggagcatgagctttgccgacgccattgccgtcaactcaaacttcaccaagggcatcgtcagcaaaacatggcccacccttgtgcaacacaaggagctgctcaccgtgtacccctgtgtacccatcaagacaaagaaagaccagacggatgagaagcccctctggaatggcatgaagttcctcctcagcatcaaccgattcgagcgcaagaaagacatcgcactcgccatcaaggccttcgctggcttgagcagagagaaacgtgcaggtgtcagattggccgtcgctggcggctatgaccctcgtgtctctgagaatgttagctaccacaaggaactcgtcgagttggccgagtctctcggcctcaagaacatgacagtgaagaccccacagacggcccaggccgtccctaacgatgtcgaggtcgtcttcctccaaaacgtcaccaatatcctgaaggacatgctcctctcttcggctcggttgcttgtctacactccatccaacgaacattttggcattgtgcccctcgaggctatgttggctggtgtgccagtccttgcttgcaacacaggtggtcccacagagaccgtcgttgaggggaagactggctggttacgtcctcctggcgaggtggagcagtgggcggatgtcatggacattgctcttcatcaactaagcccggaagaagttacaaagatgtcgtgggcgggtatggagagggtcaagaccgggtttggtgaagcacagatggctgagcgcttggattctatcttcaaagatatgcagcgctctgcatggccttggcaaggcatcccgttgctattctttctcatgatcccggttgttggtgtcgcggccattctggtcaagtgtgtgactgatgcgttgggttggactcattcgggatggaatgtacagattccatttagtgctcggaattaatgcttatgatcaggtaccatcggacactatgaggtaggtatgacggaaaatagaaatcaacgaatcgcttcactacgtattatttgacttttgttgtatatcaacatcgtgtgtttattgtgagttcaataagatctgcttacactcgta

SEQ ID NO: 13923 - DNA, 5208 bp, Muscodor strobelii
  misc_feature: SGI cDNA ID NO. 564578
  misc_feature: Encodes the peptide sequence at SEQ ID NO 13924
atgccgccttacgatatcgagctgggcctcgagcaagatggggacgggagaggtgacggctctcctgttgttggtgactcccgcgacggattggtcttcgagtccctgatagaggccgacaaagatttcgttcagggaaagctaccaaatattgacattgttcatgtcattggtaccggaatcaacagtaagggtttgagcgagtacttgggtattttctctgtgatagagtctgagaaaagaatattcactttcaatgtggacatatatagtttgatgattgacgacatgccaatgacggcgatcacgacgcaggctcggaagctcctgaatggattacattacttcaggaactctgcacccacagataatccatccggcagagctcttgcctttattgcttatgacttaggagcccttgtgctcaagaaagcaattgcagtggccggtatatctcccaatacctggccaggagtattttcacacgccgcacgcttcatcttccgggactgctttcaacgagccaagagtgccgaattgttacagtccaaaatgtcagagttcctcttcacgagagcaggggctctttggaaggcacgcctcagtccgacaattattgcaagtcttgcgagagctgctatcgaaacgacggagctctttcttgcatccaaagtcacgctttgtagcagaatcgtcagcttctatacaaagcatgacgccaagacggagatacatgaggtttttgattatttcacgtcaactctaggggtggcgggcgagttaattgtcgaagcgcaggatgagcatttaggccgcgacctgtcggacaaggtatgctttgcggtaaataaatgggtgccgcacaagtcttgggaaccctttgagcgaacactaatgacattggcacttcctcaccgtcattcgatactggacactagagattgcacacacccgatatttaagatgccgaagtatcaagagtggtccaaatctcgcgctatgggagtcttgctcattgaaagtgatgacccagtatccagacgaaaggctgcagaacaggtttttctatcatggcagacgagacagttcacgcgaggggagtacggtatcaggaatttttcgttcacattcagcaagctagatcccttgcgggatagcatagacgacatgctcacctctttgcttttgcaggcagcaccgcgatatggtagtagtgggtccgaaacagacgagtacagactgctgaaagatcaatttgagacccagcgcgcatggacagagcaagatctactcctcatgttcaagcagcagtactacagattcctgggaacagacactttgatactactgcaagacgttgaacactgcaaacaagacggacttgtcgcgttttggaactttttcaaagaacaagaatccccttcagagttccctctgaagattgtaatgacaaagtctcatggcgtcagcaaagctgcggtgctcgacatgggcatgggggtgttggttgagcatttaaccgtgcttgagtctgatactgacttaagcaaggaagaaaaaacggttcaacagtatgttgaatcactcattaagcaactctgccctaatgaggccggggcttcccagattagggacagtttaggcgatattgggaaccccgtcgcttgcacggctgacttcgtctcttttgcacagaggcgcaccggctggccagagaagcgcacaatcaataatctccgttccatctgctccgcattagataatgcatgccactcgactactccatcatctgctcttaatcaggtactatgcttggaccctgatcaagacgggctccggtgggctttgtgctggttgttgcacgctattcgaccactatccagatatgaactggcacggatttacttctatcgcaaagggctggatgaaaattgtccttctcctacggacatcgtagaagcacaggtctctgttgaaaaacatctccgtggtattgtagaatatagtcacaaccaagtcacgataagggacgatgtaagtggactgcttgagctccgagatggctacctatggacggaagtaaagacctcggctacgcagttgacgcaaagctttgttgttcagtatctgtcgagttctaccgttgttgcgcggctgaggaaactgtacggcgactacaagctgcaatgtcaggatgccaaagacagccttgttcctcctctgaatgctgatggcgaggatcccctattctatgcagtcgagtgccttccgacatactgtgttcatgggaaagattacaaatgcgccgtatctgcgctttgtgaattatctcaagatgctgcggacttatgggcgaaggtattttgggccatggctaacccgttctctcgccctcgagagcctccaaagtccgcgatcgaagctctttacttcattgatcctactatatggaactccgacgacacgacagaacatttaactcgacaacacgcagttgatccccaagaaaccgggtcagagcaatcggaccgagatgaactgtggtcggctagagccttctgcaaagcggtttctctaggccgggaagaagtagcgattgattatgcgagccgactgctaaccatttgcaagaatcagaagcgcgagtgtatctttgcagagccggtttttcaaagagctctgtggcgtgcgatctggcttcacatgggacgtctgctcaccgtgctgcttgacggtggaagtgactgtgatgcttcgggtatgaataattggagttctccactacatatggcgtctgggctaggctacactgatatcgtccgggatcttctggagcatggcgcaaattgggagcacagaagtggaagtagtatcctcaacgcggcagcttctagcggacatgttagcaccgtaaagttacttgcaagccgttgtccatcactccttaatgacactgagctacccctaatctcggcttgctctttcggcagacagcgcgtcgtggaagctttgttgaaactcagcgccaatcctagggacaagcttgttccagagctggattccatgatgccggggttattagcagcctctgctcaagggcacctgggaactatcaaaactcttgttgaccaaattcaagatctgaacaaccgtggcccaggtgaaggcgctggtccctcactagtcgccgctgcggtagctggtagcagtgacgctgttcgcctgttactgacacgagggttaaaccccaacgatgagcacatcgacccacctatcatagttgagactttgagatctgatatccccctggatgataaacttgagatcctgaatattctcgcagctaatgaccccccagctaaagtaaatctagctgttactgcaaccggccgcacgccactgatggaagccatcgcgaagggcgacctctcaatagtcaaatggctattggacaacggtagcgatgttcatattgctgacaatgacggatggactgccattttctatgctgtagttcacaaccacgtggaaatcgtacaagctctactcccctatcaaccaagattggacatcaaagtttcaggtggacacactctcactgaaatggccattgacaaggaaacaatcttcccgcttctcttagatgccaatccaggcctagatatcaacatgatcaacgatcgcgggttatcggcgctgcagtgcgctgtacacaaacgccttggcggtgtggcaagagttttgttgactaaaaaggcctatatacatcatagagacaaccaggggtggaatgccattctcgacgcagttggagactccgaggaccctgagatggctcgaatattgggagatggcggtgcaaatctacaagactccttgtctaatggaaaatgcgttcttcatcttgccactcgctcaggggtggagatgcttcgtgtactactcgagttccatcagcgtatagatcttgagcaaaaggactcatctgggttaactgcgctgcatcaaagtctgctgcttggcgccagcgaggaagtaatccagctactgttgagggccggcgccgacgttactgcgaagaacgaggcagggctcactatgctaatgtgcgcggtttttgggcggggctcaccggttaacttgaaaagaatcttgattgaagaagctacagatcccaacgagtacagcgaggtgtacggtgcacctctcataatagcgtgttcatatctgcaggccgactttgtggacgctctgctcgataaggcagatgctaatatacggtggatacacggcatacggtcaacgccgctaatagcgacgctgctgaactacactacaagcgacggcctctacagaaacgaggaagtcgataaaatcgtgcgcatgctgattgaccacggcgctttggcttgtattgataccgaggtaatgttaactcatggtcgggctatcgccagcccccttctggccgcttgcattggcgcgagcccggagatcatccagtacatgatgagcgcaggcagctcagagcaaaagccaggtccgctcgggcatctcgctatccatttcgctgctgccaacggcctgccaagtttcaaggttgcaagcctgctgcatcaaggaaatctcctggagccagacaccgccagtaagacggcgttacattgggcagctcagcattctcgtgtcgatactgtaaggtacatacttgacgtaattgcccctacggataacgacaagcggctcaagtacgtgaacatgagagacatcgacggatggactcccctagcctgggcgacacggcccaacactagagagcagtgggttaatgacttagtagagagaccgaacatcgcagaaacaatagagtatttactaggggaaggcgctgatccattagctcagttcaccatcggacagggtgcccacgttgaaactttcaccgccctaactatggcgcagctatgcgatctaccacgtgaatctatcgccgctatcaaaaaggcaaaggctcaccacgaagctgaggagtttaaatctattatgaaagatgcaggttttgatgccgataatgaggaaaatgagggagagaaagaagggggtgtagacgaacagccagactccggcaatgcttctcgagtccagagagaggaacataaagatgaagatgaaagtggctcggatttttcatgggaagactctgattag

SEQ ID NO: 13924 - protein, 1735 aa, Muscodor strobelii
  misc_feature: SGI Peptide ID NO. 564578
  misc_feature (1129)..(1161): Pfam Id: PF00023 Pfam Desc: Ankyrin repeat
  misc_feature (1329)..(1362): Pfam Id: PF00023 Pfam Desc: Ankyrin repeat
  misc_feature (923)..(955): Pfam Id: PF00023 Pfam Desc: Ankyrin repeat
  misc_feature (923)..(949): Pfam Id: PF00023 Pfam Desc: Ankyrin repeat
  misc_feature (1162)..(1194): Pfam Id: PF00023 Pfam Desc: Ankyrin repeat
  misc_feature (50)..(1671): NCBI GI: 67523479 Blast Desc: AN2195.2 [Aspergillus nidulans FGSC A4] gi|40744696|gb|EAA63852.1| AN2195.2 [Aspergillus nidulans FGSC A4] gi|259487579|tpe|CBF86359.1| TPA: conserved [Aspergillus FGSC
  misc_feature (47)..(1681): NCBI GI: 115388621 Blast Desc: [Aspergillus terreus NIH2624] gi|114195900|gb|EAU37600.1| [Aspergillus terreus NIH2624]
  misc_feature (53)..(1669): NCBI GI: 145254719 Blast Desc: An18g02610 [Aspergillus niger] gi|134084304|emb|CAK48644.1| protein product [Aspergillus niger]
  misc_feature (173)..(1589): NCBI GI: 116193063 Blast Desc: CHGG_06249 [Chaetomium globosum CBS 148.51] gi|88182162|gb|EAQ89630.1| CHGG_06249 [Chaetomium globosum CBS 148.51]
  misc_feature (909)..(1677): NCBI GI: 238504442 Blast Desc: ankyrin repeat-containing protein, [Aspergillus flavus NRRL3357] gi|220690923|gb|EED47272.1| ankyrin repeat-containing protein, [Aspergillus flavus NRRL3357]
  misc_feature (905)..(1639): NCBI GI: 189502738 Blast Desc: Aasi_1435 [Candidatus Amoebophilus asiaticus 5a2] gi|189498179|gb|ACE06726.1| Aasi_1435 [Candidatus Amoebophilus asiaticus 5a2]
  misc_feature (905)..(1631): NCBI GI: 189502738 Blast Desc: Aasi_1435 [Candidatus Amoebophilus asiaticus 5a2] gi|189498179|gb|ACE06726.1| Aasi_1435 [Candidatus Amoebophilus asiaticus 5a2]
  misc_feature (922)..(1640): NCBI GI: 123507472 Blast Desc: ankyrin repeat protein [Trichomonas vaginalis G3] gi|121912377|gb|EAY17199.1| ankyrin repeat protein, [Trichomonas vaginalis G3]
  misc_feature (323)..(1673): NCBI GI: 171677504 Blast Desc: protein product [Podospora anserina] gi|170936820|emb|CAP61478.1| protein product [Podospora anserina]
  misc_feature (894)..(1570): NCBI GI: 123471666 Blast Desc: inversin protein alternative isoform [Trichomonas vaginalis G3] gi|121901805|gb|EAY06808.1| inversin protein alternative isoform, [Trichomonas vaginalis G3]
MPPYDIELGLEQDGDGRGDGSPVVGDSRDGLVFESLIEADKDFVQGKLPNIDIVHVIGTGINSKGLSEYLGIFSVIESEKRIFTFNVDIYSLMIDDMPMTAITTQARKLLNGLHYFRNSAPTDNPSGRALAFIAYDLGALVLKKAIAVAGISPNTWPGVFSHAARFIFRDCFQRAKSAELLQSKMSEFLFTRAGALWKARLSPTIIASLARAAIETTELFLASKVTLCSRIVSFYTKHDAKTEIHEVFDYFTSTLGVAGELIVEAQDEHLGRDLSDKVCFAVNKWVPHKSWEPFERTLMTLALPHRHSILDTRDCTHPIFKMPKYQEWSKSRAMGVLLIESDDPVSRRKAAEQVFLSWQTRQFTRGEYGIRNFSFTFSKLDPLRDSIDDMLTSLLLQAAPRYGSSGSETDEYRLLKDQFETQRAWTEQDLLLMFKQQYYRFLGTDTLILLQDVEHCKQDGLVAFWNFFKEQESPSEFPLKIVMTKSHGVSKAAVLDMGMGVLVEHLTVLESDTDLSKEEKTVQQYVESLIKQLCPNEAGASQIRDSLGDIGNPVACTADFVSFAQRRTGWPEKRTINNLRSICSALDNACHSTTPSSALNQVLCLDPDQDGLRWALCWLLHAIRPLSRYELARIYFYRKGLDENCPSPTDIVEAQVSVEKHLRGIVEYSHNQVTIRDDVSGLLELRDGYLWTEVKTSATQLTQSFVVQYLSSSTVVARLRKLYGDYKLQCQDAKDSLVPPLNADGEDPLFYAVECLPTYCVHGKDYKCAVSALCELSQDAADLWAKVFWAMANPFSRPREPPKSAIEALYFIDPTIWNSDDTTEHLTRQHAVDPQETGSEQSDRDELWSARAFCKAVSLGREEVAIDYASRLLTICKNQKRECIFAEPVFQRALWRAIWLHMGRLLTVLLDGGSDCDASGMNNWSSPLHMASGLGYTDIVRDLLEHGANWEHRSGSSILNAAASSGHVSTVKLLASRCPSLLNDTELPLISACSFGRQRVVEALLKLSANPRDKLVPELDSMMPGLLAASAQGHLGTIKTLVDQIQDLNNRGPGEGAGPSLVAAAVAGSSDAVRLLLTRGLNPNDEHIDPPIIVETLRSDIPLDDKLEILNILAANDPPAKVNLAVTATGRTPLMEAIAKGDLSIVKWLLDNGSDVHIADNDGWTAIFYAVVHNHVEIVQALLPYQPRLDIKVSGGHTLTEMAIDKETIFPLLLDANPGLDINMINDRGLSALQCAVHKRLGGVARVLLTKKAYIHHRDNQGWNAILDAVGDSEDPEMARILGDGGANLQDSLSNGKCVLHLATRSGVEMLRVLLEFHQRIDLEQKDSSGLTALHQSLLLGASEEVIQLLLRAGADVTAKNEAGLTMLMCAVFGRGSPVNLKRILIEEATDPNEYSEVYGAPLIIACSYLQADFVDALLDKADANIRWIHGIRSTPLIATLLNYTTSDGLYRNEEVDKIVRMLIDHGALACIDTEVMLTHGRAIASPLLAACIGASPEIIQYMMSAGSSEQKPGPLGHLAIHFAAANGLPSFKVASLLHQGNLLEPDTASKTALHWAAQHSRVDTVRYILDVIAPTDNDKRLKYVNMRDIDGWTPLAWATRPNTREQWVNDLVERPNIAETIEYLLGEGADPLAQFTIGQGAHVETFTALTMAQLCDLPRESIAAIKKAKAHHEAEEFKSIMKDAGFDADNEENEGEKEGGVDEQPDSGNASRVQREEHKDEDESGSDFSWEDSD

SEQ ID NO: 13925 - DNA, 4377 bp, Muscodor strobelii
  misc_feature: SGI cDNA ID NO. 564579
  misc_feature: Encodes the peptide sequence at SEQ ID NO 13926
atgaattacgaggaagaggatctatgggtgagagcaaaggatgctggagactcgtcggacgaggacgacacccaactatcgctgaacgcagcacaattcgggtttgcactgacgccccaactacaatcaggaggagagatacagcgaagtaaggtttctgtcattcagggcggacgagaaaggagatcagcattcacagcctgctgtactgctatggccatgatccacgggtatctcaaaggtggtgggggcaggagggcgacattccttgcatacgaatttacctttcaatcatactacggtgctcggatcaagtcggccgatgtcacgtttgagttccatccgtgctccggccaaactggcgatccatgggacgcagcggtgagtgccgtgaggccgaacggggtgtacagattggagaagacaactcaaaccgaaagctcaaaatcgtcaattcaactacaggtcggtccatctgtacctgcagtcaacgccggcataacggcaataagagaaaattcgatcgagaagaccacgacacattacaccatgatctcgggcgacaatacacctgaagacgaatggggcaaccagtacaagtccagattctacctatcggaaaatgcgtcgcaaaagacaggcataccttccaaactcgtggcttgcattctcctcgaacgaggtgatgaccaagactttgaatgtcatccgtacattgtagtgcaaccagatcgcaaaactagagctacaactctattctcgcgacgccaacccgacgatgtaattctcttccgtgttgcgacagagccttataaccgttatcctccgtcgatcacgcttgacaataataaccttggcgaaatcgagatggataagctgtggagctacgcgataagtaaagagatgagaaacaacaacgataatagcgatgagcagcctcctactcatgcagccatagcacagagtcaagtagctagtcacgaaattaatacggtattgttgcacaacaacgaaaacaacaacaacgaccacgaccatacagatgagtcggaggactctgatggaaacggctatggcagcgatgctagtgatcctgagaacagcaatgagagtgctgatgcaacctggaagagcttgacagctaaacaaagatgggaacatgttttggcgcaacttgtccaaaattcttcatgggatgaaatagaggaattcaagaaagaagctctgaagaagcctggagacgatcctaacacggccgatttgcttcattggttagcacaagacttgagaaatggcaggttccttgaaatacccgagcagacgcggctcaaggttctcactttcttgcttgactatcatagccaaagatcacacgtagccgatatgtcggcgcgggaagatgcgatcgtatgggaggcgatccgcttcaacaatgtagcatttcttaacttcattgttcagcaatgcccagaccgcctacgaagtcttctcgccgctccctgtcatgggaaggtgaatgtcctccaccatgcatttgcaagcctcgtcacgtcgactttaaattctgcttctaagtcaagaaggaatagaaggacatccgattcctcgccagagcagcggtggagtaaagaggtatggatggacctcctaccagtttttgtcgagcaagccttagctagtacggtggttgcacgagatccaacaaacggcaatacctctcttcaccttgcagttgcctgtgacttgctataccttcttcttaaaaaggcaaaagacccgcagaagactgtgacagattactggcaacacgtcgtgaagccgatgatagagaaaacggacaaggaatttgaggataaggagtttaaggatcggcatatgtctcaattcaacaaaaacgaccaatctccctacggttattcattggcaaccttggagctttggcggcgcaaaatcgaagagccgaccaaaagccggaacggatcgacgcccatcaacgccacggagtctccaaactccaatgacctcaagaatggcaagcgtcctccgatggatcagcttccaaaaaaaagcgatatcatcgaaactaatttggcaacggatattcctctcaacagtaaagaaagacacttggtggcaaggttggggcacgccgatagagttttcgagggcagccgcagacctcgaccgagctccccgcaaagtacagcgaaacaaaaatctgcggaaagtacttcggagaacaaggagacaaagagacaaacggcgaaccacccacaacccaccgctggaacaaccaagaagccaagcatcgaagaaacggcagtcaaaagggcagcggcaaagaagaagtttgaaacagccgttaccgtcatgcatggttttctcaagacccattatattcgcacgcgagcggacatggaagcaaaagaactgctttatggccgtttatcgttgaatctggatcagaatatgttttttgatgccaatcatctacgggggaagagtattgaggaagtcattggtcttgtggagaagttatcgcgagctggaggcttccatgataccctttcctacgtgcatctaccgtgtctagaacactaccccgaaagcccaaagagtccggtagtatctaaatcgtacgcatccaatgagagcagatctcgtgcaacttactctaccaaaggtcagctacttcatcaagagggtggtagaagatcagtgattcgtgttctagacgtcttgatggagaagggcgctcgtaccattttgcggttagaagtagacgatctgacttcaccagcgcactcggatgcggcgatcgagagggcagtgtgcggacgagactcacaatcactagaggatccaagacggcagcagtctctgagtctacatgtcgagcaatgggactggaaaaagttcgatatcgacatcgatgtcatatgttttgctgcacctaatgtgacccacatccatttgtactggagtggaaacgcaacgatattatcagcatggtcgacgcagaaaggaatcccgcggttattcgaagagtcagggaagaaccttaaacaaattaccctacacgtctttcctggcttagagagaccagaaaggtcaaagaagatcatcgagcgcttcaaagatgaaattcaaaacctcaccgagaacaaggtaaagctgaaagtcaaacatatgagaaacacagacatcactagctccagggccgacgatgatctcgcaaattcaccaggaggagcgaacctcgctccctcatacaaatggatagaaacaatggaccagttcaaaagaatgatggttcgtctacacaataaggttctaaaggtcaaggacttaaaaccgcgaacaatcaaggttgctctgatcgacgacggcatggatatcggaactttggatctagatagcgtgaaggccatgggcctgagctattgccgacctccacagcctggtgccgagctagcatggcatcagtcgagtaatggccacggaaccatcatggcaaacatgatcacccgtattaatccctgggtatcactggacgtaatgaggatccaggacgaaatggtgtcagagcgtggtgtcaaagggggtactcgaagaatatcggcccggagcgctgccagggccatacatggggcgtgtcatcgaggagccgacatcataagcatatcctggtccatacgacggcgtcctaacaccgagctgtccaacaccgaagcgccatcatcagaccttgacgatgatgccgcaagcttcgaggagcttggaaaagcaattcaaaaagccaagggcgagagaatacttgtcttctgttctgcagccgacgacatccgactcaacgtcaacgactcgctaccttacggtcatgatccggcgtatatctttcgtatcggcgctgctcaagcagacggccaacgcgatcctgtctccgaggacccgggttccatcgagtacttccttccgggtaaccaggtagcagagtcttggaacccgcagtcggcgcgcaaggttaaattccactcggggtcatccgtatcgactgcactcgcggcaggcctcgcgtccctgatcatgtactgcaacaagattgttcaggaataccatgacataaatgacaagcaaaatacgaaggatgagactaggaaattcaggacttgggcggttaagctcaggcatcgcgacaatatgcgtcaggccttgaagaatgtcgacaaacaagggacttttgaggaccctaaaatactccctgtttggacgacatttggccaaacggcgaacgcgatgaatgaagtgagagatgacaagctcctagaggagctgaagaagttggtggagattctatgtaatggtctagggtattaa

SEQ ID NO: 13926 - protein, 1458 aa, Muscodor strobelii
  misc_feature: SGI Peptide ID NO. 564579
  misc_feature (45)..(1453): NCBI GI: 67523477 Blast Desc: AN2194.2 [Aspergillus nidulans FGSC A4] gi|40744695|gb|EAA63851.1| AN2194.2 [Aspergillus nidulans FGSC A4] gi|259487578|tpe|CBF86357.1| TPA: conserved [Aspergillus FGSC
  misc_feature (547)..(1433): NCBI GI: 115388617 Blast Desc: conserved [Aspergillus terreus NIH2624] gi|114195898|gb|EAU37598.1| conserved [Aspergillus terreus NIH2624]
  misc_feature (770)..(1298): NCBI GI: 116193067 Blast Desc: CHGG_06251 [Chaetomium globosum CBS 148.51] gi|88182164|gb|EAQ89632.1| CHGG_06251 [Chaetomium globosum CBS 148.51]
  misc_feature (977)..(1453): NCBI GI: 145248852 Blast Desc: An14g01380 [Aspergillus niger] gi|134081436|emb|CAK41918.1| protein product [Aspergillus niger]
  misc_feature (1041)..(1456): NCBI GI: 145254723 Blast Desc: An18g02630 [Aspergillus niger] gi|134084306|emb|CAK48646.1| protein product [Aspergillus niger]
  misc_feature (33)..(294): NCBI GI: 115388619 Blast Desc: conserved [Aspergillus terreus NIH2624] gi|114195899|gb|EAU37599.1| conserved [Aspergillus terreus NIH2624]
  misc_feature (21)..(304): NCBI GI: 145254721 Blast Desc: An18g02620 [Aspergillus niger] gi|134084305|emb|CAK48645.1| [Aspergillus niger]
  misc_feature (1160)..(1438): NCBI GI: 145615113 Blast Desc: MGG_13036 [Magnaporthe grisea 70-15] gi|145022022|gb|EDK06042.1| MGG_13036 [Magnaporthe grisea 70-15]
  misc_feature (902)..(1458): NCBI GI: 256724585 Blast Desc: NECHADRAFT_54608 [Nectria haematococca mpVI 77-13-4]
  misc_feature (794)..(1441): NCBI GI: 116180760 Blast Desc: CHGG_01008 [Chaetomium globosum CBS 148.51] gi|88185305|gb|EAQ92773.1| CHGG_01008 [Chaetomium globosum CBS 148.51]
MNYEEEDLWVRAKDAGDSSDEDDTQLSLNAAQFGFALTPQLQSGGEIQRSKVSVIQGGRERRSAFTACCTAMAMIHGYLKGGGGRRATFLAYEFTFQSYYGARIKSADVTFEFHPCSGQTGDPWDAAVSAVRPNGVYRLEKTTQTESSKSSIQLQVGPSVPAVNAGITAIRENSIEKTTTHYTMISGDNTPEDEWGNQYKSRFYLSENASQKTGIPSKLVACILLERGDDQDFECHPYIVVQPDRKTRATTLFSRRQPDDVILFRVATEPYNRYPPSITLDNNNLGEIEMDKLWSYAISKEMRNNNDNSDEQPPTHAAIAQSQVASHEINTVLLHNNENNNNDHDHTDESEDSDGNGYGSDASDPENSNESADATWKSLTAKQRWEHVLAQLVQNSSWDEIEEFKKEALKKPGDDPNTADLLHWLAQDLRNGRFLEIPEQTRLKVLTFLLDYHSQRSHVADMSAREDAIVWEAIRFNNVAFLNFIVQQCPDRLRSLLAAPCHGKVNVLHHAFASLVTSTLNSASKSRRNRRTSDSSPEQRWSKEVWMDLLPVFVEQALASTVVARDPTNGNTSLHLAVACDLLYLLLKKAKDPQKTVTDYWQHVVKPMIEKTDKEFEDKEFKDRHMSQFNKNDQSPYGYSLATLELWRRKIEEPTKSRNGSTPINATESPNSNDLKNGKRPPMDQLPKKSDIIETNLATDIPLNSKERHLVARLGHADRVFEGSRRPRPSSPQSTAKQKSAESTSENKETKRQTANHPQPTAGTTKKPSIEETAVKRAAAKKKFETAVTVMHGFLKTHYIRTRADMEAKELLYGRLSLNLDQNMFFDANHLRGKSIEEVIGLVEKLSRAGGFHDTLSYVHLPCLEHYPESPKSPVVSKSYASNESRSRATYSTKGQLLHQEGGRRSVIRVLDVLMEKGARTILRLEVDDLTSPAHSDAAIERAVCGRDSQSLEDPRRQQSLSLHVEQWDWKKFDIDIDVICFAAPNVTHIHLYWSGNATILSAWSTQKGIPRLFEESGKNLKQITLHVFPGLERPERSKKIIERFKDEIQNLTENKVKLKVKHMRNTDITSSRADDDLANSPGGANLAPSYKWIETMDQFKRMMVRLHNKVLKVKDLKPRTIKVALIDDGMDIGTLDLDSVKAMGLSYCRPPQPGAELAWHQSSNGHGTIMANMITRINPWVSLDVMRIQDEMVSERGVKGGTRRISARSAARAIHGACHRGADIISISWSIRRRPNTELSNTEAPSSDLDDDAASFEELGKAIQKAKGERILVFCSAADDIRLNVNDSLPYGHDPAYIFRIGAAQADGQRDPVSEDPGSIEYFLPGNQVAESWNPQSARKVKFHSGSSVSTALAAGLASLIMYCNKIVQEYHDINDKQNTKDETRKFRTWAVKLRHRDNMRQALKNVDKQGTFEDPKILPVWTTFGQTANAMNEVRDDKLLEELKKLVEILCNGLGY

SEQ ID NO: 13927 - DNA, 5179 bp, Muscodor strobelii
  misc_feature: SGI EST ID NO. CUFF.33321.2
  misc_feature: Variant of the nucleotide sequence at SEQ ID NO 13925
ggcgcattgcccctgtcaccggttctggaagcgcaaagagggcttttacgaaggtggcactatggtgcgacatcgcgttctcatacagtgcctatttggacaagtacgtgtttgcgtattgcataaagctgttgtcatagcagcttcgaagactcggaggcacacatcgatcgagctgtaaacaacgagcatgttaattgcctcaaaccaaaatgaattacgaggaagaggatctatgggtgagagcaaaggatgctggagactcgtcggacgaggacgacacccaactatcgctgaacgcagcacaattcgggtttgcactgacgccccaactacaatcaggagaatatcacatgcgtaataagccaggagagatacagcgaagtaaggtttctgtcattcagggcggacgagaaaggagatcagcattcacagcctgctgtactgctatggccatgatccacgggtatctcaaaggtggtgggggcaggagggcgacattccttgcatacgaatttacctttcaatcatactacggtgctcggatcaagtcggccgatgtcacgtttgagttccatccgtgctccggccaaactggcgatccatgggacgcagcggtgagtgccgtgaggccgaacggggtgtacagattggagaagacaactcaaaccgaaagctcaaaatcgtcaattcaactacaggtcggtccatctgtacctgcagtcaacgccggcataacggcaataagagaaaattcgatcgagaagaccacgacacattacaccatgatctcgggcgacaatacacctgaagacgaatggggcaaccagtacaagtccagattctacctatcggaaaatgcgtcgcaaaagacaggcataccttccaaactcgtggcttgcattctcctcgaacgaggtgatgaccaagactttgaatgtcatccgtacattgtagtgcaaccagatcgcaaaactagagctacaactctattctcgcgacgccaacccgacgatgtaattctcttccgtgttgcgacagagccttataaccgttatcctccgtcgatcacgcttgacaataataaccttggcgaaatcgagatggataagctgtggagctacgcgatgtaagacgaatatagtgctagtaggacctgaatgggtagcagtcattgcttgtgccgcatatagtctaagaatgctaggtaggtttctgacataggcatattaggagcaacagagtagacagaaggggaaatcgcactgttagccaagcgtggcgtgctttgttcaaccagaggctaccagctgaaatgcagtgcgacgccccaacggctattgataagtcgaccggtgtgaggggctcatttgtcatgcttagtcgtgtttgcatgatccgacaaactgctcaagtgcctgggtctgaaattaatggacctttggtgcaatattcgtatcaagaggtgaatgcggctttcttgctgagtcttatcagcgccgactattccagtcgccccatcttgtagactcatgcaaccttcttctactacattttgtattcgctattgttgatagaagtaaagagatgagaaacaacaacgataatagcgatgagcagcctcctactcatgcagccatagcacagagtcaagtagctagtcacgaaattaatacggtattgttgcacaacaacgaaaacaacaacaacgaccacgaccatacagatgagtcggaggactctgatggaaacggctatggcagcgatgctagtgatcctgagaacagcaatgagagtgctgatgcaacctggaagagcttgacagctaaacaaagatgggaacatgttttggcgcaacttgtccaaaattcttcatgggatgaaatagaggaattcaagaaagaagctctgaagaagcctggagacgatcctaacacggccgatttgcttcattggttagcacaagacttgagaaatggcaggttccttgaaatacccgagcagacgcggctcaaggttctcactttcttgcttgactatcatagccaaagatcacacgtagccgatatgtcggcgcgggaagatgcgatcgtatgggaggcgatccgcttcaacaatgtagcatttcttaacttcattgttcagcaatgcccagaccgcctacgaagtcttctcgccgctccctgtcatgggaaggtgaatgtcctccaccatgcatttgcaagcctcgtcacgtcgactttaaattctgcttctaagtcaagaaggaatagaaggacatccgattcctcgccagagcagcggtggagtaaagaggtatggatggacctcctaccagtttttgtcgagcaagccttagctagtacggtggttgcacgagatccaacaaacggcaatacctctcttcaccttgcagttgcctgtgacttgctataccttcttcttaaaaaggcaaaagacccgcagaagactgtgacagattactggcaacacgtcgtgaagccgatgatagagaaaacggacaaggaatttgaggataaggagtttaaggatcggcatatgtctcaattcaacaaaaacgaccaatctccctacggttattcattggcaaccttggagctttggcggcgcaaaatcgaagagccgaccaaaagccggaacggatcgacgcccatcaacgccacggagtctccaaactccaatgacctcaagaatggcaagcgtcctccgatggatcagcttccaaaaaaaagcgatatcatcgaaactaatttggcaacggatattcctctcaacagtaaagaaagacacttggtggcaaggttggggcacgccgatagagttttcgagggcagccgcagacctcgaccgagctccccgcaaagtacagcgaaacaaaaatctgcggaaagtacttcggagaacaaggagacaaagagacaaacggcgaaccacccacaacccaccgctggaacaaccaagaagccaagcatcgaagaaacggcagtcaaaagggcagcggcaaagaagaagtttgaaacagccgttaccgtcatgcatggttttctcaagacccattatattcgcacgcgagcggacatggaagcaaaagaactgctttatggccgtttatcgttgaatctggatcagaatatgttttttgatgccaatcatctacgggggaagagtattgaggaagtcattggtcttgtggagaagttatcgcgagctggaggcttccatgataccctttcctacgtgcatctaccgtgtctagaacactaccccgaaagcccaaagagtccggtagtatctaaatcgtacgcatccaatgagagcagatctcgtgcaacttactctaccaaaggtcagctacttcatcaagagggtggtagaagatcagtgattcgtgttctagacgtcttgatggagaagggcgctcgtaccattttgcggttagaagtagacgatctgacttcaccagcgcactcggatgcggcgatcgagagggcagtgtgcggacgagactcacaatcactagaggatccaagacggcagcagtctctgagtctacatgtcgagcaatggtatctccccagatacctcgggctatagcaatgcccatgctaattcaaatatccagggactggaaaaagttcgatatcgacatcgatgtcatatgttttgctgcacctaatgtgacccacatccatttgtactggagtggaaacgcaacgatattatcagcatggtcgacgcagaaaggaatcccgcggttattcgaagagtcagggaagaaccttaaacaaattaccctacacgtctttcctggcttagagagaccagaaaggtcaaagaagatcatcgagcgcttcaaagatgaaattcaaaacctcaccgagaacaaggtaaagctgaaagtcaaacatatgagaaacacagacatcactagctccagggccgacgatgatctcgcaaattcaccaggaggagcgaacctcgctccctcatacaaatggatagaaacaatggaccagttcaaaagaatgatggttcgtctacacaataaggttctaaaggtcaaggacttaaaaccgcgaacaatcaaggttgctctgatcgacgacggcatggatatcggaactttggatctagatagcgtgaaggccatgggcctgagctattgccgacctccacagcctggtgccgagctagcatggcatcagtcgagtaatggccacggaaccatcatggcaaacatgatcacccgtattaatccctgggtatcactggacgtaatgaggatccaggacgaaatggtgtcagagcgtggtgtcaaagggggtactcgaagaatatcggcccggagcgctgccagggccatacatggggcgtgtcatcgaggagccgacatcataagcatatcctggtccatacgacggcgtcctaacaccgagctgtccaacaccgaagcgccatcatcagaccttgacgatgatgccgcaagcttcgaggagcttggaaaagcaattcaaaaagccaagggcgagagaatacttgtcttctgttctgcagccgacgacatccgactcaacgtcaacgactcgctaccttacggtcatgatccggcgtatatctttcgtatcggcgctgctcaagcagacggccaacgcgatcctgtctccgaggacccgggttccatcgagtacttccttccgggtaaccaggtagcagagtcttggaacccgcagtcggcgcgcaaggttaaattccactcggggtcatccgtatcgactgcactcgcggcaggcctcgcgtccctgatcatgtactgcaacaagattgttcaggaataccatgacataaatgacaagcaaaatacgaaggatgagactaggaaattcaggacttgggcggttaagctcaggcatcgcgacaatatgcgtcaggccttgaagaatgtcgacaaacaagggacttttgaggaccctaaaatactccctgtttggacgacatttggccaaacggcgaacgcgatgaatgaagtgagagatgacaagctcctagaggagctgaagaagttggtggagattctatgtaatggtctagggtattaagatcgtgaaaatgggtattttatacaacgtaaggcattatctacctagtacgtagaatctac

SEQ ID NO: 13928 - DNA, 636 bp, Muscodor strobelii
  misc_feature: SGI cDNA ID NO. 564580
  misc_feature: Encodes the peptide sequence at SEQ ID NO 13929
atggccctcgtccgggcctcaggccaggattggtctgataactacggaggcaatcgagccaatcccgaaaaccagtcagcagacatcactcaggacgaaaacacgtccatctatctcgaccgcctcccttctaccctgacctaccctcagctactccatgggctcaaagacactggctatatcaaacaatgtcacatcggcacacctaatatcaataaccctcatacatgcaacgccaaggttgtatattttagccatgccgacgctcagaaggttatcgaccgcaaccagaaagatcagctcatcatcgctggcgttcgtccgagaacaggatggaataggatccgtgttgccgagtctcccgccgcgggccgaagccgcgcgttaagaatcagaggaccaactcatctggtcaacacgggcgccctcgagcagttctggaggaacgcgaagatctactgggatactaagtgtgtccaggaaattggagaagttccaggtggcgagtcggtggtctggtacaccttcggttcttggcgctgccaaagcgcagctgctaaaaaggctcttgaagtgaagcatggtggcctggtgaaagtgtggtatcgtaaggacccctgtgctcccaaggagtaa

SEQ ID NO: 13929 - protein, 211 aa, Muscodor strobelii
  misc_feature: SGI Peptide ID NO. 564580
  misc_feature (11)..(209): NCBI GI: 39977813 Blast Desc: MGG_06791 [Magnaporthe grisea 70-15] gi|145013671|gb|EDJ98312.1| MGG_06791 [Magnaporthe grisea 70-15]
  misc_feature (3)..(207): NCBI GI: 256723100 Blast Desc: NECHADRAFT_81265 [Nectria haematococca mpVI 77-13-4]
  misc_feature (12)..(207): NCBI GI: 116195516 Blast Desc: CHGG_04356 [Chaetomium globosum CBS 148.51] gi|88180269|gb|EAQ87737.1| CHGG_04356 [Chaetomium globosum CBS 148.51]
  misc_feature (11)..(176): NCBI GI: 85085374 Blast Desc: NCU04417 [Neurospora crassa OR74A] gi|28918586|gb|EAA28258.1| [Neurospora crassa OR74A]
  misc_feature (11)..(176): NCBI GI: 40882203 Blast Desc: conserved [Neurospora crassa]
  misc_feature (11)..(208): NCBI GI: 171683223 Blast Desc: protein product [Podospora anserina] gi|170941571|emb|CAP67223.1| protein product [Podospora anserina]
  misc_feature (11)..(153): NCBI GI: 171690952 Blast Desc: protein product [Podospora anserina] gi|170945424|emb|CAP71536.1| protein product [Podospora anserina]
  misc_feature (4)..(201): NCBI GI: 85104224 Blast Desc: NCU01087 [Neurospora crassa OR74A] gi|18376188|emb|CAD21304.1| [Neurospora crassa] gi|28923247|gb|EAA32463.1| [Neurospora crassa OR74A]
  misc_feature (8)..(208): NCBI GI: 156034747 Blast Desc: SS1G_13309 [Sclerotinia sclerotiorum 1980] gi|154698712|gb|EDN98450.1| SS1G_13309 [Sclerotinia sclerotiorum 1980]
  misc_feature (14)..(207): NCBI GI: 154311228 Blast Desc: [Botryotinia fuckeliana B05.10] gi|150851136|gb|EDN26329.1| [Botryotinia fuckeliana B05.10]
MALVRASGQDWSDNYGGNRANPENQSADITQDENTSIYLDRLPSTLTYPQLLHGLKDTGYIKQCHIGTPNINNPHTCNAKVVYFSHADAQKVIDRNQKDQLIIAGVRPRTGWNRIRVAESPAAGRSRALRIRGPTHLVNTGALEQFWRNAKIYWDTKCVQEIGEVPGGESVVWYTFGSWRCQSAAAKKALEVKHGGLVKVWYRKDPCAPKE

SEQ ID NO: 13930 - DNA, 678 bp, Muscodor strobelii
  misc_feature: SGI cDNA ID NO. 564581
  misc_feature: Encodes the peptide sequence at SEQ ID NO 13931
atgaggtcattcatcactactgccttttctctggctactggagttcttggcgctaccgcagcagcagctactggtagcatatgcccattcaactatcccgcggaagtgaacacgaccgagagcgggaatgggttgattttcactatcgcatcgaacaatccggttaccaacaaccgggcgcttcagctacgtacgaacccaaacagtgaaggcctctactacgtcggcatagacgccaactcacctgtcttactatctaacttcgccgacggtgcaatcaagagccaggcccgtaatctggttaaccaggtggaggatacgggcccaacaggctatctgaacgagcgaacagtcatcaacggcacgaccgagtatatcttcgggtttgcgaatgctaccatctggcctggtgaagtcgacactaaatggctactctctggcggctcactgacgggtacttacggtctttatcacgacgaaggccttggtgttgtcaacggcttcgttctgtgcgaggccgacttcgatactgagcctggcccttggtatgcgcttttctactacgtttacgaatccgaaccggctgatctgcctggatgcgaatttgttggtgtaaggactacagttgccccttacatcctcaacggagagtgtgagattgccggatacactgcctag

SEQ ID NO: 13931 - protein, 225 aa, Muscodor strobelii
  misc_feature: SGI Peptide ID NO. 564581
MRSFITTAFSLATGVLGATAAAATGSICPFNYPAEVNTTESGNGLIFTIASNNPVTNNRALQLRTNPNSEGLYYVGIDANSPVLLSNFADGAIKSQARNLVNQVEDTGPTGYLNERTVINGTTEYIFGFANATIWPGEVDTKWLLSGGSLTGTYGLYHDEGLGVVNGFVLCEADFDTEPGPWYALFYYVYESEPADLPGCEFVGVRTTVAPYILNGECEIAGYTA

SEQ ID NO: 13932 - DNA, 1247 bp, Muscodor strobelii
  misc_feature: SGI EST ID NO. CUFF.33299.0
  misc_feature: Variant of the nucleotide sequence at SEQ ID NO 13930
agacaagcaaacagcggcagagtctcaatcctgtctttcagcctcctctttgactcaaaatggctttacttagtgatttgatgaaaaggttcgctaaacctgcttttccacttacgtattatgtgctgagaaaagctatgtatcggctcttgagacccgaattggggtatcgaatagcctatccaactcattagcgttgcatccaagtgtcgatcacagcaccattcggactaggatgatgaacacgaactttttcttcgattgtcacattcacctgatattactggagaaagtatgacgacgaagtaattgtgacgggttcgacaccatattcaatgtcaatataaaacacacgatccatcaccgcattaaaacctctgaagtcaagctcaatagcaagagccaatttacaagagacacggtcaacatctcgatttcagagtcattgaaaatgaggtcattcatcactactgccttttctctggctactggagttcttggcgctaccgcagcagcagctactggtagcatatgcccattcaactatcccgcggaagtgaacacgaccgagagcgggaatgggttgattttcactatcgcatcgaacaatccggttaccaacaaccgggcgcttcagctacgtacgaacccaaacagtgaaggcctctactacgtcggcatagacgccaactcacctgtcttactatctaacttcgccgacggtgcaatcaagagccaggcccgtaatctggttaaccaggtggaggatacgggcccaacaggctatctgaacgagcgaacagtcatcaacggcacgaccgagtatatcttcgggtttgcgaatgctaccatctggcctggtgaagtcgacactaaatggctactctctggcggctcactgacgggtacttacggtctttatcacgacgaaggccttggtgttgtcaacggcttcgttctgtgcgaggccgacttcgatactgagcctggcccttggtatgcgcttttctactacgtttacgaatccgaaccggctgatctgcctggatgcgaatttgttggtgtaaggactacagttgccccttacatcctcaacggagagtgtgagattgccggatacactgcctagggcggtaggagaatcgtagctggacgggattgtagcgcatgatatgagagaaacactaggcttcgctcaacacaagctttaaactaatgataatgacaacataatgatatactggcta

SEQ ID NO: 13933 - DNA, 540 bp, Muscodor strobelii
  misc_feature: SGI cDNA ID NO. 564582
  misc_feature: Encodes the peptide sequence at SEQ ID NO 13934
atgtctcatctaatcatcaaaatgccgcaaggttatgaaggtcgagaagacgagtggctgaagacttggacagagtccgtcgaaccgatccagaatatcatttcagttgtcgaacactgggataaccagttcactccgcgtatcgatcccgcaatctgttttatcgttttctctgcgctaagcatgttagagcttcaccgccgtagcgtcactaatatagcagatcccgttctggcggatctcacacgaggacagaatttattactacttttcctagagcagtttgcgaccatgtgggcgacgccaagatttcttctccaacaattcacaaaagctcaaaacagacggctggatgcggcaccgctctcttatgtggagatcgaccgtcttatcagcaagttgaagacaccattgcatcccaaagctgcccaggcatttgcagccatggccgttagtgggacaatattaaatggaagcattgatctgagtatggatcttgaagatctatggtcttacgatctcatgaatcacccattataa

SEQ ID NO: 13934 - protein, 179 aa, Muscodor strobelii
  misc_feature: SGI Peptide ID NO. 564582
  misc_feature (11)..(159): NCBI GI: 115384158 Blast Desc: conserved [Aspergillus terreus NIH2624] gi|114196318|gb|EAU38018.1| conserved [Aspergillus terreus NIH2624]
  misc_feature (23)..(172): NCBI GI: 115433540 Blast Desc: [Aspergillus terreus NIH2624] gi|114189759|gb|EAU31459.1| [Aspergillus terreus NIH2624]
  misc_feature (16)..(140): NCBI GI: 159123412 Blast Desc: fungal specific transcription factor, [Aspergillus fumigatus A1163]
  misc_feature (16)..(147): NCBI GI: 169623805 Blast Desc: SNOG_15146 [Phaeosphaeria nodorum SN15] gi|111056251|gb|EAT77371.1| SNOG_15146 [Phaeosphaeria nodorum SN15]
  misc_feature (13)..(106): NCBI GI: 242819843 Blast Desc: fungal specific transcription factor, [Talaromyces stipitatus ATCC 10500] gi|218713861|gb|EED13285.1| fungal specific transcription factor, [Talaromyces stipitatus ATCC
  misc_feature (10)..(108): NCBI GI: 212544968 Blast Desc: fungal specific transcription factor, [Penicillium marneffei ATCC 18224] gi|210065607|gb|EEA19701.1| fungal specific transcription factor, [Penicillium marneffei ATCC 18224]
  misc_feature (1)..(105): NCBI GI: 145234595 Blast Desc: An03g00390 [Aspergillus niger] gi|134057617|emb|CAK38017.1| protein product [Aspergillus niger]
MSHLIIKMPQGYEGREDEWLKTWTESVEPIQNIISVVEHWDNQFTPRIDPAICFIVFSALSMLELHRRSVTNIADPVLADLTRGQNLLLLFLEQFATMWATPRFLLQQFTKAQNRRLDAAPLSYVEIDRLISKLKTPLHPKAAQAFAAMAVSGTILNGSIDLSMDLEDLWSYDLMNHPL

SEQ ID NO: 13935 - DNA, 889 bp, Muscodor strobelii
  misc_feature: SGI EST ID NO. CUFF.33314.0
  misc_feature: Variant of the nucleotide sequence at SEQ ID NO 13933
ttcgtcaagccgggtacatatttaggcttcgaacagaaggtaaactgttacctacgaaaactaatgcacttcagagtgctcttagcacattacgcctctcgctaccgccgcgatatttcaattcaacgagaaacgtactaggaggcgaatcttgcgcagaccaccatatgagactaactaacattcttcatctcaatatgtctcatctaatcatcaaaatgccgcaaggttatgaaggtcgagaagacgagtggctgaagacttggacagagtccgtcgaaccgatccagaatatcatttcagttgtcgaacactgggataaccagttcactccgcgtatcgatcccgcaatctgttttatcgttttctctgcgctaagcatgttagagcttcaccgccgtagcgtcactaatatagcagatcccgttctggcggatctcacacgaggacagaatttattactacttttcctagagcagtttgcgaccatgtgggcgacgccaagatttcttctccaacaattcacaaaagctcaaaacagacggctggatgcggcaccgctctcttatgtggagatcgaccgtcttatcagcaagttgaagacaccattgcatcccaaagctgcccaggcatttgcagccatggccgttagtgggacaatattaaatggaagcattgatctgagtatggatcttgaagatctatggtcttacgatctcatgaatcacccattataaatgttagcgaggctaacattaaaatacatttgaccgcttttgaagtttgtcgctctctggtgatgatcagaaacccagtattataaaataattgatgatatttgaacaagtacatacaataagttaagaaatctccctcatgacttacccat

SEQ ID NO: 13936 - DNA, 1308 bp, Muscodor strobelii
  misc_feature: SGI cDNA ID NO. 564583
  misc_feature: Encodes the peptide sequence at SEQ ID NO 13937
atgctgcgcccccaagttgcaacctggagtatccaacgaatgcgaaggataccggttgatcagaaatgcgctttgtccttagatttgactcctaaatcgcgccgggagggtggagaacaaaaaggcgtggttgggcagtatgtagcttcaacgtcgagttgtgcctctatcctaaatgacttagcctcccatccagaccttatggcttctattttattgcccgtactctcatacgcccccaaattcgttcgtgattctgtcactatgcgtatccccgagattacgaacaacccttcgaaagttcagctggctcgccttggccatgtctattttgaacatccggatctagatgttttcgccgagtttgctaagcagtggggcttcatagaagcgaaaagaactgcggatagaatttggtacagaggctacggtattgatccattcgtctacgttgcttccaagagcaaagatggcaaagcggcctttggtgggccagctttcgtagcgaggtcacaagaagactttgacaaggcggcatcattgcctggcgccacgccgtcgagcctcgatggaccaggcggcggattcatgatcacattcactcgctcagatgatactaaagccttttatctatctagtttcaaagatttccatgttgtctatggccagaccgaaaggaaagttgatgatgggccggcgccgtcggctacgcatgaggtgcaaggaccttataatgggccattcaagaaggcaagacaaggaacttttcagcgctatcgtgaaggcccggcgcttgtgcataaactaggtcatctcggactcatttaccgagacttcgacaacgaaatcatgtggtataccggaaacttcaacttcgtgccaagcaatgtcattcatcatgaagtgttctcaaacatcgacatccttactttccttcaccttgatttaggtcctgtttacagtgatcaccactgtctctttctcgcacgcgcccctccagaagcgaaaaggagctatatgcatcatacatcatatgaagtttcggacttcgatgagcagctgattggccacgaatggcttgctaagaaaggctacgagagtgtttggggtgtcggcagacatatcttgggaagtcaaatattcgattactggaaggatcccagtggtttcaaaatcgaacactatgccgacggagacgttgtcaaccaggataccccaatgacaagagaagaggctgggccattaagtgtgtgggggccagagcttccaaaagacttcatagacaacacgatgaagtccgacttgtaa

SEQ ID NO: 13937 - protein, 435 aa, Muscodor strobelii
  misc_feature: SGI Peptide ID NO. 564583
  misc_feature (268)..(394): Pfam Id: PF00903 Pfam Desc: Glyoxalase/Bleomycin resistance protein/Dioxygenase superfamily
  misc_feature (67)..(426): NCBI GI: 169623797 Blast Desc: SNOG_15142 [Phaeosphaeria nodorum SN15] gi|111056247|gb|EAT77367.1| SNOG_15142 [Phaeosphaeria nodorum SN15]
  misc_feature (68)..(432): NCBI GI: 159123413 Blast Desc: oxidoreductase, [Aspergillus fumigatus A1163]
  misc_feature (68)..(429): NCBI GI: 115384154 Blast Desc: [Aspergillus terreus NIH2624] gi|114196316|gb|EAU38016.1| [Aspergillus terreus NIH2624]
  misc_feature (91)..(429): NCBI GI: 145234587 Blast Desc: An03g00350 [Aspergillus niger] gi|134057613|emb|CAK38013.1| protein product [Aspergillus niger]
  misc_feature (70)..(426): NCBI GI: 242819853 Blast Desc: oxidoreductase, [Talaromyces stipitatus ATCC 10500] gi|218713863|gb|EED13287.1| oxidoreductase, [Talaromyces stipitatus ATCC 10500]
  misc_feature (68)..(381): NCBI GI: 70986649 Blast Desc: oxidoreductase [Aspergillus fumigatus Af293] gi|66846445|gb|EAL86777.1| oxidoreductase, [Aspergillus fumigatus Af293]
  misc_feature (90)..(424): NCBI GI: 240111175 Blast Desc: glyoxalase family protein [Coccidioides posadasii C735 delta SOWgp]
  misc_feature (90)..(424): NCBI GI: 119189617 Blast Desc: CIMG_04856 [Coccidioides immitis RS]
  misc_feature (90)..(424): NCBI GI: 259483619 Blast Desc: TPA: oxidoreductase, (AFU_orthologue; AFUA_7G06950) [Aspergillus nidulans FGSC A4]
  misc_feature (90)..(428): NCBI GI: 67541803 Blast Desc: AN7065.2 [Aspergillus nidulans FGSC A4] gi|40742004|gb|EAA61194.1| AN7065.2 [Aspergillus nidulans FGSC A4]
MLRPQVATWSIQRMRRIPVDQKCALSLDLTPKSRREGGEQKGVVGQYVASTSSCASILNDLASHPDLMASILLPVLSYAPKFVRDSVTMRIPEITNNPSKVQLARLGHVYFEHPDLDVFAEFAKQWGFIEAKRTADRIWYRGYGIDPFVYVASKSKDGKAAFGGPAFVARSQEDFDKAASLPGATPSSLDGPGGGFMITFTRSDDTKAFYLSSFKDFHVVYGQTERKVDDGPAPSATHEVQGPYNGPFKKARQGTFQRYREGPALVHKLGHLGLIYRDFDNEIMWYTGNFNFVPSNVIHHEVFSNIDILTFLHLDLGPVYSDHHCLFLARAPPEAKRSYMHHTSYEVSDFDEQLIGHEWLAKKGYESVWGVGRHILGSQIFDYWKDPSGFKIEHYADGDVVNQDTPMTREEAGPLSVWGPELPKDFIDNTMKSDL

SEQ ID NO: 13938 - DNA, 1077 bp, Muscodor strobelii
  misc_feature: SGI EST ID NO. CUFF.33318.1
  misc_feature: Variant of the nucleotide sequence at SEQ ID NO 13936
gccagaccgaaaggaaagttgatgatgggccggcgccgtcggctacgcatgaggtgcaaggaccttataatgggccattcaagaaggcaagacaaggaacttttcagcgctatcgtgaaggcccggcgcttgtgcataaactaggtcatctcggactcatttaccgagacttcgacaacgaaatcatgtggtataccggaaacttcaacttcgtgccaagcaatgtcattcatcatgaagtgttctcaaacatcgacatccttactttccttcaccttgatttaggtcctgtttacagtgatcaccactgtctctttctcgcacgcgcccctccagaagcgaaaaggagctatatgcatcatacatcatatgaagtttcggacttcgatgagcagctgattggccacgaatggcttgctaagaaaggctacgagagtgtttggggtgtcggcagacatatcttgggaagtcaaatattcgattactggaaggatcccagtggtttcaaaatcgaacactatgccgacggagacgttgtcaaccaggataccccaatgacaagagaagaggctgggccattaagtgtgtgggggccagagcttccaaaagacttcatagacaacacgatgaagtccgacttgtaatgacgacaatccagagcaaaactgatagctaacgtggggaaaatgaaacacgtcgtaatcgattgagcgtagagcttattagtgtttacctgtaacaacaacaaattgagacgaaagctaattccgctggacttaagggttaaggttgaggggttagggttcgatcggcaattacgcatagttttctagaacaatggccttttcttgaccacaatgttactatcgtcaattgaaacctctttaggtcatcgagactcctttgtccagggatgttctaggcgcagattcgaaagattggtcaaagtttcggcactccgaagtagcctgcctttatctagatcctgttctttattagaaggcattcgtatatatatattcaaactgacacaatcacgaagtcatgtacactaagatcaatacaagcatcgttgca

SEQ ID NO: 13939 - DNA, 849 bp, Muscodor strobelii
  misc_feature: SGI cDNA ID NO. 564584
  misc_feature: Encodes the peptide sequence at SEQ ID NO 13940
atggcagcattcacaaaactagttcgatttgagtctgatgatggaaagacatactttgcggatttagctaatgatgctgctgaattcctcaccactggggcaagactgacgtcctatgagtctttcgacgatttgctatcaaagaaaagcgaacagactgccacatttaagagactcctggctcctctgcctcgtaatgatataccaatctactgtgtcggcctcaattatcatgatcacgcgactgaagcaaacatggctgtaagccaaaatccgccattgtgggtgaaaccagctgcatcgctggcaaatcctgggcaggacatcatcatgaacaaatactgcgcatccagcctaccggactacgaagccgagttggtatttgtaacatcaagagaatgtaagaaccttacagaggcggaggcttctgatgccatccttggctataccattggcaatgatctttcttgccgcttatttcagcagcctaatcaggggggtgggcaatttttctacgcaaaggcattcgatgacttcgcgcccatcgggccagctttggtgagcaaggagaatttctccttatcaaaaagcgggatgaccttgcgagtgaatgatgaggaagaaatgcgtcagacagttaaaaacttcaagaatgatatggttttcagtcccgctaagattctcagtgtcatgagccaaggcaccaccattccggcttatacagctgtgatgacgggtacaccatccggtgttggagcttttagaaaaaagttccttaatcatggggacgtcgtgactattgagattgacggtattggtcagctgaagaacaagattgtctttgagtaa

SEQ ID NO: 13940 - protein, 282 aa, Muscodor strobelii
  misc_feature: SGI Peptide ID NO. 564584
  misc_feature (84)..(256): Pfam Id: PF01557 Pfam Desc: Fumarylacetoacetate (FAA) hydrolase family
  misc_feature (1)..(281): NCBI GI: 242819857 Blast Desc: fumarylacetoacetate hydrolase family protein [Talaromyces stipitatus ATCC 10500] gi|218713864|gb|EED13288.1| fumarylacetoacetate hydrolase family protein [Talaromyces ATCC
  misc_feature (1)..(282): NCBI GI: 119485514 Blast Desc: fumarylacetoacetate hydrolase [Neosartorya fischeri NRRL 181] gi|119410347|gb|EAW20294.1| fumarylacetoacetate hydrolase [Neosartorya fischeri NRRL 181]
  misc_feature (1)..(282): NCBI GI: 145234585 Blast Desc: An03g00340 [Aspergillus niger] gi|134057612|emb|CAK38012.1| protein product [Aspergillus niger]
  misc_feature (1)..(282): NCBI GI: 169623803 Blast Desc: SNOG_15145 [Phaeosphaeria nodorum SN15] gi|111056250|gb|EAT77370.1| SNOG_15145 [Phaeosphaeria nodorum SN15]
  misc_feature (79)..(282): NCBI GI: 115384152 Blast Desc: [Aspergillus terreus NIH2624] gi|114196315|gb|EAU38015.1| [Aspergillus terreus NIH2624]
  misc_feature (1)..(282): NCBI GI: 159123417 Blast Desc: fumarylacetoacetate hydrolase family protein [Aspergillus fumigatus A1163]
  misc_feature (1)..(282): NCBI GI: 70986641 Blast Desc: fumarylacetoacetate hydrolase family protein [Aspergillus fumigatus Af293] gi|66846441|gb|EAL86773.1| fumarylacetoacetate hydrolase family protein [Aspergillus Af293]
  misc_feature (1)..(281): NCBI GI: 240111174 Blast Desc: fumarylacetoacetate hydrolase family protein [Coccidioides posadasii C735 delta SOWgp]
  misc_feature (2)..(282): NCBI GI: 171691564 Blast Desc: protein product [Podospora anserina] gi|170945730|emb|CAP71843.1| protein product [Podospora anserina]
  misc_feature (1)..(281): NCBI GI: 119189619 Blast Desc: CIMG_04857 [Coccidioides immitis RS]
  misc_feature (73)..(274): SWISSPROT Homolog: EC 4.3.2.3 Ureidoglycolate lyase
MAAFTKLVRFESDDGKTYFADLANDAAEFLTTGARLTSYESFDDLLSKKSEQTATFKRLLAPLPRNDIPIYCVGLNYHDHATEANMAVSQNPPLWVKPAASLANPGQDIIMNKYCASSLPDYEAELVFVTSRECKNLTEAEASDAILGYTIGNDLSCRLFQQPNQGGGQFFYAKAFDDFAPIGPALVSKENFSLSKSGMTLRVNDEEEMRQTVKNFKNDMVFSPAKILSVMSQGTTIPAYTAVMTGTPSGVGAFRKKFLNHGDVVTIEIDGIGQLKNKIVFE

SEQ ID NO: 13941 - DNA, 4049 bp, Muscodor strobelii
  misc_feature: SGI EST ID NO. CUFF.33327.0
  misc_feature: Variant of the nucleotide sequence at SEQ ID NO 13939
gaatgtgatcatgaatccgccgcctggtccatcgaggctcgacggcgtggcgccaggcaatgatgccgccttgtcaaagtcttcttgtgacctcgctacgaaagctggcccaccaaaggccgctttgccatctttgctcttggaagcaacgtagacgaatggatcaataccgtagcctctgtaccaaattctatccgcagttcttttcgcttctatgaagccccactgcttagcaaactcggcgaaaacatctagatccggatgttcaaaatagacatggccaaggcgagccagctgaactttcgaagggttgttcgtaatctcggggatacgcatagtgacagaatcacgaacgaatttgggggcgtatgagagtacgggcaataaaatagaagccataaggtctggatgggaggctaagtcatttaggatagaggcacaactcgacgttgaagctacatactgcccaaccacgcctttttgttctccaccctcccggcgcgatttaggagtcaaatctaaggacaaagcgcatttctgatcaaccggtatccttcgcattcgttggatactccaggttgcaacttgggggcgcagcatggtacgcggcgatcatgatgttcctccggattgtatctccagtttctccgacgcatcaccaggccatcgaaacagtgacgtttaggagccgcatgcttagctacgctcggaaagaccatttcgcattcgcttccgaaagtggccaatgtgattgtatcttcggccggatacagcgtttacagagaggttcgagaacgtggctaacgtggggaaattccggcacgaccttagccagcacggcaattgagccggatgccccactacactctcccggagtgcgcatattgtatgggcgatttactatttcccgtccctaaaacagacttcagctcttcaggaggattatccagatatctctctcatcatccatcgtcaataactgaatcacacgacgcatcctatcgaacgcaacccttcaagcaattaccatggcagcattcacaaaactagttcgatttgagtctgatgatggaaagacatactttgcggatttagctaatgatgctgctgaattcctcaccactggggcaagactgacgtcctatgagtctttcgacgatttgctatcaaagaaaagcgaacagactgccacatttaagagactcctggctcctctgcctcgtaatgatataccaatctactgtgtcggcctcaattatcatgatcacgcgactgaagcaaacatggctgtaagccaaaatccgccattgtgggtgaaaccagctgcatcgctggcaaatcctgggcaggacatcatcatgaacaaatactgcgcatccagcctaccggactacgaagccgagttggtatttgtaacatcaagagaatgtaagaaccttacagaggcggaggcttctgatgccatccttggctataccattggcaatgatctttcttgccgcttatttcagcagcctaatcaggggggtgggcaatttttctacgcaaaggcattcgatgacttcgcgcccatcgggccagctttggtgagcaaggagaatttctccttatcaaaaagcgggatgaccttgcgagtgaatgatgaggaagaaatgcgtcagacagttaaaaacttcaagaatgatatggttttcagtcccgctaagattctcagtgtcatgagccaaggcaccaccattccggcttatacagctgtgatgacgggtacaccatccggtgttggagcttttagaaaaaagttccttaatcatggggacgtcgtgactattgagattgacggtattggtcagctgaagaacaagattgtctttgagtaagattgaccatactcaccatcgtttcccttctgcgtgtcctttactgagaaaaaggtaatcaaggattgattggaagacctggttttacctaaagatacaaagatttgtgatatcaatagttccacgatggttgttagcataaggaaaggtcgctttcttcttagtcccaattactcttcagagtgtagtttgatatatcaaataattgctatacacaatttgcagtttgtgtaaaacgctttgagcgcttaagagcattgacagtcattaatgaggttcccctgacagaacccaatttcacgagtgcaatcatgttggcaacacatggaatgtaggacttatggtgtaagtacaccggtgaccccagtataaagctcaaactggccgcggttcactgcaattgaatggcacggttgcgcgaacagagatcctcattgatctgtctgtacccatgatgaattgtctgctaatgatggcattatgctaatctctagatagagtagatcgatcatcgaccgccgagactctcctttaattctgtcaagcaggcaaaaaggtcgggatagtgattcgcgaggccgtatataaacaagtcagagcggactatgacgaatttggttaagggcatgaagcgactgaagaagtttgacggagcgtattgtgggcgattgtaaacgttgagatgggcaaggtcctccatcggtgtcgggaaatacatctctgtattaccaggtctaacattctgcggcttcgggcatatcactttaactgaaccttcgttaaggatggatttgggcaacttgacttgctcaagcgcctccttcgcgtccgcttcgtcgctttcgggatatttgccaaccaacaccagcaaagccattgccgtaggacttttacccagtagcgtgtcggacagaacaggtcccccaagttgcgaggaaatgtaaacttgaggaattctaccgccgccattgaactgagtggagaatgatcctcctcggcatgatttgaagcccttgatctcagaggcagccattggatccggcagattcccaaggagagggagttttcgcatcgcccaatcaacattcctgagtatccaaaagccccatgagtcgccctcattgcacagacctccgttcattttggtgaaattcgctgcgaatctgacactcgctgtcctctctctagcccaagctttaagaactgcatcgcgtaagtctcgactagcattcggtacattctgcaacacctttaagcgccaagcaagttgatgagcatctcgcaagccactcgcgataccctgtcccccgaatggcgggaagacatgcgcggcatctccgatgagaatagtcctatcgtcaaaccatttattgacgattttgtgcgtgaagcgaaatggtctacaccgcaggacgtcgatgcagtcgcgaggatatgtcacctctaccgggaattcctgaccatttttgcctttcttcagcgtgatcataggagtgagatgctcccatagaagcttttcggaatccatggaatcattccagtcattctgagcaaattcatgacgccacaagcgcgcctcatgcgggccgaagcgccctgcagcaagaggcttgccgggagggctagcaaagttccacccttcaggccagtagagagaatagacttcttcgggtgtgtatcccagtttccaaagtggaaaatcgggatgcgtttgaggcgtcggtagtgtcattttgagattggccgcaacccacgttccgtcatatttgtagtcgctgtatacttgtctgattcccgccgatgcttcaaggaaatgtttccggactatgccgatcttcccatcggctccgatcagccaagagccttgaacgcttttctttatgccttgcgcatttgtatactgtacaaccatctgcgtgtctaactgctccctatccgtgaccgtacagccacgtctaaggtcgcagaacggtgttttctcgacgcgattctgcattgcgagttctgagactcgttagttactattgtggacttgattccgttgttaaacgcacctaatttaggctgaatttgaaaccatccgtttggtagggcgtgagagaatccatcgtgagcagaccctatagtgaaaaagggaggatttcgaatggtcgttttgaagaatctaacatt

SEQ ID NO: 13942 - DNA, 1833 bp, Muscodor strobelii
  misc_feature: SGI cDNA ID NO. 564585
  misc_feature: Encodes the peptide sequence at SEQ ID NO 13943
atgggtgactcagctgaggttattatcgtaggtgctgggcccgcgggtttggctcttgcactctccttagcaaagcttgaagtccagtctatcatattggagaaagaactagagatcactgaggatccgagaggagtgtatctgactcacgatgcgcttcggattctctgggatctaggacttggtgatgatatgaacactataggtcatgaatcattgaatgttagattcttcaaaacgaccattcgaaatcctccctttttcactatagggtctgctcacgatggattctctcacgccctaccaaacggatggtttcaaattcagcctaaattagaactcgcaatgcagaatcgcgtcgagaaaacaccgttctgcgaccttagacgtggctgtacggtcacggatagggagcagttagacacgcagatggttgtacagtatacaaatgcgcaaggcataaagaaaagcgttcaaggctcttggctgatcggagccgatgggaagatcggcatagtccggaaacatttccttgaagcatcggcgggaatcagacaagtatacagcgactacaaatatgacggaacgtgggttgcggccaatctcaaaatgacactaccgacgcctcaaacgcatcccgattttccactttggaaactgggatacacacccgaagaagtctattctctctactggcctgaagggtggaactttgctagccctcccggcaagcctcttgctgcagggcgcttcggcccgcatgaggcgcgcttgtggcgtcatgaatttgctcagaatgactggaatgattccatggattccgaaaagcttctatgggagcatctcactcctatgatcacgctgaagaaaggcaaaaatggtcaggaattcccggtagaggtgacatatcctcgcgactgcatcgacgtcctgcggtgtagaccatttcgcttcacgcacaaaatcgtcaataaatggtttgacgataggactattctcatcggagatgccgcgcatgtcttcccgccattcgggggacagggtatcgcgagtggcttgcgagatgctcatcaacttgcttggcgcttaaaggtgttgcagaatgtaccgaatgctagtcgagacttacgcgatgcagttcttaaagcttgggctagagagaggacagcgagtgtcagattcgcagcgaatttcaccaaaatgaacggaggtctgtgcaatgagggcgactcatggggcttttggatactcaggaatgttgattgggcgatgcgaaaactccctctccttgggaatctgccggatccaatggctgcctctgagatcaagggcttcaaatcatgccgaggaggatcattctccactcagttcaatggcggcggtagaattcctcaagtttacatttcctcgcaacttgggggacctgttctgtccgacacgctactgggtaaaagtcctacggcaatggctttgctggtgttggttggcaaatatcccgaaagcgacgaagcggacgcgaaggaggcgcttgagcaagtcaagttgcccaaatccatccttaacgaaggttcagttaaagtgatatgcccgaagccgcagaatgttagacctggtaatacagagatgtatttcccgacaccgatggaggaccttgcccatctcaacgtttacaatcgcccacaatacgctccgtcaaacttcttcagtcgcttcatgcccttaaccaaattcgtcatagtccgctctgacttgtttatatacggcctcgcgaatcactatcccgacctttttgcctgcttgacagaattaaaggagagtctcggcggtcgatga

SEQ ID NO: 13943 - protein, 610 aa, Muscodor strobelii
  misc_feature: SGI Peptide ID NO. 564585
  misc_feature (4)..(399): Pfam Id: PF01494 Pfam Desc: FAD binding domain
  misc_feature (4)..(65): Pfam Id: PF01494 Pfam Desc: FAD binding domain
  misc_feature (309)..(363): Pfam Id: PF01494 Pfam Desc: FAD binding domain
  misc_feature (5)..(604): NCBI GI: 242819848 Blast Desc: monooxygenase, [Talaromyces stipitatus ATCC 10500] gi|218713862|gb|EED13286.1| monooxygenase, [Talaromyces stipitatus ATCC 10500]
  misc_feature (3)..(605): NCBI GI: 242807195 Blast Desc: conserved [Talaromyces stipitatus ATCC 10500] gi|218715529|gb|EED14951.1| conserved [Talaromyces stipitatus ATCC 10500]
  misc_feature (3)..(605): NCBI GI: 67541803 Blast Desc: AN7065.2 [Aspergillus nidulans FGSC A4] gi|40742004|gb|EAA61194.1| AN7065.2 [Aspergillus nidulans FGSC A4]
  misc_feature (173)..(608): NCBI GI: 169623801 Blast Desc: SNOG_15144 [Phaeosphaeria nodorum SN15] gi|111056249|gb|EAT77369.1| SNOG_15144 [Phaeosphaeria nodorum SN15]
  misc_feature (95)..(607): NCBI GI: 115384150 Blast Desc: [Aspergillus terreus NIH2624] gi|114196314|gb|EAU38014.1| [Aspergillus terreus NIH2624]
  misc_feature (120)..(607): NCBI GI: 70986647 Blast Desc: monooxygenase [Aspergillus fumigatus Af293] gi|66846444|gb|EAL86776.1| monooxygenase, [Aspergillus fumigatus Af293]
  misc_feature (120)..(607): NCBI GI: 159123414 Blast Desc: monooxygenase, [Aspergillus fumigatus A1163]
  misc_feature (1)..(582): NCBI GI: 119189617 Blast Desc: CIMG_04856 [Coccidioides immitis RS]
  misc_feature (95)..(604): NCBI GI: 240111176 Blast Desc: CPC735_070110 [Coccidioides posadasii C735 delta SOWgp]
  misc_feature (75)..(605): NCBI GI: 259483618 Blast Desc: TPA: monooxygenase, (AFU_orthologue; AFUA_7G06960) [Aspergillus nidulans FGSC A4]
MGDSAEVIIVGAGPAGLALALSLAKLEVQSIILEKELEITEDPRGVYLTHDALRILWDLGLGDDMNTIGHESLNVRFFKTTIRNPPFFTIGSAHDGFSHALPNGWFQIQPKLELAMQNRVEKTPFCDLRRGCTVTDREQLDTQMVVQYTNAQGIKKSVQGSWLIGADGKIGIVRKHFLEASAGIRQVYSDYKYDGTWVAANLKMTLPTPQTHPDFPLWKLGYTPEEVYSLYWPEGWNFASPPGKPLAAGRFGPHEARLWRHEFAQNDWNDSMDSEKLLWEHLTPMITLKKGKNGQEFPVEVTYPRDCIDVLRCRPFRFTHKIVNKWFDDRTILIGDAAHVFPPFGGQGIASGLRDAHQLAWRLKVLQNVPNASRDLRDAVLKAWARERTASVRFAANFTKMNGGLCNEGDSWGFWILRNVDWAMRKLPLLGNLPDPMAASEIKGFKSCRGGSFSTQFNGGGRIPQVYISSQLGGPVLSDTLLGKSPTAMALLVLVGKYPESDEADAKEALEQVKLPKSILNEGSVKVICPKPQNVRPGNTEMYFPTPMEDLAHLNVYNRPQYAPSNFFSRFMPLTKFVIVRSDLFIYGLANHYPDLFACLTELKESLGGR

SEQ ID NO: 13944 - DNA, 2384 bp, Muscodor strobelii
  misc_feature: SGI EST ID NO. CUFF.33328.2
  misc_feature: Variant of the nucleotide sequence at SEQ ID NO 13942
agagatcactgaggatccgagaggagtgtatctgactcacgatgcgcttcggattctctgggatctaggacttggtgatgatatgaacactataggtcatgaatcattgaatgttagattcttcaaaacgaccattcgaaatcctccctttttcactatagggtctgctcacgatggattctctcacgccctaccaaacggatggtttcaaattcagcctaaattagaactcgcaatgcagaatcgcgtcgagaaaacaccgttctgcgaccttagacgtggctgtacggtcacggatagggagcagttagacacgcagatggttgtacagtatacaaatgcgcaaggcataaagaaaagcgttcaaggctcttggctgatcggagccgatgggaagatcggcatagtccggaaacatttccttgaagcatcggcgggaatcagacaagtatacagcgactacaaatatgacggaacgtgggttgcggccaatctcaaaatgacactaccgacgcctcaaacgcatcccgattttccactttggaaactgggatacacacccgaagaagtctattctctctactggcctgaagggtggaactttgctagccctcccggcaagcctcttgctgcagggcgcttcggcccgcatgaggcgcgcttgtggcgtcatgaatttgctcagaatgactggaatgattccatggattccgaaaagcttctatgggagcatctcactcctatgatcacgctgaagaaaggcaaaaatggtcaggaattcccggtagaggtgacatatcctcgcgactgcatcgacgtcctgcggtgtagaccatttcgcttcacgcacaaaatcgtcaataaatggtttgacgataggactattctcatcggagatgccgcgcatgtcttcccgccattcgggggacagggtatcgcgagtggcttgcgagatgctcatcaacttgcttggcgcttaaaggtgttgcagaatgtaccgaatgctagtcgagacttacgcgatgcagttcttaaagcttgggctagagagaggacagcgagtgtcagattcgcagcgaatttcaccaaaatgaacggaggtctgtgcaatgagggcgactcatggggcttttggatactcaggaatgttgattgggcgatgcgaaaactccctctccttgggaatctgccggatccaatggctgcctctgagatcaagggcttcaaatcatgccgaggaggatcattctccactcagttcaatggcggcggtagaattcctcaagtttacatttcctcgcaacttgggggacctgttctgtccgacacgctactgggtaaaagtcctacggcaatggctttgctggtgttggttggcaaatatcccgaaagcgacgaagcggacgcgaaggaggcgcttgagcaagtcaagttgcccaaatccatccttaacgaaggttcagttaaagtgatatgcccgaagccgcagaatgttagacctggtaatacagagatgtatttcccgacaccgatggaggaccttgcccatctcaacgtttacaatcgcccacaatacgctccgtcaaacttcttcagtcgcttcatgcccttaaccaaattcgtcatagtccgctctgacttgtttatatacggcctcgcgaatcactatcccgacctttttgcctgcttgacagaattaaaggagagtctcggcggtcgatgatcgatctactctatctagagattagcataatgccatcattagcagacaattcatcatgggtacagacagatcaatgaggatctctgttcgcgcaaccgtgccattcaattgcagtgaaccgcggccagtttgagctttatactggggtcaccggtgtacttacaccataagtcctacattccatgtgttgccaacatgattgcactcgtgaaattgggttctgtcaggggaacctcattaatgactgtcaatgctcttaagcgctcaaagcgttttacacaaactgcaaattgtgtatagcaattatttgatatatcaaactacactctgaagagtaattgggactaagaagaaagcgacctttccttatgctaacaaccatcgtggaactattgatatcacaaatctttgtatctttaggtaaaaccaggtcttccaatcaatccttgattacctttttctcagtaaaggacacgcagaagggaaacgatggtgagtatggtcaatcttactcaaagacaatcttgttcttcagctgaccaataccgtcaatctcaatagtcacgacgtccccatgattaaggaacttttttctaaaagctccaacaccggatggtgtacccgtcatcacagctgtataagccggaatggtggtgcctgc

SEQ ID NO: 13945 - DNA, 633 bp, Muscodor strobelii
  misc_feature: SGI cDNA ID NO. 564586
  misc_feature: Encodes the peptide sequence at SEQ ID NO 13946
atgaacggaggtctgtgcaatgagggcgactcatggggcttttggatactcaggaatgttgattgggcgatgcgaaaactccctctccttgggaatctgccggatccaatggctgcctctgagatcaagggcttcaaatcatgccgaggaggatcattctccactcagttcaatggcggcggtagaattcctcaagtttacatttcctcgcaacttgggggacctgttctgtccgacacgctactgggtaaaagtcctacggcaatggctttgctggtgttggttggcaaatatcccgaaagcgacgaagcggacgcgaaggaggcgcttgagcaagtcaagttgcccaaatccatccttaacgaaggttcagttaaagtgatatgcccgaagccgcagaatgttagacctggtaatacagagatgtatttcccgacaccgatggaggaccttgcccatctcaacgtttacaatcgcccacaatacgctccgtcaaacttcttcagtcgcttcatgcccttaaccaaattcgtcatagtccgctctgacttgtttatatacggcctcgcgaatcactatcccgacctttttgcctgcttgacagaattaaaggagagtctcggcggtcgatga

SEQ ID NO: 13946 - protein, 210 aa, Muscodor strobelii
  misc_feature: SGI Peptide ID NO. 564586
  misc_feature (1)..(207): NCBI GI: 169623801 Blast Desc: SNOG_15144 [Phaeosphaeria nodorum SN15] gi|111056249|gb|EAT77369.1| SNOG_15144 [Phaeosphaeria nodorum SN15]
  misc_feature (1)..(204): NCBI GI: 242819848 Blast Desc: monooxygenase, [Talaromyces stipitatus ATCC 10500] gi|218713862|gb|EED13286.1| monooxygenase, [Talaromyces stipitatus ATCC 10500]
  misc_feature (1)..(204): NCBI GI: 240111176 Blast Desc: CPC735_070110 [Coccidioides posadasii C735 delta SOWgp]
  misc_feature (34)..(205): NCBI GI: 115384150 Blast Desc: [Aspergillus terreus NIH2624] gi|114196314|gb|EAU38014.1| [Aspergillus terreus NIH2624]
  misc_feature (1)..(205): NCBI GI: 259483618 Blast Desc: TPA: monooxygenase, (AFU_orthologue; AFUA_7G06960) [Aspergillus nidulans FGSC A4]
  misc_feature (1)..(205): NCBI GI: 67541803 Blast Desc: AN7065.2 [Aspergillus nidulans FGSC A4] gi|40742004|gb|EAA61194.1| AN7065.2 [Aspergillus nidulans FGSC A4]
  misc_feature (2)..(207): NCBI GI: 159123414 Blast Desc: monooxygenase, [Aspergillus fumigatus A1163]
  misc_feature (2)..(207): NCBI GI: 70986647 Blast Desc: monooxygenase [Aspergillus fumigatus Af293] gi|66846444|gb|EAL86776.1| monooxygenase, [Aspergillus fumigatus Af293]
  misc_feature (2)..(207): NCBI GI: 119485512 Blast Desc: NFIA_099270 [Neosartorya fischeri NRRL 181] gi|119410346|gb|EAW20293.1| [Neosartorya fischeri NRRL 181]
  misc_feature (46)..(182): NCBI GI: 119189617 Blast Desc: CIMG_04856 [Coccidioides immitis RS]
MNGGLCNEGDSWGFWILRNVDWAMRKLPLLGNLPDPMAASEIKGFKSCRGGSFSTQFNGGGRIPQVYISSQLGGPVLSDTLLGKSPTAMALLVLVGKYPESDEADAKEALEQVKLPKSILNEGSVKVICPKPQNVRPGNTEMYFPTPMEDLAHLNVYNRPQYAPSNFFSRFMPLTKFVIVRSDLFIYGLANHYPDLFACLTELKESLGGR

SEQ ID NO: 13947 - DNA, 2384 bp, Muscodor strobelii; identical to SEQ ID NO: 13944
  misc_feature: SGI EST ID NO. CUFF.33328.2
  misc_feature: Variant of the nucleotide sequence at SEQ ID NO 13945

SEQ ID NO: 13948 - DNA, 855 bp, Muscodor strobelii
  misc_feature: SGI cDNA ID NO. 564587
  misc_feature: Reduced expression when VOC is produced
  misc_feature: Encodes the peptide sequence at SEQ ID NO 13949
atggccatcgctgaagacaccgttccccgtggtcccgtcaccgcaacactaaatttctcactccctccaccagaaggacaagttttattcaactacgtggacgctgcaccagccggcgaaccacagaacaatctcgagagggagaaaaaggaaactctcatccacgatattcgaggccatgaatcagagtacaacctagatactgatgccttccaagttatccaaggcgtcccagagccagaaaatgtagacttcacaaatgacgactcaatcaaggcgaattactacccacaagtcgagcagctcctcctcgaccaaattcccggcgcaaaccggatcttcgtgttcgaccacacagtcagacgcgcagatcctaatgcgagtcgcaaggctgtccaagccgtgcatatcgaccagacgcactactctgctgaaaagcgtgttaccacgcacatgggcgatgaagctgagaagctgctccagggtcgatacagaattatcaatgtctggcgacctttaaataagaagcccgtggaatccatgccgcttgctttcgcttccagcgcaacgctcgagcagaaggatgttatccccgttgagcatagatatcctcatggatatattgggcagactgctgctattgctcataatgcgggacagaaatggcattatctctccgggatgactggcgatgagaggttactgttggaatgcttcgatagtgatgtcttaagggaggactcgaaggtcgatggtggacgggtggcgcatactgcgtttgaacaccctaatacgagacctgatgctgaaggacgggagagcattgaggtgcgcacgcttgttttcggaccttga

SEQ ID NO: 13949 - protein, 284 aa, Muscodor strobelii
  misc_feature: SGI Peptide ID NO. 564587
  misc_feature (1)..(284): NCBI GI: 46107890 Blast Desc: FG00828.1 [Gibberella zeae PH-1]
  misc_feature (1)..(284): NCBI GI: 39942264 Blast Desc: MGG_03212 [Magnaporthe grisea 70-15] gi|145015796|gb|EDK00286.1| MGG_03212 [Magnaporthe grisea 70-15]
  misc_feature (11)..(284): NCBI GI: 261356715 Blast Desc: conserved [Verticillium albo-atrum VaMs.102]
  misc_feature (8)..(284): NCBI GI: 156053798 Blast Desc: SS1G_05747 [Sclerotinia sclerotiorum 1980] gi|154703527|gb|EDO03266.1| SS1G_05747 [Sclerotinia sclerotiorum 1980]
  misc_feature (8)..(284): NCBI GI: 154321365 Blast Desc: BC1G_01557 [Botryotinia fuckeliana B05.10] gi|150852095|gb|EDN27287.1| BC1G_01557 [Botryotinia fuckeliana B05.10]
  misc_feature (1)..(276): NCBI GI: 164428048 Blast Desc: NCU01598 [Neurospora crassa OR74A] gi|16416022|emb|CAD01124.1| related to 7alpha-cephem-methoxylase P8 chain [Neurospora crassa] gi|157071989|gb|EAA27273.2| NCU01598
  misc_feature (3)..(284): NCBI GI: 171689338 Blast Desc: protein product [Podospora anserina] gi|170944631|emb|CAP70742.1| protein product [Podospora anserina]
  misc_feature (8)..(283): NCBI GI: 258563528 Blast Desc: conserved [Uncinocarpus reesii 1704] gi|237908016|gb|EEP82417.1| conserved [Uncinocarpus reesii 1704]
  misc_feature (8)..(283): NCBI GI: 119186851 Blast Desc: CIMG_03473 [Coccidioides immitis RS]
  misc_feature (9)..(258): NCBI GI: 116204653 Blast Desc: CHGG_10210 [Chaetomium globosum CBS 148.51] gi|88176338|gb|EAQ83806.1| CHGG_10210 [Chaetomium globosum CBS 148.51]
  misc_feature: Useful for introducing or modulating the production of volatile compounds
MAIAEDTVPRGPVTATLNFSLPPPEGQVLFNYVDAAPAGEPQNNLEREKKETLIHDIRGHESEYNLDTDAFQVIQGVPEPENVDFTNDDSIKANYYPQVEQLLLDQIPGANRIFVFDHTVRRADPNASRKAVQAVHIDQTHYSAEKRVTTHMGDEAEKLLQGRYRIINVWRPLNKKPVESMPLAFASSATLEQKDVIPVEHRYPHGYIGQTAAIAHNAGQKWHYLSGMTGDERLLLECFDSDVLREDSKVDGGRVAHTAFEHPNTRPDAEGRESIEVRTLVFGP

SEQ ID NO: 13950 - DNA, 726 bp, Muscodor strobelii
  misc_feature: SGI cDNA ID NO. 564588
  misc_feature: Reduced expression when VOC is produced
  misc_feature: Encodes the peptide sequence at SEQ ID NO 13951
atgacgaacatcacaatagaaataacatcagaccccgtctgcccctggtgctacatcggcaaaaagcgtctcgaccgggccatctcactctacaagaaagtctaccccggaggacgaaacgacacgttcaccatctcctggcgagcattctatctcgatccaaccgcaccctccaaaggcatcccgtgggctgaacgccacgaacagcggttgacagctcgtcgtgccttaaatccatcaagcgacaagcaaaacccagatgccgatgtcctcaggaatagactagcgagtatcggtagagcagagggcatcgaatttagtttcgcggggaaaatcggccataccagaccggcgcatcgcgcgatttggtacgcgaagacgaaaggtgtgcaagatgagttcgtcatggcgttgttcgcggaatacttcgaaggagagggcgatgtgacgagttacgagtcacttgctgacaccgctacgaaagtcgggttggatcgcgcagagacgctggaatggttggagagcgggaaggggacggaggaggttgatgaggaagccagatcggccgttgaaagaggttttaggggcgtgccgcatttcactattcaaggacaactggtcgacggagcacaggacgagcaggctttcatggaagttttcgtccagattaaggaggacgaagcaaaatcagttccgaacgcttcggctgcaagcattgttgcttga

SEQ ID NO: 13951 - protein, 241 aa, Muscodor strobelii
  misc_feature: SGI Peptide ID NO. 564588
  misc_feature (5)..(221): Pfam Id: PF01323 Pfam Desc: DSBA-like thioredoxin domain
  misc_feature (1)..(225): NCBI GI: 119195171 Blast Desc: CIMG_01960 [Coccidioides immitis RS]
  misc_feature (1)..(230): NCBI GI: 156040748 Blast Desc: SS1G_11352 [Sclerotinia sclerotiorum 1980] gi|154695736|gb|EDN95474.1| SS1G_11352 [Sclerotinia sclerotiorum 1980]
  misc_feature (8)..(227): NCBI GI: 258566355 Blast Desc: conserved [Uncinocarpus reesii 1704] gi|237907623|gb|EEP82024.1| conserved [Uncinocarpus reesii 1704]
  misc_feature (1)..(227): NCBI GI: 238838309 Blast Desc: DSBA oxidoreductase [Microsporum canis CBS 113480]
  misc_feature (1)..(224): NCBI GI: 85093141 Blast Desc: NCU02220 [Neurospora crassa OR74A] gi|28921079|gb|EAA30397.1| [Neurospora crassa OR74A]
  misc_feature (1)..(228): NCBI GI: 189211181 Blast Desc: PTRG_11590 [Pyrenophora tritici-repentis Pt-1C-BFP] gi|187978014|gb|EDU44640.1| PTRG_11590 [Pyrenophora tritici-repentis Pt-1C-BFP]
  misc_feature (1)..(230): NCBI GI: 154303838 Blast Desc: BC1G_08803 [Botryotinia fuckeliana B05.10] gi|150854387|gb|EDN29579.1| BC1G_08803 [Botryotinia fuckeliana B05.10]
  misc_feature (1)..(224): NCBI GI: 171679639 Blast Desc: protein product [Podospora anserina] gi|170939445|emb|CAP64673.1| protein product [Podospora anserina]
  misc_feature (13)..(225): NCBI GI: 240105002 Blast Desc: DSBA-like thioredoxin domain containing protein [Coccidioides posadasii C735 delta SOWgp]
  misc_feature (1)..(224): NCBI GI: 242812844 Blast Desc: conserved [Talaromyces stipitatus ATCC 10500] gi|218714381|gb|EED13804.1| conserved [Talaromyces stipitatus ATCC 10500]
  misc_feature: Useful for introducing or modulating the production of volatile compounds
MTNITIEITSDPVCPWCYIGKKRLDRAISLYKKVYPGGRNDTFTISWRAFYLDPTAPSKGIPWAERHEQRLTARRALNPSSDKQNPDADVLRNRLASIGRAEGIEFSFAGKIGHTRPAHRAIWYAKTKGVQDEFVMALFAEYFEGEGDVTSYESLADTATKVGLDRAETLEWLESGKGTEEVDEEARSAVERGFRGVPHFTIQGQLVDGAQDEQAFMEVFVQIKEDEAKSVPNASAASIVA

SEQ ID NO: 13952 - DNA, 2988 bp, Muscodor strobelii
  misc_feature: SGI EST ID NO. CUFF.33356.0
  misc_feature: Variant of the nucleotide sequence at SEQ ID NO 13950
gcaatttctctcaatagcagacgcacaatattttggaaagagagaaagctgcgaaagaccaaccaccagtcacccaacaaaatgacgaacatcacaatagaaataacatcagaccccgtctgcccctggtgctacatcggcaaaaagcgtctcgaccgggccatctcactctacaagaaagtctaccccggaggacgaaacgacacgttcaccatctcctggcgagcattctatctcgatccaaccgcaccctccaaaggcatcccgtgggctgaacgccacgaacagcggttgacagctcgtcgtgccttaaatccatcaagcgacaagcaaaacccagatgccgatgtcctcaggaatagactagcgagtatcggtagagcagagggcatcgaatttagtttcgcggggaaaatcggccataccagaccggcgcatcgcgcgatttggtacgcgaagacgaaaggtgtgcaagatgagttcgtcatggcgttgttcgcggaatacttcgaaggagagggcgatgtgacgagttacgagtcacttgctgacaccgctacgaaagtcgggttggatcgcgcagagacgctggaatggttggagagcgggaaggggacggaggaggttgatgaggaagccagatcggccgttgaaagaggttttaggggcgtgccgcatttcactattcaaggacaactggtcgacggagcacaggacgagcaggctttcatggaagttttcgtccagattaaggaggacgaagcaaaatcagttccgaacgcttcggctgcaagcattgttgcttgaaatgtgacgataggtaactatatacctaatttaagcacgctaccgaaatgtgatgacagtatctagattgcaatagcaatcgctacttagaggctatgaatccatcttctataaccgatgggaaccgtaagcgagtccctaatgatcccttgcaaacaccaagcaatgctttgataacgctgcgacagctgcatggaaagcagcgcggggggtatatataccagccacaattcatgaaataggaaatcttgataccgtaaaatgtcaccccgtgtctttccttgatccatgtcatatccgtgcgaacaaataaacaaatttgaaatattggttcagggttttcctcgttttcctcggccactgcccgttctgctcatagcgactccaccgagactgctctggcggctcataggcacaccagcagataggttgccggctggggtggcggggagaagagagcccgaggttacagctggctcgtctctcaagctggagggcacaccaagggcttctgaaagggattcaagtgacggtcggccgcgctgaacgtaggcggccatctggttacggcgctggggaactgacatgacttccagtaatcggcgtccacccttctcaacttcgatattcgacccggcaccattcttgacctgataattcttgaaggtggccatgaccgcaatgtcatgtgtagcatcatccagagacaagccctgaggcgtgtttgattctgacttcacataagccttcacatactgagactggatcataggaggcagtttcggttcgtaagcagcaagcctgttgagattgccgggcagctcgaaattggccaatccctcgactccgaggatcttatcgtcgtagaaattctgctgagtctggccacctcgcgtgctccgcgtggcatgcgaaggctgccgctccatcgtgacggctgaaagctcctcttcttcgtcgttgccgtcgccattgctggcatcgctctcgtcgggtgaggggaggacattgccattagcgtcgcggtgggataagagatgcttgtgcgaggctagtgctgaggtgttgtagaccatggacagctccttttcagtgaacagcttctcgatgctgtaggtaggacctgcttcgcgattgaagctcttccacttttcgctctgccacagagcggtggagttggacgtgtctcctcggcgcgtgggaacgggcgatccgtcgtcgtctccgatgttgcgcttcctctttctattgtcggacaggccggggacgtcttccatctggcgcaggcgggtattgcgcttcccgtggacaccgccggggctggccggattggtcaagctaaactggttggggtggaggagcagggccgagctgtcggcgatgtctatggcctctttctccttgttgaggcggtacttcttggtcacgatgttgttcatgaggcgatctctaagcgtctcagacaggctcttgtgctctcgttttgcgacctcgatcctgtaagcgtgcgtgttatggtagtcctgcatcttgcgttcgtactcgtactgtgacgtagttgatggtgagcagtgagccaggagaggagtgtaatgcgactgtaatgaggtcgtatttgcttaccttctgggcggtcatgtcgtagtctctcgtctcgatgagatcctcgacctcgagcacccactcttggaaggtcgggccagccatctcgaggagactgcggtgctgggcgttagcattgttggcggcggctgcggcttgcgactgagatcgctctcgtcgctcgcggtcgatggcgtcgagcgggcggtcggcgtaggggtcgactcgagagacgaggttaacgtcgatctggatcttgcccagctcctcgcggtagtgcttgtccttgtcgcggttgaactggtcagacatggcaacgagcttgtcactcagggcctgccgcttcttgtcgcgcttggactggggctgaggtgactgtcgagaaggcctcgacacgggcatcgccggctgctgctgcgtcgcatccggagcagccatggcgggcgagcggggaagagtgtcgagtggtgtgtgcagtgagattcgatcgttgaagagtgcgtttgaatgagtgcaatgtggaggcgaacccggaaacgcaagtcagtcgttatgtcgtgtttaaagaggaaatgtctg

SEQ ID NO: 13953 - DNA, 1632 bp, Muscodor strobelii
  misc_feature: SGI cDNA ID NO. 564589
  misc_feature: Encodes the peptide sequence at SEQ ID NO 13954
atggctgctccggatgcgacgcagcagcagccggcgatgcccgtgtcgaggccttctcgacagtcacctcagccccagtccaagcgcgacaagaagcggcaggccctgagtgacaagctcgttgccatgtctgaccagttcaaccgcgacaaggacaagcactaccgcgaggagctgggcaagatccagatcgacgttaacctcgtctctcgagtcgacccctacgccgaccgcccgctcgacgccatcgaccgcgagcgacgagagcgatctcagtcgcaagccgcagccgccgccaacaatgctaacgcccagcaccgcagtctcctcgagatggctggcccgaccttccaagagtgggtgctcgaggtcgaggatctcatcgagacgagagactacgacatgaccgcccagaagtacgagtacgaacgcaagatgcaggactaccataacacgcacgcttacaggatcgaggtcgcaaaacgagagcacaagagcctgtctgagacgcttagagatcgcctcatgaacaacatcgtgaccaagaagtaccgcctcaacaaggagaaagaggccatagacatcgccgacagctcggccctgctcctccaccccaaccagtttagcttgaccaatccggccagccccggcggtgtccacgggaagcgcaatacccgcctgcgccagatggaagacgtccccggcctgtccgacaatagaaagaggaagcgcaacatcggagacgacgacggatcgcccgttcccacgcgccgaggagacacgtccaactccaccgctctgtggcagagcgaaaagtggaagagcttcaatcgcgaagcaggtcctacctacagcatcgagaagctgttcactgaaaaggagctgtccatggtctacaacacctcagcactagcctcgcacaagcatctcttatcccaccgcgacgctaatggcaatgtcctcccctcacccgacgagagcgatgccagcaatggcgacggcaacgacgaagaagaggagctttcagccgtcacgatggagcggcagccttcgcatgccacgcggagcacgcgaggtggccagactcagcagaatttctacgacgataagatcctcggagtcgagggattggccaatttcgagctgcccggcaatctcaacaggcttgctgcttacgaaccgaaactgcctcctatgatccagtctcagtatgtgaaggcttatgtgaagtcagaatcaaacacgcctcagggcttgtctctggatgatgctacacatgacattgcggtcatggccaccttcaagaattatcaggtcaagaatggtgccgggtcgaatatcgaagttgagaagggtggacgccgattactggaagtcatgtcagttccccagcgccgtaaccagatggccgcctacgttcagcgcggccgaccgtcacttgaatccctttcagaagcccttggtgtgccctccagcttgagagacgagccagctgtaacctcgggctctcttctccccgccaccccagccggcaacctatctgctggtgtgcctatgagccgccagagcagtctcggtggagtcgctatgagcagaacgggcagtggccgaggaaaacgaggaaaaccctga

SEQ ID NO: 13954 - protein, 543 aa, Muscodor strobelii
  misc_feature: SGI Peptide ID NO. 564589
  misc_feature (45)..(85): Pfam Id: PF08598 Pfam Desc: Sds3-like
  misc_feature (1)..(535): NCBI GI: 164428050 Blast Desc: NCU01599 [Neurospora crassa OR74A] gi|16416021|emb|CAB91371.2| related to nif-specific regulatory protein [Neurospora crassa] gi|157071990|gb|EAA27274.2| conserved
  misc_feature (26)..(530): NCBI GI: 171689340 Blast Desc: protein product [Podospora anserina] gi|170944632|emb|CAP70743.1| protein product [Podospora anserina]
  misc_feature (14)..(535): NCBI GI: 116204655 Blast Desc: CHGG_10211 [Chaetomium globosum CBS 148.51] gi|88176339|gb|EAQ83807.1| CHGG_10211 [Chaetomium globosum CBS 148.51]
  misc_feature (1)..(540): NCBI GI: 256734640 Blast Desc: [Nectria haematococca mpVI 77-13-4]
  misc_feature (15)..(535): NCBI GI: 145608338 Blast Desc: MGG_12758 [Magnaporthe grisea 70-15] gi|145015821|gb|EDK00311.1| MGG_12758 [Magnaporthe grisea 70-15]
  misc_feature (17)..(540): NCBI GI: 46107888 Blast Desc: FG00827.1 [Gibberella zeae PH-1]
  misc_feature (27)..(542): NCBI GI: 261356714 Blast Desc: conserved [Verticillium albo-atrum VaMs.102]
  misc_feature (22)..(537): NCBI GI: 156054298 Blast Desc: SS1G_05997 [Sclerotinia sclerotiorum 1980] gi|154703777|gb|EDO03516.1| SS1G_05997 [Sclerotinia sclerotiorum 1980]
  misc_feature (15)..(540): NCBI GI: 154303313 Blast Desc: BC1G_09405 [Botryotinia fuckeliana B05.10] gi|150854968|gb|EDN30160.1| BC1G_09405 [Botryotinia fuckeliana B05.10]
  misc_feature (25)..(359): NCBI GI: 238489701 Blast Desc: deacetylase complex subunit Sds3, [Aspergillus flavus NRRL3357] gi|220698476|gb|EED54816.1| deacetylase complex subunit Sds3, [Aspergillus flavus NRRL3357]
MAAPDATQQQPAMPVSRPSRQSPQPQSKRDKKRQALSDKLVAMSDQFNRDKDKHYREELGKIQIDVNLVSRVDPYADRPLDAIDRERRERSQSQAAAAANNANAQHRSLLEMAGPTFQEWVLEVEDLIETRDYDMTAQKYEYERKMQDYHNTHAYRIEVAKREHKSLSETLRDRLMNNIVTKKYRLNKEKEAIDIADSSALLLHPNQFSLTNPASPGGVHGKRNTRLRQMEDVPGLSDNRKRKRNIGDDDGSPVPTRRGDTSNSTALWQSEKWKSFNREAGPTYSIEKLFTEKELSMVYNTSALASHKHLLSHRDANGNVLPSPDESDASNGDGNDEEEELSAVTMERQPSHATRSTRGGQTQQNFYDDKILGVEGLANFELPGNLNRLAAYEPKLPPMIQSQYVKAYVKSESNTPQGLSLDDATHDIAVMATFKNYQVKNGAGSNIEVEKGGRRLLEVMSVPQRRNQMAAYVQRGRPSLESLSEALGVPSSLRDEPAVTSGSLLPATPAGNLSAGVPMSRQSSLGGVAMSRTGSGRGKRGKP

SEQ ID NO: 13955 - DNA, 2912 bp, Muscodor strobelii
  misc_feature: SGI EST ID NO. CUFF.33357.1
  misc_feature: Variant of the nucleotide sequence at SEQ ID NO 13953
cagacatttcctctttaaacacgacataacgactgacttgcgtttccgggttcgcctccacattgcactcattcaaacgcactcttcaacgatcgaatctcactgcacacaccactcgacactcttccccgctcgcccgccatggctgctccggatgcgacgcagcagcagccggcgatgcccgtgtcgaggccttctcgacagtcacctcagccccagtccaagcgcgacaagaagcggcaggccctgagtgacaagctcgttgccatgtctgaccagttcaaccgcgacaaggacaagcactaccgcgaggagctgggcaagatccagatcgacgttaacctcgtctctcgagtcgacccctacgccgaccgcccgctcgacgccatcgaccgcgagcgacgagagcgatctcagtcgcaagccgcagccgccgccaacaatgctaacgcccagcaccgcagtctcctcgagatggctggcccgaccttccaagagtgggtgctcgaggtcgaggatctcatcgagacgagagactacgacatgaccgcccagaagtacgagtacgaacgcaagatgcaggactaccataacacgcacgcttacaggatcgaggtcgcaaaacgagagcacaagagcctgtctgagacgcttagagatcgcctcatgaacaacatcgtgaccaagaagtaccgcctcaacaaggagaaagaggccatagacatcgccgacagctcggccctgctcctccaccccaaccagtttagcttgaccaatccggccagccccggcggtgtccacgggaagcgcaatacccgcctgcgccagatggaagacgtccccggcctgtccgacaatagaaagaggaagcgcaacatcggagacgacgacggatcgcccgttcccacgcgccgaggagacacgtccaactccaccgctctgtggcagagcgaaaagtggaagagcttcaatcgcgaagcaggtcctacctacagcatcgagaagctgttcactgaaaaggagctgtccatggtctacaacacctcagcactagcctcgcacaagcatctcttatcccaccgcgacgctaatggcaatgtcctcccctcacccgacgagagcgatgccagcaatggcgacggcaacgacgaagaagaggagctttcagccgtcacgatggagcggcagccttcgcatgccacgcggagcacgcgaggtggccagactcagcagaatttctacgacgataagatcctcggagtcgagggattggccaatttcgagctgcccggcaatctcaacaggcttgctgcttacgaaccgaaactgcctcctatgatccagtctcagtatgtgaaggcttatgtgaagtcagaatcaaacacgcctcagggcttgtctctggatgatgctacacatgacattgcggtcatggccaccttcaagaattatcaggtcaagaatggtgccgggtcgaatatcgaagttgagaagggtggacgccgattactggaagtcatgtcagttccccagcgccgtaaccagatggccgcctacgttcagcgcggccgaccgtcacttgaatccctttcagaagcccttggtgtgccctccagcttgagagacgagccagctgtaacctcgggctctcttctccccgccaccccagccggcaacctatctgctggtgtgcctatgagccgccagagcagtctcggtggagtcgctatgagcagaacgggcagtggccgaggaaaacgaggaaaaccctgaaccaatatttcaaatttgtttatttgttcgcacggatatgacatggatcaaggaaagacacggggtgacattttacggtatcaagatttcctatttcatgaattgtggctggtatatataccccccgcgctgctttccatgcagctgtcgcagcgttatcaaagcattgcttggtgtttgcaagggatcattagggactcgcttacggttcccatcggttatagaagatggattcatagcctctaagtagcgattgctattgcaatctagatactgtcatcacatttcggtagcgtgcttaaattaggtatatagttacctatcgtcacatttcaagcaacaatgcttgcagccgaagcgttcggaactgattttgcttcgtcctccttaatctggacgaaaacttccatgaaagcctgctcgtcctgtgctccgtcgaccagttgtccttgaatagtgaaatgcggcacgcccctaaaacctctttcaacggccgatctggcttcctcatcaacctcctccgtccccttcccgctctccaaccattccagcgtctctgcgcgatccaacccgactttcgtagcggtgtcagcaagtgactcgtaactcgtcacatcgccctctccttcgaagtattccgcgaacaacgccatgacgaactcatcttgcacacctttcgtcttcgcgtaccaaatcgcgcgatgcgccggtctggtatggccgattttccccgcgaaactaaattcgatgccctctgctctaccgatactcgctagtctattcctgaggacatcggcatctgggttttgcttgtcgcttgatggatttaaggcacgacgagctgtcaaccgctgttcgtggcgttcagcccacgggatgcctttggagggtgcggttggatcgagatagaatgctcgccaggagatggtgaacgtgtcgtttcgtcctccggggtagactttcttgtagagtgagatggcccggtcgagacgctttttgccgatgtagcaccaggggcagacggggtctgatgttatttctattgtgatgttcgtcattttgttgggtgactggtggttggtctttcgcagctttctctctttccaaaatattgtgcgtctgctattgagagaaattgc

SEQ ID NO: 13956 - DNA, 1953 bp, Muscodor strobelii
  misc_feature: SGI cDNA ID NO. 564590
  misc_feature: Encodes the peptide sequence at SEQ ID NO 13957
atgagcggctccacggatgttgagagttccccggaactgcgggttcctgctgaatctcaaaagcttctgccttaccagtatggagctcttccaagccatgcgagcacgcgcatactggcgctggcaccatcaatggatgcctcggagcccctgaaagctgaattacacgatattgatatcatgtctgatcctttctttgaagctctatcgtatacgtggggggctgccgagtttacggaaccgctcactcttgacaatatatacaccaagcgcatcacatcaaatctgcgggacgctctggtgcggttccgttcgaaaaccgagatccgccgaatctgggtcgacgcactttgtattaaccaagatgataatgaagacaaggctaagcaaattccaagcatgggcgatatctacaggcgtgcgtctagagtcttggtgtggcttggagatcatccagcgcagtcccagctgctacacgatatcgaccattggtcccgatctcgtcgtgacggatcagttgaaatgctccataagttggagtccctggtccagttaagctggttcggccggcgttggatcatacaagaagtcgtatttaaccacgacgtgacgctcttctgtggcaatgccgagatcgcttggctgcggttccttcaggttctgaggaccgcaactacggatctgaagatatctgatcgacttcacgccatccaaaacatggatgaattgtggatgcggcactgcgtggaccttgactcatcagaggatgaatatgtgtggcggacagaattcgatgatccacctccaaaaaagaagccaaaaaaggctaaagattcatcgcatttcttgactcttctgaaagccttctctgcatcgggttgcgccgatccacgagatcgtttgtacgctctaagcggtttggcgcagcgggtcaatatactcctccctggccagagtgcagcgggctcaaaggattgtatcatcagagttgactatgggaagagtgtcgaagattgttacggagaattcgcaacagaaaatctctcccgattagactggagcctatggttaacagctactgcagagagatctgatgggtcattcttgcaaggcaaatcttcatgggtacccgattggagaatacccattgtgagaaacaaggatgagatcaccagtcaccactccacgcttagcaagtctgtgcaagtgtcaacccatggtctagcccttaaactcagtggggattggaaatattacggggaactgagtgctgtctacgacaaacctcctgatttagcaacagatgaagataccgtcagctggctcagggccacagttactacggtaatgaaggaacaaggcattgaacgtgacgtggtggttatgcaattgtaccacgtactgaagtaccagatgaggatgctcgacattgtggatgtagcacaactagatcgcctgctacgagatccatcttcttggccacttgagggggacctgttggactcgatccgaacatttatgtgggggagaaaggtgatagtgtcttccaccatgcgcaaatgcagtggttccaagtccatactacaacaattgggtctcacctcatcacagcctcaaacctcagttgcgatagatcagtcttgtcaacccacaattggcattggaccgtcccatgcagaggtcggtgatgttgtttgtacaaatgaggtacacgtcaacacacttaaagacttgtccggaagagatcggcgcgttgttcagctatacggcttgacagcgtttctggtcaggaagaaaacaaacacttatcccgctaatatgacagagacgccgaacctaggtgaagttttattcattggattcccaagacttaatagaccgataactaaatctaatgaaccggggcttattgatgacagattgccttgtttcaactccatgaccatttgttaa

SEQ ID NO: 13957 - protein, 650 aa, Muscodor strobelii
  misc_feature: SGI Peptide ID NO. 564590
  misc_feature (66)..(196): Pfam Id: PF06985 Pfam Desc: Heterokaryon incompatibility protein (HET)
  misc_feature (22)..(304): NCBI GI: 169611883 Blast Desc: SNOG_09056 [Phaeosphaeria nodorum SN15] gi|160702389|gb|EAT83248.2| SNOG_09056 [Phaeosphaeria nodorum SN15]
  misc_feature (37)..(344): NCBI GI: 169611881 Blast Desc: SNOG_09055 [Phaeosphaeria nodorum SN15] gi|111062127|gb|EAT83247.1| SNOG_09055 [Phaeosphaeria nodorum SN15]
  misc_feature (25)..(357): NCBI GI: 156061491 Blast Desc: SS1G_02890 [Sclerotinia sclerotiorum 1980] gi|154700292|gb|EDO00031.1| SS1G_02890 [Sclerotinia sclerotiorum 1980]
  misc_feature (25)..(379): NCBI GI: 256724619 Blast Desc: NECHADRAFT_95927 [Nectria haematococca mpVI 77-13-4]
  misc_feature (25)..(384): NCBI GI: 169614059 Blast Desc: SNOG_10164 [Phaeosphaeria nodorum SN15] gi|111061379|gb|EAT82499.1| SNOG_10164 [Phaeosphaeria nodorum SN15]
  misc_feature (31)..(379): NCBI GI: 168042194 Blast Desc: [Physcomitrella patens subsp. patens] gi|162675113|gb|EDQ61612.1| [Physcomitrella patens subsp. patens]
  misc_feature (15)..(381): NCBI GI: 256730775 Blast Desc: NECHADRAFT_30134 [Nectria haematococca mpVI 77-13-4]
  misc_feature (25)..(456): NCBI GI: 256722982 Blast Desc: NECHADRAFT_86908 [Nectria haematococca mpVI 77-13-4]
  misc_feature (37)..(383): NCBI GI: 256722832 Blast Desc: [Nectria haematococca mpVI 77-13-4]
  misc_feature (25)..(381): NCBI GI: 46109348 Blast Desc: FG01556.1 [Gibberella zeae PH-1]
MSGSTDVESSPELRVPAESQKLLPYQYGALPSHASTRILALAPSMDASEPLKAELHDIDIMSDPFFEALSYTWGAAEFTEPLTLDNIYTKRITSNLRDALVRFRSKTEIRRIWVDALCINQDDNEDKAKQIPSMGDIYRRASRVLVWLGDHPAQSQLLHDIDHWSRSRRDGSVEMLHKLESLVQLSWFGRRWIIQEVVFNHDVTLFCGNAEIAWLRFLQVLRTATTDLKISDRLHAIQNMDELWMRHCVDLDSSEDEYVWRTEFDDPPPKKKPKKAKDSSHFLTLLKAFSASGCADPRDRLYALSGLAQRVNILLPGQSAAGSKDCIIRVDYGKSVEDCYGEFATENLSRLDWSLWLTATAERSDGSFLQGKSSWVPDWRIPIVRNKDEITSHHSTLSKSVQVSTHGLALKLSGDWKYYGELSAVYDKPPDLATDEDTVSWLRATVTTVMKEQGIERDVVVMQLYHVLKYQMRMLDIVDVAQLDRLLRDPSSWPLEGDLLDSIRTFMWGRKVIVSSTMRKCSGSKSILQQLGLTSSQPQTSVAIDQSCQPTIGIGPSHAEVGDVVCTNEVHVNTLKDLSGRDRRVVQLYGLTAFLVRKKTNTYPANMTETPNLGEVLFIGFPRLNRPITKSNEPGLIDDRLPCFNSMTIC

SEQ ID NO: 13958 - DNA, 2316 bp, Muscodor strobelii
  misc_feature: SGI EST ID NO. CUFF.33331.0
  misc_feature: Variant of the nucleotide sequence at SEQ ID NO 13956
ctgctcacttggactcttcaagaaaaaaaagaagctgctgcacttctttgcactgcatgttctaatatgcaaatcagcaaaagcggtcctgcaagctagatgctcgagtaccccgcagcataatatctacatatcaagaggttacattggctcctggcatattaatgcccgggtctacgagactacttgggcttcatttctcattccctaaaattgttctgctgagtagcgtttagcatatgccatgagcggctccacggatgttgagagttccccggaactgcgggttcctgctgaatctcaaaagcttctgccttaccagtatggagctcttccaagccatgcgagcacgcgcatactggcgctggcaccatcaatggatgcctcggagcccctgaaagctgaattacacgatattgatatcatgtctgatcctttctttgaagctctatcgtatacgtggggggctgccgagtttacggaaccgctcactcttgacaatatatacaccaagcgcatcacatcaaatctgcgggacgctctggtgcggttccgttcgaaaaccgagatccgccgaatctgggtcgacgcactttgtattaaccaagatgataatgaagacaaggctaagcaaattccaagcatgggcgatatctacaggcgtgcgtctagagtcttggtgtggcttggagatcatccagcgcagtcccagctgctacacgatatcgaccattggtcccgatctcgtcgtgacggatcagttgaaatgctccataagttggagtccctggtccagttaagctggttcggccggcgttggatcatacaagaagtcgtatttaaccacgacgtgacgctcttctgtggcaatgccgagatcgcttggctgcggttccttcaggttctgaggaccgcaactacggatctgaagatatctgatcgacttcacgccatccaaaacatggatgaattgtggatgcggcactgcgtggaccttgactcatcagaggatgaatatgtgtggcggacagaattcgatgatccacctccaaaaaagaagccaaaaaaggctaaagattcatcgcatttcttgactcttctgaaagccttctctgcatcgggttgcgccgatccacgagatcgtttgtacgctctaagcggtttggcgcagcgggtcaatatactcctccctggccagagtgcagcgggctcaaaggattgtatcatcagagttgactatgggaagagtgtcgaagattgttacggagaattcgcaacagaaaatctctcccgattagactggagcctatggttaacagctactgcagagagatctgatgggtcattcttgcaaggcaaatcttcatgggtacccgattggagaatacccattgtgagaaacaaggatgagatcaccagtcaccactccacgcttagcaagtctgtgcaagtgtcaacccatggtctagcccttaaactcagtggggattggaaatattacggggaactgagtgctgtctacgacaaacctcctgatttagcaacagatgaagataccgtcagctggctcagggccacagttactacggtaatgaaggaacaaggcattgaacgtgacgtggtggttatgcaattgtaccacgtactgaagtaccagatgaggatgctcgacattgtggatgtagcacaactagatcgcctgctacgagatccatcttcttggccacttgagggggacctgttggactcgatccgaacatttatgtgggggagaaaggtgatagtgtcttccaccatgcgcaaatgcagtggttccaagtccatactacaacaattgggtctcacctcatcacagcctcaaacctcagttgcgatagatcagtcttgtcaacccacaattggcattggaccgtcccatgcagaggtcggtgatgttgtttgtacaaatgaggtacacgtcaacacacttaaagacttgtccggaagagatcggcgcgttgttcagctatacggcttgacagcgtttctggtcaggaagaaaacaaacacttatcccgctaatatgacagagacgccgaacctaggtgaagttttattcattggattcccaagacttaatagaccgataactaaatctaatgaaccggggcttattgatgacagattgccttgtttcaactccatgaccatttgttaatgatagataccttgcttctgcgactctacctatcttaacctcattgttcctaaccaggcaagtgggccatttatgaagtacctttgtgtggacctattctcaacttgccagattcccaa

SEQ ID NO: 13959 - DNA, 1392 bp, Muscodor strobelii
  misc_feature: SGI cDNA ID NO. 564591
  misc_feature: Encodes the peptide sequence at SEQ ID NO 13960
atggcgaaactgacgaccagcccggactggaagtcgtattatccactgaccccgagactcccagagcagattccccacgagcacacgaaagggaggcattcacttctacccgaagtcgtccctagacaagacgagattgataagtcgatcatagctggacccacaagctcagaggacgactccgaatcacactcaggaaccatacgacccctttcaaggtcccgtaaaaaaatctacatagttgccggcgtgcttacattcctacttatagtagccggcgcaattgttggtggaatctttggcgcgcgagccaaaagcactccgcccgttgacactccacccgttgacgctccgcccgttgacacgccgcaagacaactcgacaacctcgaatcttattcgtgcgaactcgagtctaaccgtcacaggatatctacaaagcgaaacactcaatctacgtgttttctaccaggctaagaatggtagcctgcggttctcggacttccgggacgacgggagtaaatggagctcgtcgttcgaggtcagtagaagtggcgttcgatccgatacagcgattggtgcgtcgacactcatccggagtccagacaggaataggcagattgagctcttcttcctaaacacatcgaccaagttgagcggagataatttctgggaccagcagacgcttcgaggtggacaccatgattcaattgacgggtatccgctcccgacagcggccaattcgcgcgtcgccacgtactggccatacgtcgtggtccagagcccaaacctcactttgcaggcggtccgatgggaaggcgccgagggcgctaatggttggaagaaccgatcattagaaatcactgttgccgagggcgccgtgatgacggttgtgccgctgtcacggacctacgagcctccattctacgcactgcttgtctatcgacaggacgatggggctctgggactctgcacttttacattcgacctagagtgtatcgaaacgggagcagtacccctgatcgagatacccgcagtatcatctctcgcagcctttgcgattccgacacagaatcagacgaaactgacagccgataacgttacggacgtgtacgtcttgtatcaaactacccctacgtcgtccactaacagcagcgatttaaactgggcgtactggcaaggcaacgcctggcataccggtgcttcatctgatgccctcaaaggtgctgacattgggactgatattgcctgtttaactgagggtgtttggtccattatgatgagcagtgggtttgcgatgagtcggtgctactttatgactggaggtatgattaaggaggttcagtttaatggcacgggttggaacgagctgggctatttgccacttgactga

SEQ ID NO: 13960 - protein, 463 aa, Muscodor strobelii
  misc_feature: SGI Peptide ID NO. 564591
  misc_feature (22)..(462): NCBI GI: 85109141 Blast Desc: NCU08524 [Neurospora crassa OR74A] gi|28924392|gb|EAA33526.1| [Neurospora crassa OR74A]
  misc_feature (37)..(462): NCBI GI: 171691164 Blast Desc: protein product [Podospora anserina] gi|170945530|emb|CAP71642.1| protein product [Podospora anserina]
  misc_feature (25)..(374): NCBI GI: 116191329 Blast Desc: CHGG_05382 [Chaetomium globosum CBS 148.51] gi|88181295|gb|EAQ88763.1| CHGG_05382 [Chaetomium globosum CBS 148.51]
  misc_feature (51)..(462): NCBI GI: 39969585 Blast Desc: [Magnaporthe grisea 70-15] gi|145616449|ref|XP_001403033.1| MGG_14542 [Magnaporthe grisea 70-15] gi|145010137|gb|EDJ94793.1| [Magnaporthe grisea 70-15]
  misc_feature (227)..(462): NCBI GI: 171681379 Blast Desc: protein product [Podospora anserina] gi|170940648|emb|CAP65876.1| protein product [Podospora anserina]
  misc_feature (133)..(460): NCBI GI: 149209097 Blast Desc: MGCH7_ch7g41 [Magnaporthe grisea 70-15] gi|86195996|gb|EAQ70634.1| MGCH7_ch7g41 [Magnaporthe grisea 70-15]
  misc_feature (312)..(460): NCBI GI: 145614957 Blast Desc: [Magnaporthe grisea 70-15] gi|145021845|gb|EDK05922.1| [Magnaporthe grisea 70-15]
  misc_feature (117)..(446): NCBI GI: 145611894 Blast Desc: [Magnaporthe grisea 70-15] gi|145019117|gb|EDK03396.1| [Magnaporthe grisea 70-15]
MAKLTTSPDWKSYYPLTPRLPEQIPHEHTKGRHSLLPEVVPRQDEIDKSIIAGPTSSEDDSESHSGTIRPLSRSRKKIYIVAGVLTFLLIVAGAIVGGIFGARAKSTPPVDTPPVDAPPVDTPQDNSTTSNLIRANSSLTVTGYLQSETLNLRVFYQAKNGSLRFSDFRDDGSKWSSSFEVSRSGVRSDTAIGASTLIRSPDRNRQIELFFLNTSTKLSGDNFWDQQTLRGGHHDSIDGYPLPTAANSRVATYWPYVVVQSPNLTLQAVRWEGAEGANGWKNRSLEITVAEGAVMTVVPLSRTYEPPFYALLVYRQDDGALGLCTFTFDLECIETGAVPLIEIPAVSSLAAFAIPTQNQTKLTADNVTDVYVLYQTTPTSSTNSSDLNWAYWQGNAWHTGASSDALKGADIGTDIACLTEGVWSIMMSSGFAMSRCYFMTGGMIKEVQFNGTGWNELGYLPLD

SEQ ID NO: 13961 - DNA, 5800 bp, Muscodor strobelii
  misc_feature: SGI EST ID NO. CUFF.33379.0
  misc_feature: Variant of the nucleotide sequence at SEQ ID NO 13959
agaaatcatatattcggactcgtgggttagatatacctttatttcacggatccgaacatgtctccactgtattcaaacgcgcctgggggatctctaattcgtgcaacctgttggtttatttttggacgtcttgatctccgcatagcaacactggcccattccagctttagtcgattttgcttcgatatattagctacttttctgtatgaatcgttgctaagtcgctgagtacctcaatctttgtctattcttttttctcccttctctaagaataatgtctgatgcaaatgccacgacaccgcgagttttcattgcccgccatggcgagaccgaatggaccatttcaggccaatgcacaggcaatacagagaaactcatgacgccgaatggcgaccggcaagtagcaggaacgggcgaaatgctcgtcggacccggtaaacttattgatccatcaagctttgcgcatgtgttttgtagtccgcgcatgcgagctaggaatactctggaaaagcttctcggcgaggcaaccagagatcaattagagcatgagggcaagatcactttcaccaaggatataaccgagtgggattatggaacctacgagggcaagacaccaagccagattaaggctatgaggcaagagcaagggctcgataagtggaatatctggactgagggatgtccggatggagagactccccagcaggtccaggaacgtctcgacagactcatcaaacaggtagtcatgattcaagaaccgttcatgaaaggtggaccagcgccaaacatcttggtagttgctcatggccatatactgcgagctttcactaaaagatggctgaaatacccaatggactttgactttaccatgatgatggagccgggcgcaattggcaccttaagttatgcgcatcacagtgtcaatgagcctgcgattctcgtggggatgggatttccaattccagcaaagacagttggctagccactctatataccatactaccactggtgaccactgtcgggtgcatccgacactcttttgtagcgtggctcagtggtatgttctagtaagaccaccaagacgatcaatctaagccctttcgtcatcgcgaccgcgatctgtctctctgtgtatttatgtaggactcgagttggactgaaaatgcggtagtggttctaggttggtagtctacgagtcagaagttatgcaggataattaaatcgcgtcgtatattaccgacaggacctcgaaggcgcacaatcaatatcaaactcagttcatctcactccccagccatgctcaagtaggccagtagcctcttcaagagttaaaccaacagtctcggggtatatccaccaaacagcaacccatccagctacgcagacaaacccgtagagtacaaaggtccaagttggagttaatgtgtccatcaatggtagaaatgtaaggccaacaatgaaattggaaagccagtttgtccccgtcgctactccgctccctaaagctcggacgtttagttggaaaagctcgctctgcatccaaggcacgtttccaagacccagtgcataagccgcaacgtagatcatgatatcaaccaagatgaaagcagcagcaagttggctaagttcgcctgcacgcttctcaataggcgtgaaccccgtagcatggaagccatacgcggtagcaagcaggccgaatgccatgaaaggaatcgagtataacaagatccgtcgtcgcccgattcgatcgatcagcagcaaggcaaatatcgtgaagacaaaattggtgacggcgacgctcagagacgtcaaggtaggtacggaaaagccaagagcaaggaatatcgtggctgagaagtacatcaaggagttctgtgagaatccgttgttagcaccattttcgcgtgtctcaaattgctacgctatacgtacaaacccacagagctgttgaagaccttggagaagacacgcaatagtcagcgccctacgatttttaggcactgtcaatagttcgtgccaacctataaaccaattgtgggagttctttccgttgtgaccgcggagatttagcttgtcttcctcttcttggacttcaatttctatatctttcaaggtattgtcggccatgaggagagcaattggatcggagccgcatgttttcatgatgacaccgcgtgcctcgacttgtctcttcgctttgactaaccagcgcggtgtctctggcatgaaaaacaaaagcacgaactggagcaccgcgggcacggcaccaaggccaaccatcagtctccaccctaggtcgggatcaccatgttcggcaaatgtccagcctattatatacgcgattacttgaccaaaagtaatagacaggacattcattgtgacgaccattccgcgatgagccgccggcgcaagctcggcgagatagagcggagtgacgaaactcgcagcgcccactgccagaccgaccactgatcggccaatgaccatcatcgcaacattaggactgaggccctgaatcaacgcgccaaacacgaacagaatatcagcaagtagtataacaggcttacggccatatcggtcggcaagaacggatgaaaaaggcgacgcgataagcgcaaagagcgaggttgaagaggttatgatggatttatcgagggatgttagctcgcggcccgaaagcgatgtgccaattgacacaagtgttgcagatatcactcctgtgtcatctatagggcttgggtcagttgcggaagatgcatttgaggtgaaggcagtacttgcagccaaataaaagaccggagatacccgcagatagggtcaataaccagacaaatagcccaagacgctgatgttgggttaaatcgtcaacgggtaacggcgccgtcgcatcgtctgggatggagtcggtgtcttcatcgtgttccggccgtgataacaacggtgcctcatcctgattctgtcccgccatgcctcccggccgccttcccggataaggctctaaggatatcggtcgctgtatgtttggaatagtcggacgtcaccctttgccgaatacattagagtccggtggtgatacaatgaggacgaggtctacacaagcttcgtgctactggacggcgatcagtacactggtgggggtccctgcatctggtttcggaaagctgccgattggctattgtcgtcgagtctggacctcgcgacgcccctgtgaggagagcttacccggtgatttgaggacaggctgcggcggatcaccaaccaactacatagtacctagaatgacgacagaaagcctcctatcaggatcgtccaggatggcggcgctacgcaaactgcaggaacagcgagggcagctcattgcgagatttcagcagggggtgttcttacaattacttcgatgctcgttcaattccgcagacagtcggtatgtctaaggctgaccgtaagttcagctgttcagaaactgtttttttcctacagtcataccaacatatcctttggtttagtgtatatttacgctcctatttaggccatatgccatttttgtcgtcgatacgtcaacgtatacagatctgtatagacctgtgtagaactgattaggtccgattaggtctatagcaattggtacgaacctttatgacaaatgtttttgaaaatagaccgtagcttttattaattttacaagtgttcaccgaagatacaaataccttgcacgtgggggcagtcataataattaaaattgcgattttgggcagttgaccttatggccaaccgtagtatctctcatgttgcatggccgccaattctcagacccaaatatcgtgcaacctgacatgatcgagcactgagttcaacatatagtggtggcgcagcacgatcagtagaaaattatatggcactcaatctctcgcgctcacgggaatgtgctcagcgatccttttatatacctccagtcacttgccgttcgtcgagtacactgataagatattatagtaccgatgatttgataatgcgaagaaaagacatatgtgttaaatcatgacgcaaagtaatcgagttattcgccagctcctaagtgacagacttgaaagatcgcaagacaataatataatccactccagcgccagcaatggcgaaactgacgaccagcccggactggaagtcgtattatccactgaccccgaggttactgcgtcagctggtccagaggtctcttttattgtgtcgccttcacgaggagactctatcagactcccagagcagattccccacgagcacacgaaagggaggcattcacttctacccgaagtcgtccctagacaagacgagattgataagtcgatcatagctggacccacaagctcagaggacgactccgaatcacactcaggaaccatacgacccctttcaaggtcccgtaaaaaaatctacatagttgccggcgtgcttacattcctacttatagtagccggcgcaattgttggtggaatctttggcgcgcgagccaaaagcactccgcccgttgacactccacccgttgacgctccgcccgttgacacgccgcaagacaactcgacaacctcgaatcttattcgtgcgaactcgagtctaaccgtcacaggatatctacaaagcgaaacactcaatctacgtgttttctaccaggctaagaatggtagcctgcggttctcggacttccgggacgacgggagtaaatggagctcgtcgttcgaggtcagtagaagtggcgttcgatccgatacagcgattggtgcgtcgacactcatccggagtccagacaggaataggcagattgagctcttcttcctaaacacatcgaccaagttgagcggagataatttctgggaccagcagacgcttcgaggtggacaccatgattcaattgacgggtatccgctcccgacagcggccaattcgcgcgtcgccacgtactggccatacgtcgtggtccagagcccaaacctcactttgcaggcggtccgatgggaaggcgccgagggcgctaatggttggaagaaccgatcattagaaatcactgttgccgagggcgccgtgatgacggttgtgccgctgtcacggacctacgagcctccattctacgcactgcttgtctatcgacaggacgatggggctctgggactctgcacttttacattcgacctagagtgtatcgaaacgggagcagtacccctgatcgagatacccgcagtatcatctctcgcagcctttgcgattccgacacagaatcagacgaaactgacagccgataacgttacggacgtgtacgtcttgtatcaaactacccctacgtcgtccactaacagcagcgatttaaactgggcgtactggcaaggcaacgcctggcataccggtgcttcatctgatgccctcaaaggtgctgacattgggactgatattgcctgtttaactgagggtgtttggtccattatgatgagcagtgggtttgcgatgagtcggtgctactttatgactggaggtatgattaaggaggttcagtttaatggcacgggttggaacgagctgggctatttgccacttgactgagagagaacgaaccccgcgcctatttgtatccttgagtatcatgtattctctatttgtttcttctaatatcgcctggcgctcggcgtttctgctattgtgcgggacatattcgagatgccattccgcagtatctagcaactctaaccttacaccaactcctctagtagttatgtacttgttcatggcgaatccagatgcaattatgagttacaag

SEQ ID NO: 13962 - DNA, 1575 bp, Muscodor strobelii
  misc_feature: SGI cDNA ID NO. 564592
  misc_feature: Encodes the peptide sequence at SEQ ID NO 13963
atggcgggacagaatcaggatgaggcaccgttgttatcacggccggaacacgatgaagacaccgactccatcccagacgatgcgacggcgccgttacccgttgacgatttaacccaacatcagcgtcttgggctatttgtctggttattgaccctatctgcgggtatctccggtcttttatttggctatgacacaggagtgatatctgcaacacttgtgtcaattggcacatcgctttcgggccgcgagctaacatccctcgataaatccatcataacctcttcaacctcgctctttgcgcttatcgcgtcgcctttttcatccgttcttgccgaccgatatggccgtaagcctgttatactacttgctgatattctgttcgtgtttggcgcgttgattcagggcctcagtcctaatgttgcgatgatggtcattggccgatcagtggtcggtctggcagtgggcgctgcgagtttcgtcactccgctctatctcgccgagcttgcgccggcggctcatcgcggaatggtcgtcacaatgaatgtcctgtctattacttttggtcaagtaatcgcgtatataataggctggacatttgccgaacatggtgatcccgacctagggtggagactgatggttggccttggtgccgtgcccgcggtgctccagttcgtgcttttgtttttcatgccagagacaccgcgctggttagtcaaagcgaagagacaagtcgaggcacgcggtgtcatcatgaaaacatgcggctccgatccaattgctctcctcatggccgacaataccttgaaagatatagaaattgaagtccaagaagaggaagacaagctaaatctccgcggtcacaacggaaagaactcccacaattggtttataggttggcacgaactattgacagtgcctaaaaatcgtagggcgctgactattgcgtgtcttctccaaggtcttcaacagctctgtgggtttaactccttgatgtacttctcagccacgatattccttgctcttggcttttccgtacctaccttgacgtctctgagcgtcgccgtcaccaattttgtcttcacgatatttgccttgctgctgatcgatcgaatcgggcgacgacggatcttgttatactcgattcctttcatggcattcggcctgcttgctaccgcgtatggcttccatgctacggggttcacgcctattgagaagcgtgcaggcgaacttagccaacttgctgctgctttcatcttggttgatatcatgatctacgttgcggcttatgcactgggtcttggaaacgtgccttggatgcagagcgagcttttccaactaaacgtccgagctttagggagcggagtagcgacggggacaaactggctttccaatttcattgttggccttacatttctaccattgatggacacattaactccaacttggacctttgtactctacgggtttgtctgcgtagctggatgggttgctgtttggtggatataccccgagactgttggtttaactcttgaagaggctactggcctacttgagcatggctggggagtgagatga

SEQ ID NO: 13963 - protein, 524 aa, Muscodor strobelii
  misc_feature: SGI Peptide ID NO. 564592
  misc_feature (54)..(468): Pfam Id: PF07690 Pfam Desc: Major Facilitator Superfamily
  misc_feature (50)..(517): Pfam Id: PF00083 Pfam Desc: Sugar (and other) transporter
  misc_feature (54)..(235): Pfam Id: PF07690 Pfam Desc: Major Facilitator Superfamily
  misc_feature (5)..(524): NCBI GI: 28881193 Blast Desc: related to myo-inositol transporter [Neurospora crassa]
  misc_feature (64)..(524): NCBI GI: 46117054 Blast Desc: FG04369.1 [Gibberella zeae PH-1]
  misc_feature (5)..(524): NCBI GI: 256729246 Blast Desc: [Nectria haematococca mpVI 77-13-4]
  misc_feature (46)..(524): NCBI GI: 171689192 Blast Desc: protein product [Podospora anserina] gi|170944558|emb|CAP70669.1| protein product [Podospora anserina]
  misc_feature (44)..(524): NCBI GI: 154298144 Blast Desc: BC1G_12037 [Botryotinia fuckeliana B05.10] gi|150858223|gb|EDN33415.1| BC1G_12037 [Botryotinia fuckeliana B05.10]
  misc_feature (8)..(519): NCBI GI: 156044598 Blast Desc: SS1G_10403 [Sclerotinia sclerotiorum 1980] gi|154694791|gb|EDN94529.1| SS1G_10403 [Sclerotinia sclerotiorum 1980]
  misc_feature (16)..(524): NCBI GI: 212528670 Blast Desc: MFS myo-inositol transporter, [Penicillium marneffei ATCC 18224] gi|210073890|gb|EEA27977.1| MFS myo-inositol transporter, [Penicillium marneffei ATCC 18224]
  misc_feature (4)..(524): NCBI GI: 121706474 Blast Desc: MFS myo-inositol transporter, [Aspergillus clavatus NRRL 1] gi|119399647|gb|EAW10073.1| MFS myo-inositol transporter, [Aspergillus clavatus NRRL 1]
  misc_feature (4)..(523): NCBI GI: 255943619 Blast Desc: Pc20g00130 [Penicillium chrysogenum Wisconsin 54-1255] gi|211587312|emb|CAP85342.1| Pc20g00130 [Penicillium chrysogenum Wisconsin 54-1255]
  misc_feature (3)..(524): NCBI GI: 70994878 Blast Desc: MFS myo-inositol transporter [Aspergillus fumigatus Af293] gi|66849850|gb|EAL90178.1| MFS myo-inositol transporter, [Aspergillus fumigatus Af293] gi|159124870|gb|EDP49987.1| MFS
MAGQNQDEAPLLSRPEHDEDTDSIPDDATAPLPVDDLTQHQRLGLFVWLLTLSAGISGLLFGYDTGVISATLVSIGTSLSGRELTSLDKSIITSSTSLFALIASPFSSVLADRYGRKPVILLADILFVFGALIQGLSPNVAMMVIGRSVVGLAVGAASFVTPLYLAELAPAAHRGMVVTMNVLSITFGQVIAYIIGWTFAEHGDPDLGWRLMVGLGAVPAVLQFVLLFFMPETPRWLVKAKRQVEARGVIMKTCGSDPIALLMADNTLKDIEIEVQEEEDKLNLRGHNGKNSHNWFIGWHELLTVPKNRRALTIACLLQGLQQLCGFNSLMYFSATIFLALGFSVPTLTSLSVAVTNFVFTIFALLLIDRIGRRRILLYSIPFMAFGLLATAYGFHATGFTPIEKRAGELSQLAAAFILVDIMIYVAAYALGLGNVPWMQSELFQLNVRALGSGVATGTNWLSNFIVGLTFLPLMDTLTPTWTFVLYGFVCVAGWVAVWWIYPETVGLTLEEATGLLEHGWGVR

SEQ ID NO: 13964 - DNA, 4989 bp, Muscodor strobelii
  misc_feature: SGI EST ID NO. CUFF.33378.1
  misc_feature: Variant of the nucleotide sequence at SEQ ID NO 13962
cgaatgtaaaagtgcagagtcccagagccccatcgtcctgtcgatagacaagcagtgcgtagaatggaggctcgtaggtccgtgacagcggcacaaccgtcatcacggcgccctcggcaacagtgatttctaatgatcggttcttccaaccattagcgccctcggcgccttcccatcggaccgcctgcaaagtgaggtttgggctctggaccacgacgtatggccagtacgtggcgacgcgcgaattggccgctgtcgggagcggatacccgtcaattgaatcatggtgtccacctcgaagcgtctgctggtcccagaaattatctccgctcaacttggtcgatgtgtttaggaagaagagctcaatctgcctctgaattggcaacattctcgcacgtcagctcaaaaatcatcaatgttaggttacatcacgtagtcttctatatgagagaaaaggtggctcacattcctgtctggactccggatgagtgtcgacgcaccaatcgctgtatcggatcgaacgccacttctactgacctcgaacgacgagctccatttactcccgtcgtcccggaagtccgagaaccgcaggctaccattcttagcctggtagaaaacacgtagattgagtgtttcgctttgtagatatcctgtgacggttagactcgagttcgcacgaataagattcgaggttgtcgagttgtcttgcggcgtgtcaacgggcggagcgtcaacgggtggagtgtcaacgggcggagtgcttttggctcgcgcgccaaagattccaccaacaattgcgccggctactataagtaggaatgtaagcacgccggcaactatgtagatttttttacgggaccttgaaaggggtcgtatggttcctgagtgtgattcggagtcgtcctctgagcttgtgggtccagctatgatcgacttatcaatctcgtcttgtctagggacgacttcgggtagaagtgaatgcctccctttcgtgtgctcgtggggaatctgctctgggagtctgatagagtctcctcgtgaaggcgacacaataaaagagacctctggaccagctgacgcagtaacctcggggtcagtggataatacgacttccagtccgggctggtcgtcagtttcgccattgctggcgctggagtggattatattattgtcttgcgatctttcaagtctgtcacttaggagctggcgaataactcgattactttgcgtcatgatttaacacatatgtcttttcttcgcattatcaaatcatcggtactataatatcttatcagtgtactcgacgaacggcaagtgactggaggtatataaaaggatcgctgagcacattcccgtgagcgcgagagattgagtgccatataattttctactgatcgtgctgcgccaccactatatgttgaactcagtgctcgatcatgtcaggttgcacgatatttgggtctgagaattggcggccatgcaacatgagagatactacggttggccataaggtcaactgcccaaaatcgcaattttaattattatgactgcccccacgtgcaaggtatttgtatcttcggtgaacacttgtaaaattaataaaagctacggtctattttcaaaaacatttgtcataaaggttcgtaccaattgctatagacctaatcggacctaatcagttctacacaggtctatacagatctgtatacgttgacgtatcgacgacaaaaatggcatatggcctaaataggagcgtaaatatacactaaaccaaaggatatgttggtatgactgtaggaaaaaaacagtttctgaacagctgaacttacggtcagccttagacataccgactgtctgcggaattgaacgagcatcgaagtaattgtaagaacaccccctgctgaaatctcgcaatgagctgccctcgctgttcctgcagtttgcgtagcgccgccatcctggacgatcctgataggaggctttctgtcgtcattctaggtactatgtagttggttggtgatccgccgcagcctgtcctcaaatcaccgggtaagctctcctcacaggggcgtcgcgaggtccagactcgacgacaatagccaatcggcagctttccgaaaccagatgcagggacccccaccagtgtactgatcgccgtccagtagcacgaagcttgtgtagacctcgtcctcattgtatcaccaccggactctaatgtattcggcaaagggtgacgtccgactattccaaacatacagcgaccgatatccttagagccttatccgggaaggcggccgggaggcatggcgggacagaatcaggatgaggcaccgttgttatcacggccggaacacgatgaagacaccgactccatcccagacgatgcgacggcgccgttacccgttgacgatttaacccaacatcagcgtcttgggctatttgtctggttattgaccctatctgcgggtatctccggtcttttatttggctatgacacaggagtgatatctgcaacacttgtgtcaattggcacatcgctttcgggccgcgagctaacatccctcgataaatccatcataacctcttcaacctcgctctttgcgcttatcgcgtcgcctttttcatccgttcttgccgaccgatatggccgtaagcctgttatactacttgctgatattctgttcgtgtttggcgcgttgattcagggcctcagtcctaatgttgcgatgatggtcattggccgatcagtggtcggtctggcagtgggcgctgcgagtttcgtcactccgctctatctcgccgagcttgcgccggcggctcatcgcggaatggtcgtcacaatgaatgtcctgtctattacttttggtcaagtaatcgcgtatataataggctggacatttgccgaacatggtgatcccgacctagggtggagactgatggttggccttggtgccgtgcccgcggtgctccagttcgtgcttttgtttttcatgccagagacaccgcgctggttagtcaaagcgaagagacaagtcgaggcacgcggtgtcatcatgaaaacatgcggctccgatccaattgctctcctcatggccgacaataccttgaaagatatagaaattgaagtccaagaagaggaagacaagctaaatctccgcggtcacaacggaaagaactcccacaattggtttataggttggcacgaactattgacagtgcctaaaaatcgtagggcgctgactattgcgtgtcttctccaaggtcttcaacagctctgtgggtttaactccttgatgtacttctcagccacgatattccttgctcttggcttttccgtacctaccttgacgtctctgagcgtcgccgtcaccaattttgtcttcacgatatttgccttgctgctgatcgatcgaatcgggcgacgacggatcttgttatactcgattcctttcatggcattcggcctgcttgctaccgcgtatggcttccatgctacggggttcacgcctattgagaagcgtgcaggcgaacttagccaacttgctgctgctttcatcttggttgatatcatgatctacgttgcggcttatgcactgggtcttggaaacgtgccttggatgcagagcgagcttttccaactaaacgtccgagctttagggagcggagtagcgacggggacaaactggctttccaatttcattgttggccttacatttctaccattgatggacacattaactccaacttggacctttgtactctacgggtttgtctgcgtagctggatgggttgctgtttggtggatataccccgagactgttggtttaactcttgaagaggctactggcctacttgagcatggctggggagtgagatgaactgagtttgatattgattgtgcgccttcgaggtcctgtcggtaatatacgacgcgatttaattatcctgcataacttctgactcgtagactaccaacctagaaccactaccgcattttcagtccaactcgagtcctacataaatacacagagagacagatcgcggtcgcgatgacgaaagggcttagattgatcgtcttggtggtcttactagaacataccactgagccacgctacaaaagagtgtcggatgcacccgacagtggtcaccagtggtagtatggtatatagagtggctagccaactgtctttgctggaattggaaatcccatccccacgagaatcgcaggctcattgacactgtgatgcgcataacttaaggtgccaattgcgcccggctccatcatcatggtaaagtcaaagtccattgggtatttcagccatcttttagtgaaagctcgcagtatatggccatgagcaacctgttcgaaagaaaatgaatcagcattttcatgtgtgactcgtgcctttcgcgtagcgacgctatatgttccacaacttactaccaagatgtttggcgctggtccacctttcatgaacggttcttgaatcatgactacctgtttgatgagtctgtcgagacgttcctggacctgctggggagtcctggcgatgaacgattgttagtcagttcctttccaactgcctctcggtcctgatatctaagctcgttatggctgatcccatagtaaaactcactctccatccggacatccctcagtccagatattccacttatcgagcccttgctcttgcctcatagccttaatctggcttggtgtcttgccctcgtaggttccataatcccactcggttatatccttggtgaaagtgatcttgccctcatgctctaattgatctctggttgcctcgccgagaagcttttccagagtattcctagctcgcatgcgcggactacaaaacacatgcgcaaagcttgatggatcaataagtttaccgggtccgacgagcatttcgcccgttcctgctacttgccggtcgccattcggcgtcatgagtttctctgtattgcctgtgcattggcctgaaa

SEQ ID NO: 13965 - DNA, 708 bp, Muscodor strobelii
  misc_feature: SGI cDNA ID NO. 564593
  misc_feature: Encodes the peptide sequence at SEQ ID NO 13966
atgtctgatgcaaatgccacgacaccgcgagttttcattgcccgccatggcgagaccgaatggaccatttcaggccaatgcacaggcaatacagagaaactcatgacgccgaatggcgaccggcaagtagcaggaacgggcgaaatgctcgtcggacccggtaaacttattgatccatcaagctttgcgcatgtgttttgtagtccgcgcatgcgagctaggaatactctggaaaagcttctcggcgaggcaaccagagatcaattagagcatgagggcaagatcactttcaccaaggatataaccgagtgggattatggaacctacgagggcaagacaccaagccagattaaggctatgaggcaagagcaagggctcgataagtggaatatctggactgagggatgtccggatggagagactccccagcaggtccaggaacgtctcgacagactcatcaaacaggtagtcatgattcaagaaccgttcatgaaaggtggaccagcgccaaacatcttggtagttgctcatggccatatactgcgagctttcactaaaagatggctgaaatacccaatggactttgactttaccatgatgatggagccgggcgcaattggcaccttaagttatgcgcatcacagtgtcaatgagcctgcgattctcgtggggatgggatttccaattccagcaaagacagttggctag

SEQ ID NO: 13966 - protein, 235 aa, Muscodor strobelii
  misc_feature: SGI Peptide ID NO. 564593
  misc_feature (10)..(184): Pfam Id: PF00300 Pfam Desc: Phosphoglycerate mutase family
  misc_feature (1)..(229): NCBI GI: 115388751 Blast Desc: conserved [Aspergillus terreus NIH2624] gi|114195965|gb|EAU37665.1| conserved [Aspergillus terreus NIH2624]
  misc_feature (1)..(230): NCBI GI: 212540220 Blast Desc: phosphoglycerate mutase, [Penicillium marneffei ATCC 18224] gi|210067564|gb|EEA21656.1| phosphoglycerate mutase, [Penicillium marneffei ATCC 18224]
  misc_feature (1)..(229): NCBI GI: 238492389 Blast Desc: phosphoglycerate mutase, [Aspergillus flavus NRRL3357] gi|220695925|gb|EED52267.1| phosphoglycerate mutase, [Aspergillus flavus NRRL3357]
  misc_feature (1)..(229): NCBI GI: 255942807 Blast Desc: Pc18g03320 [Penicillium chrysogenum Wisconsin 54-1255] gi|211586905|emb|CAP94556.1| Pc18g03320 [Penicillium chrysogenum Wisconsin 54-1255]
  misc_feature (1)..(223): NCBI GI: 169782742 Blast Desc: [Aspergillus oryzae RIB40] gi|83774577|dbj|BAE64700.1| protein product [Aspergillus oryzae]
  misc_feature (1)..(230): NCBI GI: 242802572 Blast Desc: phosphoglycerate mutase, [Talaromyces stipitatus ATCC 10500] gi|218717343|gb|EED16764.1| phosphoglycerate mutase, [Talaromyces stipitatus ATCC 10500]
  misc_feature (5)..(228): NCBI GI: 169595622 Blast Desc: SNOG_00555 [Phaeosphaeria nodorum SN15] gi|160701129|gb|EAT92050.2| SNOG_00555 [Phaeosphaeria nodorum SN15]
  misc_feature (1)..(209): NCBI GI: 212540222 Blast Desc: phosphoglycerate mutase, [Penicillium marneffei ATCC 18224] gi|210067565|gb|EEA21657.1| phosphoglycerate mutase, [Penicillium marneffei ATCC 18224]
  misc_feature (17)..(225): NCBI GI: 156043635 Blast Desc: SS1G_10821 [Sclerotinia sclerotiorum 1980] gi|154695208|gb|EDN94946.1| SS1G_10821 [Sclerotinia sclerotiorum 1980]
  misc_feature (17)..(225): NCBI GI: 154316839 Blast Desc: BC1G_03837 [Botryotinia fuckeliana B05.10] gi|150845449|gb|EDN20642.1| BC1G_03837 [Botryotinia fuckeliana B05.10]
  misc_feature (9)..(184): SWISSPROT Homolog: EC 5.4.2.1 Phosphoglycerate mutase
MSDANATTPRVFIARHGETEWTISGQCTGNTEKLMTPNGDRQVAGTGEMLVGPGKLIDPSSFAHVFCSPRMRARNTLEKLLGEATRDQLEHEGKITFTKDITEWDYGTYEGKTPSQIKAMRQEQGLDKWNIWTEGCPDGETPQQVQERLDRLIKQVVMIQEPFMKGGPAPNILVVAHGHILRAFTKRWLKYPMDFDFTMMMEPGAIGTLSYAHHSVNEPAILVGMGFPIPAKTVG

SEQ ID NO: 13967 - DNA, 5800 bp, Muscodor strobelii; identical to SEQ ID NO: 13961
  misc_feature: SGI EST ID NO. CUFF.33379.0
  misc_feature: Variant of the nucleotide sequence at SEQ ID NO 13965

SEQ ID NO: 13968 - DNA, 1710 bp, Muscodor strobelii
  misc_feature: SGI cDNA ID NO. 564594
  misc_feature: Reduced expression when VOC is produced
  misc_feature: Encodes the peptide sequence at SEQ ID NO 13969
atgagcagagttgcaacgtctaatgatctggagagacacccaacggcattgagccgtatccaaacggcacgaagccagcacacagccaccgttggacgcagtcttaagagcagagagtccaggaaaccattgcccgctttcggcgccggcaagccataccctccactactccccgatcaagaggagtatgtcgtcgaatttgacggtccagatgacccctaccacgctcagaattggactactaagaagaaaatgatgacggccgctatgctcggttatactacagtcgtttctgcgtttacgtcaagtatcttctccgctggcacgagagcagtagctaaggagttcggtgtgagcgctgaagtcggaatcttgggtgtgtcgctctacgtgctaggttttgcgacaggtccaattttctgggcaccattgtcagagttgaagggtcgccgtctgccaattgttatcgctatgttcggattttccgtcttcacaattgcttgtgctacggccaaggacttgcagacgctcctgatatctcgtttctttgctggcttcttcggcgcgtctcccctagccgtcgttgctgctgtcttctcggatatgttttccaatgccacgcgaggtgttgccatcactgtcttctctatggccgtcttcaccggccctctacttgccccattcattggtggcttcattgttgaaagccaccttggttggagatggaccatgtacattacagccatcctgggcttcgttgccttcggtcttgacctgtttttccttgaggaaacctatcctcccgttattcttgtccagaaagctagcgaaatacgacgacgcaccggaaattggggtattcatgccaagcaggaagaaatcgaggttgatttcggagagcttatcgagaagaacttctctcgaccaatgcgcctactattcctcgagcccattgtcaccctcctgtctctttacatggctttcatctatggtctgctttacctgttcttgactgcctatcccctcgtcttccagggtgtgcaccattttagcagtggtatctcgggccttactttcttcggtatgattattggcgaattgattgccggttttgcagtgctggctacgcagcctgcttaccaacgaaaactggctgcaaacaatggtatccctattccagagtggcgtctgcccatcatcatcgtgggtggtgttgctttcaccggaggtatcttctggtttggctggtctggataccaggagagcacccattgggccgtccccgccgctagtggtctcctgactggctttggcttgctatctatcttcctccaggctttgaactatctcgtcgatgcctatcttatgtttgccgcctccgccattgctggcaatacgttcttacggtctctcttcggagccgttttccctttgtttgcgacctatttattcaacggccttggaatcaactatgcttcgacactcctaggagttatcgccgccgtcttagtacccatccctgtacttttctggaagtatggtgccaagctccgacaaaagagccgatacgcccctacggcattgaacaataacggtctgaccaagcaagcgagcagcaactctgcacgcgatggccctatcgctgaggatcacactgatcatgcggcaacgtcagtcgcccctcgtgcgagcgataatgagaaggcatag

SEQ ID NO: 13969 - protein, 569 aa, Muscodor strobelii
  misc_feature: SGI Peptide ID NO. 564594
  misc_feature (90)..(477): Pfam Id: PF07690 Pfam Desc: Major Facilitator Superfamily
  misc_feature (8)..(526): NCBI GI: 189189446 Blast Desc: benomyl/methotrexate resistance protein [Pyrenophora tritici-repentis Pt-1C-BFP] gi|187972668|gb|EDU40167.1| benomyl/methotrexate resistance protein [Pyrenophora Pt-1C-BFP]
  misc_feature (1)..(569): NCBI GI: 116204637 Blast Desc: CHGG_10202 [Chaetomium globosum CBS 148.51] gi|88176330|gb|EAQ83798.1| CHGG_10202 [Chaetomium globosum CBS 148.51]
  misc_feature (1)..(523): NCBI GI: 46117056 Blast Desc: FG04370.1 [Gibberella zeae PH-1]
  misc_feature (1)..(526): NCBI GI: 256729247 Blast Desc: [Nectria haematococca mpVI 77-13-4]
  misc_feature (1)..(565): NCBI GI: 85110219 Blast Desc: NCU06847 [Neurospora crassa OR74A] gi|28881194|emb|CAD70375.1| fluconazole resistance protein [Neurospora crassa] gi|28924997|gb|EAA34085.1| NCU06847 crassa
  misc_feature (1)..(569): NCBI GI: 171689194 Blast Desc: protein product [Podospora anserina] gi|170944559|emb|CAP70670.1| protein product [Podospora anserina]
  misc_feature (1)..(526): NCBI GI: 212528676 Blast Desc: MFS multidrug transporter, [Penicillium marneffei ATCC 18224] gi|210073893|gb|EEA27980.1| MFS multidrug transporter, [Penicillium marneffei ATCC 18224]
  misc_feature (1)..(541): NCBI GI: 28629050 Blast Desc: AF487263_1 major facilitator superfamily [Leptosphaeria maculans]
  misc_feature (1)..(526): NCBI GI: 242765765 Blast Desc: MFS multidrug transporter, [Talaromyces stipitatus ATCC 10500] gi|218724236|gb|EED23653.1| MFS multidrug transporter, [Talaromyces stipitatus ATCC 10500]
  misc_feature (1)..(561): NCBI GI: 145608322 Blast Desc: MGG_03205 [Magnaporthe grisea 70-15] gi|145015807|gb|EDK00297.1| MGG_03205 [Magnaporthe grisea 70-15]
  misc_feature: Useful for introducing or modulating the production of volatile compounds
MSRVATSNDLERHPTALSRIQTARSQHTATVGRSLKSRESRKPLPAFGAGKPYPPLLPDQEEYVVEFDGPDDPYHAQNWTTKKKMMTAAMLGYTTVVSAFTSSIFSAGTRAVAKEFGVSAEVGILGVSLYVLGFATGPIFWAPLSELKGRRLPIVIAMFGFSVFTIACATAKDLQTLLISRFFAGFFGASPLAVVAAVFSDMFSNATRGVAITVFSMAVFTGPLLAPFIGGFIVESHLGWRWTMYITAILGFVAFGLDLFFLEETYPPVILVQKASEIRRRTGNWGIHAKQEEIEVDFGELIEKNFSRPMRLLFLEPIVTLLSLYMAFIYGLLYLFLTAYPLVFQGVHHFSSGISGLTFFGMIIGELIAGFAVLATQPAYQRKLAANNGIPIPEWRLPIIIVGGVAFTGGIFWFGWSGYQESTHWAVPAASGLLTGFGLLSIFLQALNYLVDAYLMFAASAIAGNTFLRSLFGAVFPLFATYLFNGLGINYASTLLGVIAAVLVPIPVLFWKYGAKLRQKSRYAPTALNNNGLTKQASSNSARDGPIAEDHTDHAATSVAPRASDNEKA

SEQ ID NO: 13970 - DNA, 2710 bp, Muscodor strobelii
  misc_feature: SGI EST ID NO. CUFF.33532.0
  misc_feature: Variant of the nucleotide sequence at SEQ ID NO 13968
ccgccgagggacgaaaaaatatgagtcgcgaagagccgaccctaattattaagtcctttagcctttgggcgttggcactttcccaggtcatttggatataaactctcatgacccctcctcgtgccatagctaaactcaatcttgtatctcaattcatctcatatatcatctcatagcttcaacttctacaataatatagacaagcatacacaccattgcatcgtataagcaactgtctagccacctatttgtcccaccattagagaactggagcatagttcacatcactaagacattgttcagctctgagacaacaccttcagtgcttctggcaatcttgacgacggattcggacaagctcactgcatagttcctagcagcaattgacaataagaaactttcacgcagcagaagaaacattatttgggagtcgacagcattatgccgggtctagacgaagtcgaacgcgagttaatgcgggcagaatcagatgccatgtcaggcttgtctggtcgggtagcatcacctacccacaggagagctagtaatgaggtagagcgagttatatcagcgtcgtcagtctcttcggcctctagcgaaagcgaacctcggcctgtcaacatgagcagagttgcaacgtctaatgatctggagagacacccaacggcattgagccgtatccaaacggcacgaagccagcacacagccaccgttggacgcagtcttaagagcagagagtccaggaaaccattgcccgctttcggcgccggcaagccataccctccactactccccgatcaagaggagtatgtcgtcgaatttgacggtccagatgacccctaccacgctcagaattggactactaagaagaaaatgatgacggccgctatgctcggttatactacagtcgtttctgcgtttacgtcaagtatcttctccgctggcacgagagcagtagctaaggagttcggtgtgagcgctgaagtcggaatcttgggtgtgtcgctctacgtgctaggttttgcgacaggtccaattttctgggcaccattgtcagagttgaagggtcgccgtctgccaattgttatcgctatgttcggattttccgtcttcacaattgcttgtgctacggccaaggacttgcagacgctcctgatatctcgtttctttgctggcttcttcggcgcgtctcccctagccgtcgttgctgctgtcttctcggatatgttttccaatgccacgcgaggtgttgccatcactgtcttctctatggccgtcttcaccggccctctacttgccccattcattggtggcttcattgttgaaagccaccttggttggagatggaccatgtacattacagccatcctgggcttcgttgccttcggtcttgacctgtttttccttgaggaaacctatcctcccgttattcttgtccagaaagctagcgaaatacgacgacgcaccggaaattggggtattcatgccaagcaggaagaaatcgaggttgatttcggagagcttatcgagaagaacttctctcgaccaatgcgcctactattcctcgagcccattgtcaccctcctgtctctttacatggctttcatctatggtctgctttacctgttcttgactgcctatcccctcgtcttccagggtgtgcaccattttagcagtggtatctcgggccttactttcttcggtatgattattggcgaattgattgccggttttgcagtgctggctacgcagcctgcttaccaacgaaaactggctgcaaacaatggtatccctattccagagtggcgtctgcccatcatcatcgtgggtggtgttgctttcaccggaggtatcttctggtttggctggtctggataccaggagagcacccattgggccgtccccgccgctagtggtctcctgactggctttggcttgctatctatcttcctccaggctttgaactatctcgtcgatgcctatcttatgtttgccgcctccgccattgctggcaatacgttcttacggtctctcttcggagccgttttccctttgtttgcgacctatttattcaacggccttggaatcaactatgcttcgacactcctaggagttatcgccgccgtcttagtacccatccctgtacttttctggaagtatggtgccaagctccgacaaaagagccgatacgcccctacggcattgaacaataacggtctgaccaagcaagcgagcagcaactctgcacgcgatggccctatcgctgaggatcacactgatcatgcggcaacgtcagtcgcccctcgtgcgagcgataatgagaaggcatagaatgcttcgcatgatatggatataaaggaagagagcacaatgtcagatttgcgacttgtgcgagtgagaggaaactgggattgcatatagacttatacccatggtatgggagcattagaaccggagtttcgtgagcgtgggcattagaaaatcatttatgagcaatctgatagagagcatgggctagcaaattattataataagttaatgaacatcgaacactatcattgatctttggaatatcatttgagtatcctgccaaaagtgtaacaaaccacaagtgattgcaacagttccaatgaaccattcagactttgaacaaatggaggcctagtctaacaactccgcacaaaaggcgatccactccaatgcatcccct

SEQ ID NO: 13971 - DNA, 471 bp, Muscodor strobelii
  misc_feature: SGI cDNA ID NO. 564595
  misc_feature: Encodes the peptide sequence at SEQ ID NO 13972
atggccgaggaaacgcccaagaccaatgggacgtatgaggcgggttgccattgcggatatatcaagttctcggtcacgctttcgcctccattagaggagtatgaggtcttgaactgtaattgctcggcctgttcgagatttgggtatttacttacttaccccgaggcaaaagacgtagtctggcataacaacgcgcgtgagcgctgcggaagctaccgcttcaacacgaggaagaaagaccagatgttctgcccgaaatgtggtgctagcatcggtattgatttcaagggagttacgaaacctgggaagccacatgttcatggtattagtgctaggacattttacaatgtcgacctcgataagttgaaatacaaaaagctggatggtgtcaaggtggtcccgccggagaaggactttgcaggtcatgtttgggatgaggagaaacacgagatgaagcaggatatgaactag

SEQ ID NO: 13972 - protein, 156 aa, Muscodor strobelii
  misc_feature: SGI Peptide ID NO. 564595
  misc_feature (1)..(141): NCBI GI: 256729259 Blast Desc: NECHADRAFT_95742 [Nectria haematococca mpVI 77-13-4]
  misc_feature (1)..(141): NCBI GI: 46117070 Blast Desc: FG04377.1 [Gibberella zeae PH-1]
  misc_feature (7)..(147): NCBI GI: 145608340 Blast Desc: MGG_12759 [Magnaporthe grisea 70-15] gi|145015822|gb|EDK00312.1| MGG_12759 [Magnaporthe grisea 70-15]
  misc_feature (3)..(152): NCBI GI: 116181052 Blast Desc: CHGG_01154 [Chaetomium globosum CBS 148.51] gi|88185451|gb|EAQ92919.1| CHGG_01154 [Chaetomium globosum CBS 148.51]
  misc_feature (4)..(144): NCBI GI: 171689188 Blast Desc: protein product [Podospora anserina] gi|170944556|emb|CAP70667.1| protein product [Podospora anserina]
  misc_feature (1)..(133): NCBI GI: 156036362 Blast Desc: [Sclerotinia sclerotiorum 1980] gi|154698275|gb|EDN98013.1| [Sclerotinia sclerotiorum 1980]
  misc_feature (5)..(98): NCBI GI: 169606826 Blast Desc: SNOG_06463 [Phaeosphaeria nodorum SN15] gi|111065174|gb|EAT86294.1| SNOG_06463 [Phaeosphaeria nodorum SN15]
  misc_feature (1)..(134): NCBI GI: 255941890 Blast Desc: Pc16g14160 [Penicillium chrysogenum Wisconsin 54-1255] gi|211586337|emb|CAP94086.1| Pc16g14160 [Penicillium chrysogenum Wisconsin 54-1255]
  misc_feature (11)..(129): NCBI GI: 238841194 Blast Desc: DUF636 domain-containing protein [Microsporum canis CBS 113480]
  misc_feature (11)..(96): NCBI GI: 169780340 Blast Desc: [Aspergillus oryzae RIB40] gi|83773374|dbj|BAE63501.1| protein product [Aspergillus oryzae]
MAEETPKTNGTYEAGCHCGYIKFSVTLSPPLEEYEVLNCNCSACSRFGYLLTYPEAKDVVWHNNARERCGSYRFNTRKKDQMFCPKCGASIGIDFKGVTKPGKPHVHGISARTFYNVDLDKLKYKKLDGVKVVPPEKDFAGHVWDEEKHEMKQDMN

SEQ ID NO: 13973 - DNA, 2967 bp, Muscodor strobelii
  misc_feature: SGI EST ID NO. CUFF.33636.0
  misc_feature: Variant of the nucleotide sequence at SEQ ID NO 13971
caccgtacaactttgttgcatctaaccaagtatttatatacttccagttgcttgctttcatctggctaattccaacggcaagtctggtctggattcgcatatcaagcgttaagaatggccgaggaaacgcccaagaccaatgggacgtatgaggcgggttgccattgcggatatatcaagttctcggtcacgctttcgcctccattagaggagtatgaggtcttgaactgtaattgctcggcctgttcgagatttgggtatttacttacttgtgagtttgctgcgttcctgtttgatatgaggtttgggtttggaagtgaggcctgcggattgcttgtagcagagtgaatgagtgagtgagtgacggtgtgagtgggagcagaggggatggatggtgcttatatattgaagaaagagacgtgcataggacgtggcgagatgagctatgcattcagaaccgccatggacagagttctggtttcaatatgctgaccagtggatagaccccgaggcaaaagacgtagtctggcataacaacgcgcgtgagcgctgcggaagctaccgcttcaacacgaggaagaaagaccagatgttctgcccgaaatgtggtgctagcatcggtattgatttcaagggagttacgaaacctgggaagccacatgttcatggtattagtgctaggacattttacaatgtcgacctcgataagttgaaatacaaaaagctggatggtgtcaaggtggtcccgccggagaaggactttgcaggtcatgtttgggatgaggagaaacacgagatgaagcaggatatgaactaggagatgaagcaatgttttatatttgacaactttatatgctgaatacctagatcgataatgataggctcatgttcacgtgaattctcatttggataggcgcagtggtcgagaccgctttgcaattcgggtttagaagtagaatttgtcgacgataggccactatctcatatattgatgttgtcttcttgcctccgatctgagtgtatgcagtccgtaatacacagttcatgttcaaaatccctttgctcgtgtatcgtctggggggagttatggtctcgaaatgggccgcagacgtgtaatgctttgaaatctctgggcctgaagtaacgtatttaacatgtttctccttgctacctttatccagcgcaatgcttatttcctctagtctagttgatctttagtcgagacatctgtcgtcttgttatgaaaacgacgtagacatagaatcatcaccttagaccttcattaaagcccgttcgtgtcttcatgccatcatgatatcgacctcatctactgttccccttcgaatcttacaaagctctaagctgcctgtctcttcgcatacaggttctcagctgaggtgatacagtgcatgttggcacctagcttgttcatcgtctccatccactcttcgtactcatcggaatcgaagacgataccgccacctagatttcaagacggttaggggctatgtccagaatgtagtcatgcaagttgaaggagaagagagtatcactcaccagcctgtaggtacgcaattccgtccttgacaagcatggtacgcagcgcaatacatgtgtccattgcgccgtccgtctcgtttcctttcctgtccacactactgtagccaaagtagccaacagcacccgcatatatacccctcttctctctctccagctcggcgatcagctccattgcctttaccttgggggcaccagacacagtaccggcagggaagatagagcggaaagcatcaaaccgcgtcatacccgggcgcagcacgcccgagacttgtgaggtaagatgcatgacatgactgaatttctcaacagtcatgagacgatctacacgtgtggtcagggggtcacaaacgcggttcatatcgttccgcgccaagtcgacaagcatgacgtgctccgcgcggtccttcagcgagctacgcagctcggctgccaggagctcatcgtcttctggcgtctttccccgcttcacggttccggcaatgggatgtgtgatgatccggccgtcgtcctccttgactaagagctcaggcgaggcacccacaatttggaagtcctggcagttcacgtagaagagatagggcgagggatttacggtacgaagatggcgatatatgttgaaaggatgcaaagtggtgggacgggcaaaccgctgggagggtacggcttggatgatgtcacccgcaatgatgtgcttcttgagctctgtgacgtggccctcgtagccagcctggccaatgttggacttgtattcctggccaagcttgatgggctgttgatcaggcagtggtatctcgggcgcattcagaacgccaatgagctcagatatggtggtcgtcgccttgtcgtactcttcctggagcttagagaggtcgtcggggatggtgagataggtaatgaccttgacaagaccgtagaagctatcaaaggcgacgatagtgtcgaacagcatgaacagcgattcgggaatcttgagcacatcctgcatggggcgtgcagtcttgggctcgaaataccggacacagtcatagccgacatagccaatggcaccaccggtgagaggcggcagtctgagatcggggacgtcgaggactacgcgctcggctagctccttctcgagggcgggcaggggatcgagggactcgccatgaccctcgcccgtcttgatgatcttgcggggcccggcaccgacaaagctgtagcgaccaacccgttcggttgcagcgctctcgtagagaaatgaaaagtcggacttggagtgtgctgcaatcttgaggtaggcggtcgacggcgtgatcagatcggcggaaaattgaccgtacagcgggacgatgttgggcttcttagagctctcgggggcaggctgggatagcagctcttggaccgtctcgaaggacggcagaacgatat

SEQ ID NO: 13974 - DNA, 1548 bp, Muscodor strobelii
  misc_feature: SGI cDNA ID NO. 564596
  misc_feature: Encodes the peptide sequence at SEQ ID NO 13975
atggcgcaagcagatatcgttctgccgtccttcgagacggtccaagagctgctatcccagcctgcccccgagagctctaagaagcccaacatcgtcccgctgtacggtcaattttccgccgatctgatcacgccgtcgaccgcctacctcaagattgcagcacactccaagtccgacttttcatttctctacgagagcgctgcaaccgaacgggttggtcgctacagctttgtcggtgccgggccccgcaagatcatcaagacgggcgagggtcatggcgagtccctcgatcccctgcccgccctcgagaaggagctagccgagcgcgtagtcctcgacgtccccgatctcagactgccgcctctcaccggtggtgccattggctatgtcggctatgactgtgtccggtatttcgagcccaagactgcacgccccatgcaggatgtgctcaagattcccgaatcgctgttcatgctgttcgacactatcgtcgcctttgatagcttctacggtcttgtcaaggtcattacctatctcaccatccccgacgacctctctaagctccaggaagagtacgacaaggcgacgaccaccatatctgagctcattggcgttctgaatgcgcccgagataccactgcctgatcaacagcccatcaagcttggccaggaatacaagtccaacattggccaggctggctacgagggccacgtcacagagctcaagaagcacatcattgcgggtgacatcatccaagccgtaccctcccagcggtttgcccgtcccaccactttgcatcctttcaacatatatcgccatcttcgtaccgtaaatccctcgccctatctcttctacgtgaactgccaggacttccaaattgtgggtgcctcgcctgagctcttagtcaaggaggacgacggccggatcatcacacatcccattgccggaaccgtgaagcggggaaagacgccagaagacgatgagctcctggcagccgagctgcgtagctcgctgaaggaccgcgcggagcacgtcatgcttgtcgacttggcgcggaacgatatgaaccgcgtttgtgaccccctgaccacacgtgtagatcgtctcatgactgttgagaaattcagtcatgtcatgcatcttacctcacaagtctcgggcgtgctgcgcccgggtatgacgcggtttgatgctttccgctctatcttccctgccggtactgtgtctggtgcccccaaggtaaaggcaatggagctgatcgccgagctggagagagagaagaggggtatatatgcgggtgctgttggctactttggctacagtagtgtggacaggaaaggaaacgagacggacggcgcaatggacacatgtattgcgctgcgtaccatgcttgtcaaggacggaattgcgtacctacaggctggtggcggtatcgtcttcgattccgatgagtacgaagagtggatggagacgatgaacaagctaggtgccaacatgcactgtatcacctcagctgagaacctgtatgcgaagagacaggcagcttag

SEQ ID NO: 13975 - protein, 515 aa, Muscodor strobelii
  misc_feature: SGI Peptide ID NO. 564596
  misc_feature (34)..(175): Pfam Id: PF04715 Pfam Desc: Anthranilate synthase component I, N terminal region
  misc_feature (230)..(502): Pfam Id: PF00425 Pfam Desc: chorismate binding enzyme
  misc_feature (1)..(514): NCBI GI: 145608342 Blast Desc: MGG_12760 [Magnaporthe grisea 70-15] gi|145015823|gb|EDK00313.1| MGG_12760 [Magnaporthe grisea 70-15]
  misc_feature (1)..(513): NCBI GI: 261356861 Blast Desc: anthranilate synthase component 1 [Verticillium albo-atrum VaMs.102]
  misc_feature (7)..(513): NCBI GI: 156065959 Blast Desc: SS1G_00990 [Sclerotinia sclerotiorum 1980] gi|154691849|gb|EDN91587.1| SS1G_00990 [Sclerotinia sclerotiorum 1980]
  misc_feature (1)..(509): NCBI GI: 226278390 Blast Desc: anthranilate synthase component 1 [Paracoccidioides brasiliensis Pb01]
  misc_feature (1)..(509): NCBI GI: 145236699 Blast Desc: An06g01760 [Aspergillus niger] gi|134075458|emb|CAK48019.1| protein product [Aspergillus niger]
  misc_feature (1)..(509): NCBI GI: 261203639 Blast Desc: anthranilate synthase component I [Ajellomyces dermatitidis SLH14081] gi|239586818|gb|EEQ69461.1| anthranilate synthase component I [Ajellomyces dermatitidis SLH14081] synthase
  misc_feature (1)..(514): NCBI GI: 225683962 Blast Desc: anthranilate synthase component 1 [Paracoccidioides brasiliensis Pb03] gi|226293355|gb|EEH48775.1| anthranilate synthase component 1 [Paracoccidioides brasiliensis Pb18]
  misc_feature (7)..(509): NCBI GI: 242789098 Blast Desc: anthranilate synthase component I, [Talaromyces stipitatus ATCC 10500] gi|218717880|gb|EED17300.1| anthranilate synthase component I, [Talaromyces stipitatus ATCC 10500]
  misc_feature (1)..(509): NCBI GI: 169770177 Blast Desc: [Aspergillus oryzae RIB40] gi|83767417|dbj|BAE57556.1| protein product [Aspergillus oryzae]
  misc_feature (1)..(515): NCBI GI: 121700094 Blast Desc: anthranilate synthase component I, [Aspergillus clavatus NRRL 1] gi|119396454|gb|EAW06886.1| anthranilate synthase component I, [Aspergillus clavatus NRRL 1]
  misc_feature (7)..(510): SWISSPROT Homolog: EC 4.1.3.27 Anthranilate synthase
MAQADIVLPSFETVQELLSQPAPESSKKPNIVPLYGQFSADLITPSTAYLKIAAHSKSDFSFLYESAATERVGRYSFVGAGPRKIIKTGEGHGESLDPLPALEKELAERVVLDVPDLRLPPLTGGAIGYVGYDCVRYFEPKTARPMQDVLKIPESLFMLFDTIVAFDSFYGLVKVITYLTIPDDLSKLQEEYDKATTTISELIGVLNAPEIPLPDQQPIKLGQEYKSNIGQAGYEGHVTELKKHIIAGDIIQAVPSQRFARPTTLHPFNIYRHLRTVNPSPYLFYVNCQDFQIVGASPELLVKEDDGRIITHPIAGTVKRGKTPEDDELLAAELRSSLKDRAEHVMLVDLARNDMNRVCDPLTTRVDRLMTVEKFSHVMHLTSQVSGVLRPGMTRFDAFRSIFPAGTVSGAPKVKAMELIAELEREKRGIYAGAVGYFGYSSVDRKGNETDGAMDTCIALRTMLVKDGIAYLQAGGGIVFDSDEYEEWMETMNKLGANMHCITSAENLYAKRQAA

SEQ ID NO: 13976 - DNA, 2412 bp, Muscodor strobelii
  misc_feature: SGI EST ID NO. CUFF.33637.1
  misc_feature: Variant of the nucleotide sequence at SEQ ID NO 13974
attggaaggccgcaaggtagcattgggacaatggtaagtttaccaacataagcagtactccaacatgcaacaacatgcaatcttccgctcgcaaacaacattgcaattgctctttgcaccgtccacctggagtaccgagatctgccgagcccagagctagctacgcgggagattgataaatcatggcgcaagcagatatcgttctgccgtccttcgagacggtccaagagctgctatcccagcctgcccccgagagctctaagaagcccaacatcgtcccgctgtacggtcaattttccgccgatctgatcacgccgtcgaccgcctacctcaagattgcagcacactccaagtccgacttttcatttctctacgagagcgctgcaaccgaacgggttggtcgctacagctttgtcggtgccgggccccgcaagatcatcaagacgggcgagggtcatggcgagtccctcgatcccctgcccgccctcgagaaggagctagccgagcgcgtagtcctcgacgtccccgatctcagactgccgcctctcaccggtggtgccattggctatgtcggctatgactgtgtccggtatttcgagcccaagactgcacgccccatgcaggatgtgctcaagattcccgaatcgctgttcatgctgttcgacactatcgtcgcctttgatagcttctacggtcttgtcaaggtcattacctatctcaccatccccgacgacctctctaagctccaggaagagtacgacaaggcgacgaccaccatatctgagctcattggcgttctgaatgcgcccgagataccactgcctgatcaacagcccatcaagcttggccaggaatacaagtccaacattggccaggctggctacgagggccacgtcacagagctcaagaagcacatcattgcgggtgacatcatccaagccgtaccctcccagcggtttgcccgtcccaccactttgcatcctttcaacatatatcgccatcttcgtaccgtaaatccctcgccctatctcttctacgtgaactgccaggacttccaaattgtgggtgcctcgcctgagctcttagtcaaggaggacgacggccggatcatcacacatcccattgccggaaccgtgaagcggggaaagacgccagaagacgatgagctcctggcagccgagctgcgtagctcgctgaaggaccgcgcggagcacgtcatgcttgtcgacttggcgcggaacgatatgaaccgcgtttgtgaccccctgaccacacgtgtagatcgtctcatgactgttgagaaattcagtcatgtcatgcatcttacctcacaagtctcgggcgtgctgcgcccgggtatgacgcggtttgatgctttccgctctatcttccctgccggtactgtgtctggtgcccccaaggtaaaggcaatggagctgatcgccgagctggagagagagaagaggggtatatatgcgggtgctgttggctactttggctacagtagtgtggacaggaaaggaaacgagacggacggcgcaatggacacatgtattgcgctgcgtaccatgcttgtcaaggacggaattgcgtacctacaggctggtggcggtatcgtcttcgattccgatgagtacgaagagtggatggagacgatgaacaagctaggtgccaacatgcactgtatcacctcagctgagaacctgtatgcgaagagacaggcagcttagagctttgtaagattcgaaggggaacagtagatgaggtcgatatcatgatggcatgaagacacgaacgggctttaatgaaggtctaaggtgatgattctatgtctacgtcgttttcataacaagacgacagatgtctcgactaaagatcaactagactagaggaaataagcattgcgctggataaaggtagcaaggagaaacatgttaaatacgttacttcaggcccagagatttcaaagcattacacgtctgcggcccatttcgagaccataactccccccagacgatacacgagcaaagggattttgaacatgaactgtgtattacggactgcatacactcagatcggaggcaagaagacaacatcaatatatgagatagtggcctatcgtcgacaaattctacttctaaacccgaattgcaaagcggtctcgaccactgcgcctatccaaatgagaattcacgtgaacatgagcctatcattatcgatctaggtattcagcatataaagttgtcaaatataaaacattgcttcatctcctagttcatatcctgcttcatctcgtgtttctcctcatcccaaacatgacctgcaaagtccttctccggcgggaccaccttgacaccatccagctttttgtatttcaacttatcgaggtcgacattgtaaaatgtcctagcc

SEQ ID NO: 13977 - DNA, 1539 bp, Muscodor strobelii
  misc_feature: SGI cDNA ID NO. 564597
  misc_feature: Reduced expression when VOC is produced
  misc_feature: Encodes the peptide sequence at SEQ ID NO 13978
atggatatcgttctgccgtccttcgagacggtccaagagctgctatcccagcctgcccccgagagctctaagaagcccaacatcgtcccgctgtacggtcaattttccgccgatctgatcacgccgtcgaccgcctacctcaagattgcagcacactccaagtccgacttttcatttctctacgagagcgctgcaaccgaacgggttggtcgctacagctttgtcggtgccgggccccgcaagatcatcaagacgggcgagggtcatggcgagtccctcgatcccctgcccgccctcgagaaggagctagccgagcgcgtagtcctcgacgtccccgatctcagactgccgcctctcaccggtggtgccattggctatgtcggctatgactgtgtccggtatttcgagcccaagactgcacgccccatgcaggatgtgctcaagattcccgaatcgctgttcatgctgttcgacactatcgtcgcctttgatagcttctacggtcttgtcaaggtcattacctatctcaccatccccgacgacctctctaagctccaggaagagtacgacaaggcgacgaccaccatatctgagctcattggcgttctgaatgcgcccgagataccactgcctgatcaacagcccatcaagcttggccaggaatacaagtccaacattggccaggctggctacgagggccacgtcacagagctcaagaagcacatcattgcgggtgacatcatccaagccgtaccctcccagcggtttgcccgtcccaccactttgcatcctttcaacatatatcgccatcttcgtaccgtaaatccctcgccctatctcttctacgtgaactgccaggacttccaaattgtgggtgcctcgcctgagctcttagtcaaggaggacgacggccggatcatcacacatcccattgccggaaccgtgaagcggggaaagacgccagaagacgatgagctcctggcagccgagctgcgtagctcgctgaaggaccgcgcggagcacgtcatgcttgtcgacttggcgcggaacgatatgaaccgcgtttgtgaccccctgaccacacgtgtagatcgtctcatgactgttgagaaattcagtcatgtcatgcatcttacctcacaagtctcgggcgtgctgcgcccgggtatgacgcggtttgatgctttccgctctatcttccctgccggtactgtgtctggtgcccccaaggtaaaggcaatggagctgatcgccgagctggagagagagaagaggggtatatatgcgggtgctgttggctactttggctacagtagtgtggacaggaaaggaaacgagacggacggcgcaatggacacatgtattgcgctgcgtaccatgcttgtcaaggacggaattgcgtacctacaggctggtggcggtatcgtcttcgattccgatgagtacgaagagtggatggagacgatgaacaagctaggtgccaacatgcactgtatcacctcagctgagaacctgtatgcgaagagacaggcagcttag

SEQ ID NO: 13978 - protein, 512 aa, Muscodor strobelii
  misc_feature: SGI Peptide ID NO. 564597
  misc_feature (31)..(172): Pfam Id: PF04715 Pfam Desc: Anthranilate synthase component I, N terminal region
  misc_feature (227)..(499): Pfam Id: PF00425 Pfam Desc: chorismate binding enzyme
  misc_feature (2)..(511): NCBI GI: 145608342 Blast Desc: MGG_12760 [Magnaporthe grisea 70-15] gi|145015823|gb|EDK00313.1| MGG_12760 [Magnaporthe grisea 70-15]
  misc_feature (4)..(510): NCBI GI: 261356861 Blast Desc: anthranilate synthase component 1 [Verticillium albo-atrum VaMs.102]
  misc_feature (4)..(510): NCBI GI: 156065959 Blast Desc: SS1G_00990 [Sclerotinia sclerotiorum 1980] gi|154691849|gb|EDN91587.1| SS1G_00990 [Sclerotinia sclerotiorum 1980]
  misc_feature (3)..(506): NCBI GI: 226278390 Blast Desc: anthranilate synthase component 1 [Paracoccidioides brasiliensis Pb01]
  misc_feature (3)..(506): NCBI GI: 261203639 Blast Desc: anthranilate synthase component I [Ajellomyces dermatitidis SLH14081] gi|239586818|gb|EEQ69461.1| anthranilate synthase component I [Ajellomyces dermatitidis SLH14081] synthase
  misc_feature (4)..(506): NCBI GI: 145236699 Blast Desc: An06g01760 [Aspergillus niger] gi|134075458|emb|CAK48019.1| protein product [Aspergillus niger]
  misc_feature (3)..(511): NCBI GI: 225683962 Blast Desc: anthranilate synthase component 1 [Paracoccidioides brasiliensis Pb03] gi|226293355|gb|EEH48775.1| anthranilate synthase component 1 [Paracoccidioides brasiliensis Pb18]
  misc_feature (4)..(506): NCBI GI: 242789098 Blast Desc: anthranilate synthase component I, [Talaromyces stipitatus ATCC 10500] gi|218717880|gb|EED17300.1| anthranilate synthase component I, [Talaromyces stipitatus ATCC 10500]
  misc_feature (4)..(506): NCBI GI: 238487438 Blast Desc: anthranilate synthase component I, [Aspergillus flavus NRRL3357] gi|220699836|gb|EED56175.1| anthranilate synthase component I, [Aspergillus flavus NRRL3357]
  misc_feature (4)..(506): NCBI GI: 169770177 Blast Desc: [Aspergillus oryzae RIB40] gi|83767417|dbj|BAE57556.1| protein product [Aspergillus oryzae]
  misc_feature (4)..(507): SWISSPROT Homolog: EC 4.1.3.27 Anthranilate synthase
  misc_feature: Useful for introducing or modulating the production of volatile compounds
MDIVLPSFETVQELLSQPAPESSKKPNIVPLYGQFSADLITPSTAYLKIAAHSKSDFSFLYESAATERVGRYSFVGAGPRKIIKTGEGHGESLDPLPALEKELAERVVLDVPDLRLPPLTGGAIGYVGYDCVRYFEPKTARPMQDVLKIPESLFMLFDTIVAFDSFYGLVKVITYLTIPDDLSKLQEEYDKATTTISELIGVLNAPEIPLPDQQPIKLGQEYKSNIGQAGYEGHVTELKKHIIAGDIIQAVPSQRFARPTTLHPFNIYRHLRTVNPSPYLFYVNCQDFQIVGASPELLVKEDDGRIITHPIAGTVKRGKTPEDDELLAAELRSSLKDRAEHVMLVDLARNDMNRVCDPLTTRVDRLMTVEKFSHVMHLTSQVSGVLRPGMTRFDAFRSIFPAGTVSGAPKVKAMELIAELEREKRGIYAGAVGYFGYSSVDRKGNETDGAMDTCIALRTMLVKDGIAYLQAGGGIVFDSDEYEEWMETMNKLGANMHCITSAENLYAKRQAA

SEQ ID NO: 13979 - DNA, 2412 bp, Muscodor strobelii; identical to SEQ ID NO: 13976
  misc_feature: SGI EST ID NO. CUFF.33637.1
  misc_feature: Variant of the nucleotide sequence at SEQ ID NO 13977

SEQ ID NO: 13980 - DNA, 495 bp, Muscodor strobelii
  misc_feature: SGI cDNA ID NO. 564598
  misc_feature: Encodes the peptide sequence at SEQ ID NO 13981
atggcgtcagacgaagactacatggcatttctggacaaggcgaacaaggatcccaacgaaggctacgcgagatcgcagagcaaggacggggagttcaaagctatggacgagggcgcacaagcccctgctgccatcaaggaggctacgaaggatgccttctacgtgagcgatgcggacgagccgttcgtgcctgtgtgtctggcttgggacgagggtggcaaaggtttgcccgacgagaccgagttcgcatccctgatcaagcatccggacccttcgaccgcggagatagagattcaggaccccgccgagtgggactcgcaaggacaatacaaagcaatcgtagacggcgtgagcaaggcgggcaaggggaacgatgttcgtgtgtatcgggtcgcgaagggaggcgtaaaattcgagtattgggtggtcacgacggatggtaaaggatcgagtgcgaagctggtcggtgctaaggctctcgccgttgagagctaa

SEQ ID NO: 13981 - protein, 164 aa, Muscodor strobelii
  misc_feature: SGI Peptide ID NO. 564598
  misc_feature (1)..(164): NCBI GI: 261356862 Blast Desc: conserved [Verticillium albo-atrum VaMs.102]
  misc_feature (1)..(164): NCBI GI: 39942228 Blast Desc: MGG_03194 [Magnaporthe grisea 70-15] gi|145015824|gb|EDK00314.1| MGG_03194 [Magnaporthe grisea 70-15]
  misc_feature (2)..(164): NCBI GI: 116204625 Blast Desc: CHGG_10196 [Chaetomium globosum CBS 148.51] gi|88176324|gb|EAQ83792.1| CHGG_10196 [Chaetomium globosum CBS 148.51]
  misc_feature (1)..(164): NCBI GI: 256732483 Blast Desc: NECHADRAFT_102521 [Nectria haematococca mpVI 77-13-4]
  misc_feature (1)..(164): NCBI GI: 156065831 Blast Desc: SS1G_00926 [Sclerotinia sclerotiorum 1980] gi|154691785|gb|EDN91523.1| SS1G_00926 [Sclerotinia sclerotiorum 1980]
  misc_feature (1)..(164): NCBI GI: 46123821 Blast Desc: FG06288.1 [Gibberella zeae PH-1]
  misc_feature (1)..(164): NCBI GI: 164424624 Blast Desc: NCU06844 [Neurospora crassa OR74A] gi|28881191|emb|CAD70372.1| [Neurospora crassa] gi|157070592|gb|EAA34082.2| [Neurospora crassa OR74A]
  misc_feature (35)..(147): NCBI GI: 154301765 Blast Desc: BC1G_10034 [Botryotinia fuckeliana B05.10] gi|150855696|gb|EDN30888.1| BC1G_10034 [Botryotinia fuckeliana B05.10]
  misc_feature (1)..(164): NCBI GI: 240107297 Blast Desc: CPC735_065820 [Coccidioides posadasii C735 delta SOWgp]
  misc_feature (1)..(164): NCBI GI: 242810564 Blast Desc: conserved [Talaromyces stipitatus ATCC 10500] gi|218716231|gb|EED15653.1| conserved [Talaromyces stipitatus ATCC 10500]
MASDEDYMAFLDKANKDPNEGYARSQSKDGEFKAMDEGAQAPAAIKEATKDAFYVSDADEPFVPVCLAWDEGGKGLPDETEFASLIKHPDPSTAEIEIQDPAEWDSQGQYKAIVDGVSKAGKGNDVRVYRVAKGGVKFEYWVVTTDGKGSSAKLVGAKALAVES

SEQ ID NO: 13982 - DNA, 1025 bp, Muscodor strobelii
  misc_feature: SGI EST ID NO. CUFF.33386.0
  misc_feature: Variant of the nucleotide sequence at SEQ ID NO 13980
atgtaacggtaacccaatcaacttgattcaactgaagctaatgagaaacaccaacacacagcttgtttattgctgagacccgaatcaatgacatctcgttctaactccaatttgtctcgcaaagctcttaccacctttctacagtctcaagccaaaagatcagcagattcgagtgctaagatcttccctcggtatcaactgcgcatcccctccaaattctccagcatcgtgcacccaagcctttgcttaagcgcaagctcgctgcacgtcaaatccagtccgcctcgccggaacttgacaggatcgaccgcgaggagaatggcgtcagacgaagactacatggcatttctggacaaggcgaacaaggatcccaacgaaggctacgcgagatcgcagagcaaggacggggagttcaaagctatggacgagggcgcacaagcccctgctgccatcaaggaggctacgaaggatgccttctacgtgagcgatgcggacgagccgttcgtgcctgtgtgtctggcttgggacgagggtggcaaaggtttgcccgacgagaccgagttcgcatccctgatcaagcatccggacccttcgaccgcggagatagagattcaggaccccgccgagtgggactcgcaaggacaatacaaagcaatcgtagacggcgtgagcaaggcgggcaaggggaacgatgttcgtgtgtatcgggtcgcgaagggaggcgtaaaattcgagtattgggtggtcacgacggatggtaaaggatcgagtgcgaagctggtcggtgctaaggctctcgccgttgagagctaaatcaagacaactccaggctagagggagtctactaggagaaaatacgcactacgaaacacacttaatatgatcatcgaaaccagaacaattacaagctttgggagcagctattagtagcagttcaaatacgaggatgaaacgaaagaaatgcgaatagggctattattgagagctccaatcagttgggagaaagacaagatctcgcactgtcg

SEQ ID NO: 13983 - DNA, 1179 bp, Muscodor strobelii
  misc_feature: SGI cDNA ID NO. 564599
  misc_feature: Reduced expression when VOC is produced
  misc_feature: Encodes the peptide sequence at SEQ ID NO 13984
atgtcgcaccgcaagttcgaggctcctcgccacggttcgctggctttcttgccgcgaaagcgtgctgcccgccaccgcggaaaggtcaagtccttccccaaggatgaccccaagaagcccgtccacctcacggccacgatgggctacaaggccggcatgacgaccatcgtccgcgacctcgaccgaccgggcgccaagtcgcacaagaaggaaatcgtcgaggccgtctcgattattgacaccccgcctatgatcgttgttggtctggttggctacattgagaccccccgcggtctgcgatccctcaccaccgtctgggccgagcacttgagcgacgaggtcaagcgccgcttctacaagaactggtacaagagcaagaagaaggccttcaccaagtacgccaagaagcactctgagagctccgcctcctccgtcacccgcgagctcgagcgcatcaagaagtactgcaccgtcgtccgtgtcctcgcccacacccagatccgcaagacgcccctcaagcagaagaaggcccacctcatggaggtccagatcaacggtggctccgtcgccgacaaggtcgccttcggccacggcctcttcgagaagcccgtcaccgtcgactccattttcgagcaggacgagatgatcgacgtcatcgccgtcaccaagggtcacggcttcaacggtgtcacggcccgctggggcaccaagaagctgccgcgcaagacgcacaagggtctccgcaaggtcgcctgtatcggtgcctggcatccctcccacgtccagtggactgttgcccgtgccggtcagatgggttaccaccaccgtacctcggtcaaccacaagatctaccgcattggtaagggtgatgacgagggtaacgcctctactgaacaggatgtcaccaagaagaccatcactcctctcggtggcttcgtccgctacggtgaggtcaagaacgacttcgtcatggtcaagggttccatccctggtgtcaagaagcgcgtcatgacgctgcgcaagtccatgttcacccacacctcgagaaaagcgctcgagaaggtccagctcaagtggatcgacacctcgtccgagttcggtcacggtgccttccagacgcccgccgagaagaagcagtaccagggtactctcaagaaggatctggtacagagctcataa

SEQ ID NO: 13984 - protein, 392 aa, Muscodor strobelii
  misc_feature: SGI Peptide ID NO. 564599
  misc_feature (50)..(340): Pfam Id: PF00297 Pfam Desc: Ribosomal protein L3
  misc_feature (1)..(392): NCBI GI: 145608344 Blast Desc: large subunit ribosomal protein L3 [Magnaporthe grisea 70-15] gi|145015825|gb|EDK00315.1| large subunit ribosomal protein L3 [Magnaporthe grisea 70-15]
  misc_feature (1)..(392): NCBI GI: 171689180 Blast Desc: protein product [Podospora anserina] gi|170944552|emb|CAP70663.1| protein product [Podospora anserina]
  misc_feature (1)..(392): NCBI GI: 116204627 Blast Desc: 60S ribosomal protein L3 [Chaetomium globosum CBS 148.51] gi|88176325|gb|EAQ83793.1| 60S ribosomal protein L3 [Chaetomium globosum CBS 148.51]
  misc_feature (1)..(391): NCBI GI: 256732482 Blast Desc: [Nectria haematococca mpVI 77-13-4]
  misc_feature (1)..(392): NCBI GI: 164424622 Blast Desc: 60S ribosomal protein L3 [Neurospora crassa OR74A] gi|30580497|sp|P59671.1|RL3_NEUCR RecName: Full=60S ribosomal protein L3 gi|28881190|emb|CAD70371.1| 60s ribosomal protein l3
  misc_feature (1)..(391): NCBI GI: 261356863 Blast Desc: 60S ribosomal protein L3 [Verticillium albo-atrum VaMs.102]
  misc_feature (1)..(392): NCBI GI: 189204215 Blast Desc: 60S ribosomal protein L3 [Pyrenophora tritici-repentis Pt-1C-BFP] gi|187985542|gb|EDU51030.1| 60S ribosomal protein L3 [Pyrenophora tritici-repentis Pt-1C-BFP]
  misc_feature (1)..(392): NCBI GI: 226280199 Blast Desc: 60S ribosomal protein L3 [Paracoccidioides brasiliensis Pb01] gi|226286840|gb|EEH42353.1| 60S ribosomal protein L3 [Paracoccidioides brasiliensis Pb18]
  misc_feature (1)..(391): NCBI GI: 242810586 Blast Desc: 60S ribosomal protein L3 [Talaromyces stipitatus ATCC 10500] gi|218716236|gb|EED15658.1| 60S ribosomal protein L3 [Talaromyces stipitatus ATCC 10500]
  misc_feature (1)..(392): NCBI GI: 212536953 Blast Desc: 60S ribosomal protein L3 [Penicillium marneffei ATCC 18224] gi|210068374|gb|EEA22465.1| 60S ribosomal protein L3 [Penicillium marneffei ATCC 18224]
  misc_feature: Useful for introducing or modulating the production of volatile compounds
MSHRKFEAPRHGSLAFLPRKRAARHRGKVKSFPKDDPKKPVHLTATMGYKAGMTTIVRDLDRPGAKSHKKEIVEAVSIIDTPPMIVVGLVGYIETPRGLRSLTTVWAEHLSDEVKRRFYKNWYKSKKKAFTKYAKKHSESSASSVTRELERIKKYCTVVRVLAHTQIRKTPLKQKKAHLMEVQINGGSVADKVAFGHGLFEKPVTVDSIFEQDEMIDVIAVTKGHGFNGVTARWGTKKLPRKTHKGLRKVACIGAWHPSHVQWTVARAGQMGYHHRTSVNHKIYRIGKGDDEGNASTEQDVTKKTITPLGGFVRYGEVKNDFVMVKGSIPGVKKRVMTLRKSMFTHTSRKALEKVQLKWIDTSSEFGHGAFQTPAEKKQYQGTLKKDLVQSS

SEQ ID NO: 13985 - DNA, 1670 bp, Muscodor strobelii
  misc_feature: SGI EST ID NO. CUFF.33509.0
  misc_feature: Variant of the nucleotide sequence at SEQ ID NO 13983
gggtgttgctgtgcaaaagtaaagtgaacttttcccgcccggcgatacacttccctccttctcaaccctccatcccacgcagttgacgacttctctactaaccacagggaatcaactgaagatgtcgcaccgcaagttcgaggctcctcgccacggttcgctggctttcttgccgcgaaagcgtgctgcccgccaccgcggaaaggtcaagtccttccccaaggatgaccccaagaagcccgtccacctcacggccacgatgggctacaaggccggcatgacgaccatcgtccgcgacctcgaccgaccgggcgccaagtcgcacaagaaggaaatcgtcgaggccgtctcgattattgacaccccgcctgtacgaacaacgcagcccgcttggctctgtgcctatggctaacatctcccttagatgatcgttgttggtctggttggctacattgagaccccccgcggtctgcgatccctcaccaccgtctgggccgagcacttgagcgacgaggtcaagcgccgcttctacaagaactggtacaagagcaagaagaaggccttcaccaagtacgccaagaagcactctgagagctccgcctcctccgtcacccgcgagctcgagcgcatcaagaagtactgcaccgtcgtccgtgtcctcgcccacacccagatccgcaagacgcccctcaagcagaagaaggcccacctcatggaggtccagatcaacggtggctccgtcgccgacaaggtcgccttcggccacggcctcttcgagaagcccgtcaccgtcgactccattttcgagcaggacgagatgatcgacgtcatcgccgtcaccaagggtcacggcttcaacggtgtcacggcccgctggggcaccaagaagctgccgcgcaagacgcacaagggtctccgcaaggtcgcctgtatcggtgcctggcatccctcccacgtccagtggactgttgcccgtgccggtcagatgggttaccaccaccgtacctcggtcaaccacaagatctaccgcattggtaagggtgatgacgagggtaacgcctctactgaacaggatgtcaccaagaagaccatcactcctctcggtggcttcgtccgctacggtgaggtcaagaacgacttcgtcatggtcaagggttccatccctggtgtcaagaagcgcgtcatgacgctgcgcaagtccatgttcacccacacctcgagaaaagcgctcgagaaggtccagctcaagtggatcgacacctcgtccgagttcggtcacggtgccttccagacgcccgccgagaagaagcagtaccagggtactctcaagaaggatctggtacagagctcataagcaagctctgcctttccttgtatctagtctttgcatcggtgttctgggttccattttcggctacagcaaaggggcgtagtctaaggattgacatttgagctgcagctaatgaaaaaaactgcatgaatgaacaaaaagaaagcccacgatgatacctgatgactcacgttttccttgtccggcccaaaacatgcgtgttatctatgtgctgctgtactgtgaaataaaaaatcaaacgttaatgtggctgctgttctgagctggcttgaaggctctcgttccagtggacctttgcgattcatcctcattcttacgt

SEQ ID NO: 13986 - DNA, 2523 bp, Muscodor strobelii
  misc_feature: SGI cDNA ID NO. 564600
  misc_feature: Reduced expression when VOC is produced
  misc_feature: Encodes the peptide sequence at SEQ ID NO 13987
atggcgcaccacccgtcgcctcagatggcgatgcaaatgcagcaccatggccctcctgcacctcccggcccaatgccgggaggtcaatggccacagaattccccatcgcgtcatatgatgcaagtcaatgaacttctgtggatgcagattggcagcttctctgagctacttggcaatctggaggacgccatgcaggcctacgaacgagcgcttcaggccaaccccaactccgtgtcagctatgaacgcaatcagccttattctgcgcacccgtgagaaattcgctgaagctgtcgagtatctgcaagcaatcctcaaaatagatgccaataacggtgaagtatggggcagtctcggacactgctacctcatgatggatgaactacaacaagcgtacgctgcctaccagagtgctctcatcaaccttccgaatccaaaggaacctaagctttggtatggtattggcattctgtatgaccgatacggttcacttgaccatgcggaagaggcgttctcacaagtaatgcaaatgcaacctgatttcgagaaggcaaacgaaatctacttcaggctcggcataatctacaagcaacaagggaagttcaatcaaagtctagagtgcttcaagtacatagttaactcacctcctccacccttgacggaggaggacatttggttccagatcggtcacgttcatgaacagcagaaagattatgacagcgcaaaagcagcgtatcagcgggttcttgaacgcgaccctaatcacgccaaggttctacaacagcttggctggcttcatcaccagcaaagcaatagtttccaaacccaggaacgcgctatcgaataccttgaaaaatctgttgccgctgacacgggcgatgctcaaagttggtacctcttgggtcgatgttacatgtcgcagcagaaatatcccaaggcctacgaagcctaccaacaagcagtctatcgcgaggggcggaatcccacattctggtgctcaatcggtgtgctttactaccagatcaaccagtatagagatgcgctggatgcctattctcgcgctatccggctgaacccatacatttccgaagtatggtacgatctgggtactttgtatgagtcttgcaacaaccaaattgccgatgcccttgacgcgtatcaaagggcggctgaactagatccgtctaacccacatatcaaagctcgtttgcagctgctgcgtaatgggcgacaagacggggctacgattccccaggctataccaacggatgtccatccacagtcatacggtgcacaaggaccacaggcaccatcatggtctggctctggacctggacccattgggcagtcttctaatcctggtggtcctagaccgccacccggtccagcagccgccaatggctgggggcaacgtactagcgatatcaaccctccacaaccgcctaacccctatgatcagcgagactcgttccgcggagctgcgcctccccttcaacgtcagcccagtccccgacctgagatgaggccttacggagaacctaaccgtcccggcccggcacccatccgaagaggtccatcacccggtccgacaccaccgtatggtcaaccaccaccggccggaccaccgcagcaagccccaccacctgctcgagtcctaaacccaatgtatactccaacaccttcgagcgcgggccctggaaacggtccgccgaacggtggtccaccaccaccgcataatatgatgcctccctatcggccaggctctcctcgcgctgaacagcctcgacctatgcatgataaccgcatgccgtcccccaagtcagcttatccccagcatcagcctccttatccgcaccatcaggatgctgttatggagaacaatggccctttgacgctcaaaggacccttgggaccggatatgcaccgggatgagcgacctccgtccgtggcctccaagaggatgcgagaatgggaagacgagccctcggtcaagaaacccgccagcgaggaaaacaggtcacgtatgcaagatgtgggccaccgccgtccgtctccaacgccgcctcgtgaggggcatccttaccgtcgatccccggagggtcatcgtttcaatgatcctcgccgtctcgaagaagatcagcgccgtgccgacgaacaacgacgcgctgaggagatgcgacgatcagatgagcaaagacatggcaatgatgtttatcatccgtcagaagctgcccaccatccccctatccacatgccaccaaatcacctacccccgatgcagtctggcccatcgccaatgccaggcatcatgcatgaacccccgcaaccaagcccagctgccaaagagtactcgcaagaggatcgaccaagacttgaacacccgccggcgccagctcctccccatgagccagagcgggcagcacgtaaaatggacgtggatgaagctatgatgacagcggagaggaagaaaagaagacaggaccggctctcgcatctggacctgcctctgctaatggtgagatga

SEQ ID NO: 13987 - protein, 840 aa, Muscodor strobelii
  misc_feature: SGI Peptide ID NO. 564600
  misc_feature (222)..(255): Pfam Id: PF00515 Pfam Desc: Tetratricopeptide repeat
  misc_feature (328)..(361): Pfam Id: PF00515 Pfam Desc: Tetratricopeptide repeat
  misc_feature (294)..(327): Pfam Id: PF00515 Pfam Desc: Tetratricopeptide repeat
  misc_feature (112)..(145): Pfam Id: PF00515 Pfam Desc: Tetratricopeptide repeat
  misc_feature (148)..(181): Pfam Id: PF00515 Pfam Desc: Tetratricopeptide repeat
  misc_feature (362)..(396): Pfam Id: PF00515 Pfam Desc: Tetratricopeptide repeat
  misc_feature (44)..(77): Pfam Id: PF00515 Pfam Desc: Tetratricopeptide repeat
  misc_feature (222)..(255): Pfam Id: PF07719 Pfam Desc: Tetratricopeptide repeat
  misc_feature (294)..(327): Pfam Id: PF07719 Pfam Desc: Tetratricopeptide repeat
  misc_feature (328)..(361): Pfam Id: PF07719 Pfam Desc: Tetratricopeptide repeat
  misc_feature (44)..(77): Pfam Id: PF07719 Pfam Desc: Tetratricopeptide repeat
  misc_feature (362)..(396): Pfam Id: PF07719 Pfam Desc: Tetratricopeptide repeat
  misc_feature (185)..(209): Pfam Id: PF00515 Pfam Desc: Tetratricopeptide repeat
  misc_feature (2)..(814): NCBI GI: 116204629 Blast Desc: CHGG_10198 [Chaetomium globosum CBS 148.51] gi|88176326|gb|EAQ83794.1| CHGG_10198 [Chaetomium globosum CBS 148.51]
  misc_feature (51)..(830): NCBI GI: 171689182 Blast Desc: protein product [Podospora anserina] gi|170944553|emb|CAP70664.1| protein product [Podospora anserina]
  misc_feature (3)..(814): NCBI GI: 85110209 Blast Desc: NCU06842 [Neurospora crassa OR74A] gi|28881189|emb|CAD70370.1| related to TPR-containing protein Mql1 [Neurospora crassa] gi|28924992|gb|EAA34080.1| conserved
  misc_feature (34)..(814): NCBI GI: 256732481 Blast Desc: NECHADRAFT_99925 [Nectria haematococca mpVI 77-13-4]
  misc_feature (9)..(814): NCBI GI: 261356864 Blast Desc: glucose repression mediator protein CYC8 [Verticillium albo-atrum VaMs.102]
  misc_feature (1)..(825): NCBI GI: 169774883 Blast Desc: [Aspergillus oryzae RIB40] gi|83769772|dbj|BAE59907.1| protein product [Aspergillus oryzae]
  misc_feature (1)..(825): NCBI GI: 238496501 Blast Desc: transcriptional corepressor Cyc8, [Aspergillus flavus NRRL3357] gi|220694366|gb|EED50710.1| transcriptional corepressor Cyc8, [Aspergillus flavus NRRL3357]
  misc_feature (1)..(825): NCBI GI: 121715724 Blast Desc: transcriptional corepressor Cyc8, [Aspergillus clavatus NRRL 1] gi|119403628|gb|EAW14045.1| transcriptional corepressor Cyc8, [Aspergillus clavatus NRRL 1]
  misc_feature (1)..(825): NCBI GI: 119481239 Blast Desc: transcriptional corepressor Cyc8, [Neosartorya fischeri NRRL 181] gi|119408802|gb|EAW18751.1| transcriptional corepressor Cyc8, [Neosartorya fischeri NRRL 181]
  misc_feature (1)..(825): NCBI GI: 71001670 Blast Desc: transcriptional corepressor Cyc8 [Aspergillus fumigatus Af293] gi|66853154|gb|EAL93478.1| transcriptional corepressor Cyc8, [Aspergillus fumigatus Af293] transcriptional
  misc_feature: Useful for introducing or modulating the production of volatile compounds
MAHHPSPQMAMQMQHHGPPAPPGPMPGGQWPQNSPSRHMMQVNELLWMQIGSFSELLGNLEDAMQAYERALQANPNSVSAMNAISLILRTREKFAEAVEYLQAILKIDANNGEVWGSLGHCYLMMDELQQAYAAYQSALINLPNPKEPKLWYGIGILYDRYGSLDHAEEAFSQVMQMQPDFEKANEIYFRLGIIYKQQGKFNQSLECFKYIVNSPPPPLTEEDIWFQIGHVHEQQKDYDSAKAAYQRVLERDPNHAKVLQQLGWLHHQQSNSFQTQERAIEYLEKSVAADTGDAQSWYLLGRCYMSQQKYPKAYEAYQQAVYREGRNPTFWCSIGVLYYQINQYRDALDAYSRAIRLNPYISEVWYDLGTLYESCNNQIADALDAYQRAAELDPSNPHIKARLQLLRNGRQDGATIPQAIPTDVHPQSYGAQGPQAPSWSGSGPGPIGQSSNPGGPRPPPGPAAANGWGQRTSDINPPQPPNPYDQRDSFRGAAPPLQRQPSPRPEMRPYGEPNRPGPAPIRRGPSPGPTPPYGQPPPAGPPQQAPPPARVLNPMYTPTPSSAGPGNGPPNGGPPPPHNMMPPYRPGSPRAEQPRPMHDNRMPSPKSAYPQHQPPYPHHQDAVMENNGPLTLKGPLGPDMHRDERPPSVASKRMREWEDEPSVKKPASEENRSRMQDVGHRRPSPTPPREGHPYRRSPEGHRFNDPRRLEEDQRRADEQRRAEEMRRSDEQRHGNDVYHPSEAAHHPPIHMPPNHLPPMQSGPSPMPGIMHEPPQPSPAAKEYSQEDRPRLEHPPAPAPPHEPERAARKMDVDEAMMTAERKKRRQDRLSHLDLPLLMVR

SEQ ID NO: 13988 - DNA, 3631 bp, Muscodor strobelii
  misc_feature: SGI EST ID NO. CUFF.33391.0
  misc_feature: Variant of the nucleotide sequence at SEQ ID NO 13986
gccgtgggttagggtagtttgccatggagtgaagcatccatcgcccattgccctttggaaaactcctgggggccagccgaccttctcttgttgtctctcgtcgtcctccaccgcttctcgcgccccatctccctcactaggccggcacatcgtctctacccaagccatcacttggcctcttaatattctcacccttatcattatttcagtctccccttctctgacatacacctggcttgtcgtgcgccgcaacgcccatatacgcgcgccgtcggcagctgaagcttcaatctaagacggcgtcggcgttgcaatcgcaggtgtcgggattgatcaaccacgttcgcacttcaacgagcaccttgctgtcgtatcaacgttgaggctcgtttgtttgatgattgtatcgtgtagcgcctgcctagttgccactacgacagcataaacgttgaaagttgctactagctcaaccgggggaaaattaaacgagagcatgcgattcccttaaacacccaatcaccgaaacttccaccacctgtcgcccacggcttggaaagacttctgttttgatcccttaatttttatctcctgaggtatcatggcgcaccacccgtcgcctcagatggcgatgcaaatgcagcaccatggccctcctgcacctcccggcccaatgccgggaggtcaatggccacagaattccccatcgcgtcatatgatgcaagtcaatgaacttctgtggatgcagattggcagcttctctgagctacttggcaatctggaggacgccatgcaggcctacgaacgagcgcttcaggccaaccccaactccgtgtcagctatgaacgcaatcagccttattctgcgcacccgtgagaaattcgctgaagctgtcgagtatctgcaagcaatcctcaaaatagatgccaataacggtgaagtatggggcagtctcggacactgctacctcatgatggatgaactacaacaagcgtacgctgcctaccagagtgctctcatcaaccttccgaatccaaaggaacctaagctttggtatggtattggcattctgtatgaccgatacggttcacttgaccatgcggaagaggcgttctcacaagtaatgcaaatgcaacctgatttcgagaaggcaaacgaaatctacttcaggctcggcataatctacaagcaacaagggaagttcaatcaaagtctagagtgcttcaagtacatagttaactcacctcctccacccttgacggaggaggacatttggttccagatcggtcacgttcatgaacagcagaaagattatgacagcgcaaaagcagcgtatcagcgggttcttgaacgcgaccctaatcacgccaaggttctacaacagcttggctggcttcatcaccagcaaagcaatagtttccaaacccaggaacgcgctatcgaataccttgaaaaatctgttgccgctgacacgggcgatgctcaaagttggtacctcttgggtcgatgttacatgtcgcagcagaaatatcccaaggcctacgaagcctaccaacaagcagtctatcgcgaggggcggaatcccacattctggtgctcaatcggtgtgctttactaccagatcaaccagtatagagatgcgctggatgcctattctcgcgctatccggctgaacccatacatttccgaagtatggtacgatctgggtactttgtatgagtcttgcaacaaccaaattgccgatgcccttgacgcgtatcaaagggcggctgaactagatccgtctaacccacatatcaaagctcgtttgcagctgctgcgtaatgggcgacaagacggggctacgattccccaggctataccaacggatgtccatccacagtcatacggtgcacaaggaccacaggcaccatcatggtctggctctggacctggacccattgggcagtcttctaatcctggtggtcctagaccgccacccggtccagcagccgccaatggctgggggcaacgtactagcgatatcaaccctccacaaccgcctaacccctatgatcagcgagactcgttccgcggagctgcgcctccccttcaacgtcagcccagtccccgacctgagatgaggccttacggagaacctaaccgtcccggcccggcacccatccgaagaggtccatcacccggtccgacaccaccgtatggtcaaccaccaccggccggaccaccgcagcaagccccaccacctgctcgagtcctaaacccaatgtatactccaacaccttcgagcgcgggccctggaaacggtccgccgaacggtggtccaccaccaccgcataatatgatgcctccctatcggccaggctctcctcgcgctgaacagcctcgacctatgcatgataaccgcatgccgtcccccaagtcagcttatccccagcatcagcctccttatccgcaccatcaggatgctgttatggagaacaatggccctttgacgctcaaaggacccttgggaccggatatgcaccgggatgagcgacctccgtccgtggcctccaagaggatgcgagaatgggaagacgagccctcggtcaagaaacccgccagcgaggaaaacaggtcacgtatgcaagatgtgggccaccgccgtccgtctccaacgccgcctcgtgaggggcatccttaccgtcgatccccggagggtcatcgtttcaatgatcctcgccgtctcgaagaagatcagcgccgtgccgacgaacaacgacgcgctgaggagatgcgacgatcagatgagcaaagacatggcaatgatgtttatcatccgtcagaagctgcccaccatccccctatccacatgccaccaaatcacctacccccgatgcagtctggcccatcgccaatgccaggcatcatgcatgaacccccgcaaccaagcccagctgccaaagagtactcgcaagaggatcgaccaagacttgaacacccgccggcgccagctcctccccatgagccagagcgggcagcacgtaaaatggacgtggatgaagctatgatgacagcggagaggaagaaaagaagacaggaccggctctcgcatctggacctgcctctgctaatggtgagatgaaggccaccacgcctactagtgctgggatgaatggcatgatggggcctacacctaagaaggaagctccttagaacgattttctttgagtgaggatgttgttgatcatttacgcgcacatacccttttcttttttgtctttcaatggaagcaaatgtataaaaagcagagcaagtcggcctctcgcgaggatgagaacatagcttagttgttgtcttttcctagtcacgaatctaccattttcaaatatccagactaattttgtgggccgacttgctttcataccactacgttgcatatatgtagcacatacttattcttgatttcgagtcatgttgtagagaacaatggcagctgttacgatgccatttgtttgccttaagcaaccatatgactctggaacattatacaataataccttaagattggatgacatgagatttggtatctttgtaacggcatatactctatacctaatctaggtaggcaagttatgcgcaacctgaaataggc

SEQ ID NO: 13989 - DNA, 1089 bp, Muscodor strobelii
  misc_feature: SGI cDNA ID NO. 564601
  misc_feature: Reduced expression when VOC is produced
  misc_feature: Encodes the peptide sequence at SEQ ID NO 13990
atgccaccacgccttagcataccccccgtcacgcgcattgttctcgccgtcttcgtcctcgagtctgtggtggcaatatggcataatcaaggagcccgcgggttctatctggagtggctcgttctggtgcctcagctgtcgctgttctatccgtggaccttcttgacatccaccttggccgagaacaatatcctcaccttcgtcgtcaccggtcttgccatcttccagggcggccgctatctggagagggcttggtcgtcgagagagttcaccaaattccttctcgtcgtttcagccatccccaatttcctgtgttttctactcttcatagctctgttcactcttactcgaaacgagtcctggacgctcactactgttggcggcgccgtccctctccagatctctttcctcgtcgctttcagccagctcgtgccggctcacaccgttacactcttccgcggtgtcctgtcgctgcgcgttcccaagttccctctgatctacatcggcctagtcacggccctccagcttacgccctttgcctcgtcggcaagcttacctctggcgctgtctggcttcatcacgagctggacctatcttcgattctacaagaccgtcttcccggacctcgatacctcccagccgacttcgatgcgaggcgatgccagcgagacctttgccttctccgaattcttccctgcccccgtcaagccatttgtcgcagctttctccgaccaggtcttcagtgtcctcgttgccatgcatgtctgcacccctttctcccaagcagatgttactgcagtgcagagcaacaacttcgtacctaggtcggcacctggaggcgttcgagccgaggctgagaggcggagggctctagcactgaaagtgctcgatcaacgactgcaaactgctactacgggaggtccagcgtctcggagccagtcgactccgcctgtccagccgagcgggccaacaatacagacgcagcctcagccaaatgcgcaaacagctatgaccagccaacccggtgctatgttgggagaaacacactacgacccagatcacgacagcggagagaaaatggagacgtga

SEQ ID NO: 13990 - protein, 362 aa, Muscodor strobelii
  misc_feature: SGI Peptide ID NO. 564601
  misc_feature (44)..(142): Pfam Id: PF08551 Pfam Desc: Eukaryotic integral membrane protein (DUF1751)
  misc_feature (1)..(359): NCBI GI: 238011230 Blast Desc: [Zea mays]
  misc_feature (1)..(359): NCBI GI: 256735341 Blast Desc: [Nectria haematococca mpVI 77-13-4]
  misc_feature (1)..(359): NCBI GI: 46105410 Blast Desc: FG00333.1 [Gibberella zeae PH-1]
  misc_feature (1)..(362): NCBI GI: 39942234 Blast Desc: MGG_03197 [Magnaporthe grisea 70-15] gi|145015817|gb|EDK00307.1| MGG_03197 [Magnaporthe grisea 70-15]
  misc_feature (1)..(358): NCBI GI: 171689184 Blast Desc: protein product [Podospora anserina] gi|170944554|emb|CAP70665.1| protein product [Podospora anserina]
  misc_feature (1)..(359): NCBI GI: 116204633 Blast Desc: CHGG_10200 [Chaetomium globosum CBS 148.51] gi|88176328|gb|EAQ83796.1| CHGG_10200 [Chaetomium globosum CBS 148.51]
  misc_feature (1)..(357): NCBI GI: 85110884 Blast Desc: NCU06839 [Neurospora crassa OR74A] gi|18376094|emb|CAD21156.1| conserved [Neurospora crassa] gi|28925366|gb|EAA34444.1| conserved [Neurospora crassa OR74A]
  misc_feature (1)..(353): NCBI GI: 154291923 Blast Desc: BC1G_14264 [Botryotinia fuckeliana B05.10] gi|150846365|gb|EDN21558.1| BC1G_14264 [Botryotinia fuckeliana B05.10]
  misc_feature (1)..(359): NCBI GI: 156044396 Blast Desc: SS1G_10301 [Sclerotinia sclerotiorum 1980] gi|154694690|gb|EDN94428.1| SS1G_10301 [Sclerotinia sclerotiorum 1980]
  misc_feature (1)..(265): NCBI GI: 261356865 Blast Desc: conserved [Verticillium albo-atrum VaMs.102]
  misc_feature: Useful for introducing or modulating the production of volatile compounds
MPPRLSIPPVTRIVLAVFVLESVVAIWHNQGARGFYLEWLVLVPQLSLFYPWTFLTSTLAENNILTFVVTGLAIFQGGRYLERAWSSREFTKFLLVVSAIPNFLCFLLFIALFTLTRNESWTLTTVGGAVPLQISFLVAFSQLVPAHTVTLFRGVLSLRVPKFPLIYIGLVTALQLTPFASSASLPLALSGFITSWTYLRFYKTVFPDLDTSQPTSMRGDASETFAFSEFFPAPVKPFVAAFSDQVFSVLVAMHVCTPFSQADVTAVQSNNFVPRSAPGGVRAEAERRRALALKVLDQRLQTATTGGPASRSQSTPPVQPSGPTIQTQPQPNAQTAMTSQPGAMLGETHYDPDHDSGEKMET

SEQ ID NO: 13991 - DNA, 3587 bp, Muscodor strobelii
  misc_feature: SGI EST ID NO. CUFF.33424.1
  misc_feature: Variant of the nucleotide sequence at SEQ ID NO 13989
cgacagtcccgtcgggcacacccgactgcaacgaacccaagttaagccactgaagctgtggctgctgggagctgcttttacggttttacctaaccacctccactgtcgccaggctgaacctcagccgactcaggcgcaaagaatcagaacaccttgaagatagagatatcgcccttcactttacgcgtgtccttccgcttcacctcaactcgtcgcaccctgctcagctaccttgccttcttactgtagtctatcaaacagtgattgattgaacctctagtttgttctttttgtgtagatttggaatacaccttgacgaatacacctgccgatctgccgatttccatagcgacatactcgtaccgaatctacgcccgttcatgcatcgattccatcgcgcatgatgccaccacgccttagcataccccccgtcacgcgcattgttctcgccgtcttcgtcctcgagtctgtggtggcaatatggcataatcaaggagcccgcgggttctatctggagtggctcgttctggtgcctcagctgtcgctgttctatccgtggaccttcttgacatccaccttggccgagaacaatatcctcaccttcgtcgtcaccggtcttgccatcttccagggcggccgctatctggagagggcttggtcgtcgagagagttcaccaaattccttctcgtcgtttcagccatccccaatttcctgtgttttctactcttcatagctctgttcactcttactcgaaacgagtcctggacgctcactactgttggcggcgccgtccctctccagatctctttcctcgtcgctttcagccagctcgtgccggctcacaccgttacactcttccgcggtgtcctgtcgctgcgcgttcccaagttccctctgatctacatcggcctagtcacggccctccagcttacgccctttgcctcgtcggcaagcttacctctggcgctgtctggcttcatcacgagctggacctatcttcgattctacaagaccgtcttcccggacctcgatacctcccagccgacttcgatgcgaggcgatgccagcgagacctttgccttctccgaattcttccctgcccccgtcaagccatttgtcgcagctttctccgaccaggtcttcagtgtcctcgttgccatgcatgtctgcacccctttctcccaagcagatgttactgcagtgcagagcaacaacttcgtacctaggtcggcacctggaggcgttcgagccgaggctgagaggcggagggctctagcactgaaagtgctcgatcaacgactgcaaactgctactacgggaggtccagcgtctcggagccagtcgactccgcctgtccagccgagcgggccaacaatacagacgcagcctcagccaaatgcgcaaacagctatgaccagccaacccggtgctatgttgggagaaacacactacgacccagatcacgacagcggagagaaaatggagacgtgaggtagaagccatgtatggccaaagactgtatcatcttgaagatttttgctatccactttccatacccaacagcatagagtctggattgtctgtattcgtaaaggaagcatgttgcgtttggagttggtcttattgaattcgagatatcggttctttttgggggagggtcacaagcttactgacgcgtcttacggagctgcgtcctggtaaacgctctcgtttccctcggtttcacataatctaaacatggcgttcgagtgcctcgtttgaagctgggaggcagggcaaacaaattactgcaatgaacgactatctaatggtatccccaatgaccatctaaatgacgattgatagtgtcaacatcttcttcatctaaggagcggcctacgtatagatctactaattacgatcgcaaacaccatgccgtgaagggtatggaatacatacaccttggatgtaaaccaacatatataggaagtcaaccggcgttgtgccgtgcgctccagcgtcccgaatagtatttgtagcgttaagccttgaccttggtgattgaatcaacacgatgagtatcaaaatcatcaatgaatcggtagacaaaacgtaggatgattcttacatagaacagagtataaccgaatgattattattgcgtgcttgatatgcggaatgcaggtcaatcaactgatattaacccgatatatgacgaactatacataatacagccgtgtctgaggggataaccacggtctagttaagcccgttgccttgtaatcattagatttttggacatatgatactaatgacaatataccacgtgtatttatcactaaccaatgcgttgtcttttcaaccatcggtctcataccgggctcgccatttgacggcagacatctcaaccattccacccccgtgtccaatatcaataacgtggcgtctgactgtggcttgtaacgacgcgatcacgatgcgtttctttaggccgagtggcgactgttcaacaagtgttgcgaaacatcaagcagggacggtctatctcgtacattggtcagtcgtcgcaccgcatctaaaagtacagctctggaagcacaaccggatcggctggacacacgagcacaggtgtatcgctcgagttgcgagttgtcagtcactctcgcccaccgcttgatgtctgtctggcgactgcgggcatacaatcatcggtacgtcctaggtaaggtatgtaacgtaatatgggattgctgcccatctatcagaccggcgagacaaccccagattgccggtcacgagcaatctgcaacttgacacgacagcgggtggcatggtagcgcgcacagggaaacgaacggcgtcataggtccgtagggaggtaggcaagcgtcttgcgcgttatttgtatatgcgtgtgtttccccagcgtgtgcgtcttgtgaatcggtaatctcacgcagatcttcgggagcggcatgttttagaatatatccacgctgccctttttcttcgaacctgatcctcccgagacgatttcgatatacacaagaatccctgtggcgtcacattgcatctcacattcgccgtttgcctcgtgccctgccgagcctgcctgcccgggatgagtataaatcctccagaactatgctgcaatccttggcaggtcgtaatgttggtaatatcataagtttgctccaacttcctgcagccgacgcagattctaacccactcctcatcttactctctgatagaccacgactacttggcaaagatctgagtatatcaaatagacgctgaaagggatcggaatgtagaactcatcccatctgacttaaccgtgctccctgctagtggaaggatgcagatagccagacgacctgcttgtaacagacttattacactttgtggcttgcatccggcggctggccccgactttggaaacgctgtgcgatagccgttcggtgcttgtcttgcacgtattgagcataatgccgccgataggtaacgagacaggtgaagcgaggacggcggagctttgcatatagacatatcgaccacgccgtgacacatcacctgcatgcgatattgcccctagctactatccggt

SEQ ID NO: 13992 - DNA, 1944 bp, Muscodor strobelii
  misc_feature: SGI cDNA ID NO. 564602
  misc_feature: Reduced expression when VOC is produced
  misc_feature: Encodes the peptide sequence at SEQ ID NO 13993
atgaaggagtatttagactccaatcgagtcaatttcttgatttggaggtatcttatagaaggaaattatcgagaaacagccgttaaatttcagaaagaatggcatgttcaagatcctcatcgggaattggacttcgcgccgaacgtcaagagtcatgcactagtcaatgttttaaacaaaggtttgctgtttcagtcactagaaagagagcattcacaggcgacccaggtacctggtgatgcagcagcgcaggcggcactggccgaggcgatgcagctaggggtctttggtccactgcttgcacatccaccgcctcaaccacagcaaccagatgaaattgagatggatgctgaggcagagcctgacactgttattcaaccaataccagcaccaacgccaataattacaggaacatcacctgcagcaaatgcagcgacgaccgtagcacctccgacaggtgaatcagataacaaccgaaagcgccaggtcgacaggcaacaaccgccacttgtaaatggttccccggccaagcggccacgactaagtaatgggtacgaaaatggggtggatgcagccacaacccccatggaactggatggcccggaccaccaaagcgacaatcatgcttacccgtctcccctggagggcgaacaggcgccaacaccactaccgcgtactgacggccccgaacagggcacacaggtcgagaaggtcgaggaattgtcttccgaaaccacgttcatccccctcggctcgggtctggatgatgcacccgcatcctcgcctgcaaccgccctacccaggataaacggtgacaatgcgccagtgctactgcactgccaatggcacccgcgagatccctccatcttggcggctgctggaaccgatgcgctagcccgcatttggaacgtttctcgtggggcaacagccgactctgcgtctgagagtcacgtgaacggtgttgtaccactgttccaaaatctagtcgaagacgatacatcttcaaaagctaccgtgactgctatggcatggaattgggatggcacagcaattgccatcgctactgactctgacaacaaggccacattgacgctttggaggcctgatggcatgcaaatctctcatttcgaagtcgctgaaccacctatcataaagctaaaatggaatcccaacaacaacgctatcctagccattgctccggaccaagaaggcgctctagtcacgatctactcggcgtcaatgaccaacacaattacctatttcctaccgaagcatgaccttgatgcggaaccgctggatgccgcatggaccagtgaaaccgaattcttactctgcggaggcgagctaatggtcttattgaaatttgccgacggcgaaataacagagattcaaaagtacaaaactcgtgaaggagatagcattacgcaggtacattttgatgttcaaacatccttggctgctacatgtggcgagaaagggttcgttgacgtctgggatagatcaggaaagcgacgcgcaatcgaggctcattgtgatctcgtgacagctttggcttggcaaccattacaggcgccaatgactgataatgagcggctgcttgcgtcagggggcgaagatggaggcatattcatctggaatgcacttgccgaaggtggtaaggcgaagtgctctatgactatgggctcggccatcgttgcgcttgccttcacaccagatggagcattcatcgccggtgctaccagtgataagattctcatatggaaagtcggcgaccagaccatgcctcgtgcaagttggagtcgacctcaccaatccggatggtttagcccgcgaataaacggtgaaacggaagatgaagatgagcattgccttaactgggattctactggtcataaactggcatatggcgtcaacaatcaactcgccgtcatcaatttcaggtga

SEQ ID NO: 13993 - protein, 647 aa, Muscodor strobelii
  misc_feature: SGI Peptide ID NO. 564602
  misc_feature (8)..(34): Pfam Id: PF08513 Pfam Desc: LisH
  misc_feature (501)..(546): Pfam Id: PF00400 Pfam Desc: WD domain, G-beta repeat
  misc_feature (8)..(33): Pfam Id: PF08513 Pfam Desc: LisH
  misc_feature (1)..(647): NCBI GI: 39942236 Blast Desc: MGG_03198 [Magnaporthe grisea 70-15] gi|145015816|gb|EDK00306.1| MGG_03198 [Magnaporthe grisea 70-15]
  misc_feature (2)..(647): NCBI GI: 256734612 Blast Desc: [Nectria haematococca mpVI 77-13-4]
  misc_feature (2)..(641): NCBI GI: 46105408 Blast Desc: FG00332.1 [Gibberella zeae PH-1]
  misc_feature (1)..(647): NCBI GI: 261356866 Blast Desc: conserved [Verticillium albo-atrum VaMs.102]
  misc_feature (1)..(647): NCBI GI: 116204635 Blast Desc: CHGG_10201 [Chaetomium globosum CBS 148.51] gi|88176329|gb|EAQ83797.1| CHGG_10201 [Chaetomium globosum CBS 148.51]
  misc_feature (1)..(647): NCBI GI: 171689186 Blast Desc: protein product [Podospora anserina] gi|170944555|emb|CAP70666.1| protein product [Podospora anserina]
  misc_feature (4)..(647): NCBI GI: 85110882 Blast Desc: NCU06838 [Neurospora crassa OR74A] gi|18376095|emb|CAD21157.1| conserved [Neurospora crassa] gi|28925365|gb|EAA34443.1| [Neurospora crassa OR74A]
  misc_feature (317)..(647): NCBI GI: 154291917 Blast Desc: BC1G_14261 [Botryotinia fuckeliana B05.10] gi|150846362|gb|EDN21555.1| BC1G_14261 [Botryotinia fuckeliana B05.10]
  misc_feature (148)..(517): NCBI GI: 156044398 Blast Desc: SS1G_10302 [Sclerotinia sclerotiorum 1980] gi|154694691|gb|EDN94429.1| SS1G_10302 [Sclerotinia sclerotiorum 1980]
  misc_feature (5)..(647): NCBI GI: 115389868 Blast Desc: conserved [Aspergillus terreus NIH2624] gi|114194835|gb|EAU36535.1| conserved [Aspergillus terreus NIH2624]
  misc_feature: Useful for introducing or modulating the production of volatile compounds
MKEYLDSNRVNFLIWRYLIEGNYRETAVKFQKEWHVQDPHRELDFAPNVKSHALVNVLNKGLLFQSLEREHSQATQVPGDAAAQAALAEAMQLGVFGPLLAHPPPQPQQPDEIEMDAEAEPDTVIQPIPAPTPIITGTSPAANAATTVAPPTGESDNNRKRQVDRQQPPLVNGSPAKRPRLSNGYENGVDAATTPMELDGPDHQSDNHAYPSPLEGEQAPTPLPRTDGPEQGTQVEKVEELSSETTFIPLGSGLDDAPASSPATALPRINGDNAPVLLHCQWHPRDPSILAAAGTDALARIWNVSRGATADSASESHVNGVVPLFQNLVEDDTSSKATVTAMAWNWDGTAIAIATDSDNKATLTLWRPDGMQISHFEVAEPPIIKLKWNPNNNAILAIAPDQEGALVTIYSASMTNTITYFLPKHDLDAEPLDAAWTSETEFLLCGGELMVLLKFADGEITEIQKYKTREGDSITQVHFDVQTSLAATCGEKGFVDVWDRSGKRRAIEAHCDLVTALAWQPLQAPMTDNERLLASGGEDGGIFIWNALAEGGKAKCSMTMGSAIVALAFTPDGAFIAGATSDKILIWKVGDQTMPRASWSRPHQSGWFSPRINGETEDEDEHCLNWDSTGHKLAYGVNNQLAVINFR

SEQ ID NO: 13994 - DNA, 4884 bp, Muscodor strobelii
  misc_feature: SGI EST ID NO. CUFF.33420.0
  misc_feature: Variant of the nucleotide sequence at SEQ ID NO 13992
gatctgtcgaagcttaagcaaggcggcacagccgccaggcttgggtgtttgatgacttcgacgattcatacaagcttatttctcgctcacattccatctatcgcagagtacctactaccactaggtagattgactactcgataaagttgcatgcacaccgtacagaaacgtcactggacttgccccggctcgcctactgggctattgccaagctcgttacctaacagcttgccctcgaaatggtctgtttgcactggaatctggccagtactggcccttacagcagcagatatgatgtacatatagaagcggttggtgaaagaaatgctcaaatgggcttcctggtagtagtattttttctcatgatcgttatcacggtgtgcgagccttattactatttagcggcggtgttggcaaatatcctgcgttgaaaaagatcggagcaaatctaataggaaccccaagcccgtccctgcaatcactgcccatgttgaaatgcagacagaattaagcgatctatgtattgtggtggcccgtcaggcttctcgtcataaaatggggcttctgattaccacccaacgagaatgcaggccacagatctccatctgggctgccgaacaacccaactaactgaataatcaagcaatcaaccctgggccaggatcttcctgaccaacacagagggaagaccagacaacttggcatccagtgaagaactgtggcaaatgttctgatgaacacttcagattctagcactattccgacatttggctaagtccgttgcttatctgtcgcgtgaaaatatggtaatgggatgtgacgatatgatgcagacatttaattttccctcgctgcgtatgtatgctggagtagcatcgtaattcgttggctcgggaggaaaagaagagggagaaatatgaataactgcggtatcgaatcatgtttgagacagctgaagcagtctaggtgcaggggttttcatcatcagtacatgggtacttgaagatcttcaaaatggtggcacgggatgttgaccgggaggatcagattggagatggcagacagtcgagacggtcgagacggttagagaaccataacatggttgaggaatgattctatgctgctttgcacataacaaatactccatatgatagcaagaagcatacaatagccagaaatgatgcagcaaatgacctcaagagcgggcgaacggtgagttcaagtgcaggctgggatggatggatgagattgaatcgagaagtctgaactttgagggtacgtaccgcatcttgttttctcttgcccactcctcccgtgcttgcgctctaccgtccaaacacctaaactcctcacccatagcaccgttcatctttgcaaggcacctatctgctcacataaccgagaagaccttagccaggcgacaatatcataagacatccagtgatgactgcatccatcgcaaatcaagagccaaatccccaagcctggtaggccccggtgaagacgtgcagactattgcgaattgaactctggtgctcctagtcggttctgcacgttggacgcgttatgcctatttgggcctgatggtggagatgcaagacttctagttttagccccgacacagacatggaccttggatcattcagggctcatcaactcccgtctctctcatcattcttgtcttcgacatctcaattctcaaaatccgtctctcgtcgacgccgcgaccgttgcttgctcacagtcttcagtgtctccgtcatcgacagctccaggactagcgcgtcactatagctacaaaacctgcgacgcagcccaccatgaaggagtatttagactccaatcgagtcaatttcttgatttggaggtatcttatagaaggaaattatcgagaaacagccgttaaatttcagaaagaatggcatgttcaagatcctcatcgggaattggacttcgcgccgaacgtcaagagtcatgcactagtcaatgttttaaacaaaggtttgctgtttcagtcactagaaagagagcattcacaggcgacccaggtacctggtgatgcagcagcgcaggcggcactggccgaggcgatgcagctaggggtctttggtccactgcttgcacatccaccgcctcaaccacagcaaccagatgaaattgagatggatgctgaggcagagcctgacactgttattcaaccaataccagcaccaacgccaataattacaggaacatcacctgcagcaaatgcagcgacgaccgtagcacctccgacaggtgaatcagataacaaccgaaagcgccaggtcgacaggcaacaaccgccacttgtaaatggttccccggccaagcggccacgactaagtaatgggtacgaaaatggggtggatgcagccacaacccccatggaactggatggcccggaccaccaaagcgacaatcatgcttacccgtctcccctggagggcgaacaggcgccaacaccactaccgcgtactgacggccccgaacagggcacacaggtcgagaaggtcgaggaattgtcttccgaaaccacgttcatccccctcggctcgggtctggatgatgcacccgcatcctcgcctgcaaccgccctacccaggataaacggtgacaatgcgccagtgctactgcactgccaatggcacccgcgagatccctccatcttggcggctgctggaaccgatgcgctagcccgcatttggaacgtttctcgtggggcaacagccgactctgcgtctgagagtcacgtgaacggtgttgtaccactgttccaaaatctagtcgaagacgatacatcttcaaaagctaccgtgactgctatggcatggaattgggatggcacagcaattgccatcgctactgactctgacaacaaggccacattgacgctttggaggcctgatggcatgcaaatctctcatttcgaagtcgctgaaccacctatcataaagctaaaatggaatcccaacaacaacgctatcctagccattgctccggaccaagaaggcgctctagtcacgatctactcggcgtcaatgaccaacacaattacctatttcctaccgaagcatgaccttgatgcggaaccgctggatgccgcatggaccagtgaaaccgaattcttactctgcggaggcgagctaatggtcttattgaaatttgccgacggcgaaataacagagattcaaaagtacaaaactcgtgaaggagatagcattacgcaggtacattttgatgttcaaacatccttggctgctacatgtggcgagaaagggttcgttgacgtctgggatagatcaggaaagcgacgcgcaatcgaggctcattgtgatctcgtgacagctttggcttggcaaccattacaggcgccaatgactgataatgagcggctgcttgcgtcagggggcgaagatggaggcatattcatctggaatgcacttgccgaaggtggtaaggcgaagtgctctatgactatgggctcggccatcgttgcgcttgccttcacaccagatggagcattcatcgccggtgctaccagtgataagattctcatatggaaagtcggcgaccagaccatgcctcgtgcaagttggagtcgacctcaccaatccggatggtttagcccgcgaataaacggtgaaacggaagatgaagatgagcattgccttaactgggattctactggtcataaactggcatatggcgtcaacaatcaactcgccgtcatcaatttcaggtgacaaagcaccacccactcaagagcacctgctcaggtttaggacaacgcacgcctccgatgacctagtggtaagcgactcgaagcatcacccgtggaaatccgacagatcaacgagagcattctaccttcaattgaaaactcggccttttggccctttgttctttggtttaggatgcgatagacacttcgcacattctttcatacatacgctgactcattatttttttatacgacagctggtcacaaaagtaacggcatgcaacatacttggtcagacatcggccggacattataagttagagagacgtgtacaaataagactcataaaagcactaacaacattggtaatgccactggtacggccttgcggagacgggtcgttaacaggattactggttgtcatcatacgatacccttgattggctcatcatgacgagatgacgaagacgtttcattaagtttgaaatctcgcttgggctttggaacctttggagactatgggacggtgaggatctttgtgtatgtacaacaatgcgaaaggagcaggtagagcgtcatcatgaggcatcaatgcgaatgccatcgaagattcatttgtacacggaatgcttaccaaccagacatttagcacattcgctaatgaaaaaacgagtcggaactaccttccggcctaaatacttatgattgatgttaccttctaacataccgctgtctattctagcgaccgaccaccataattttctccaatcctcaatcgcattctcattccaacagtgtctcccgtttcaagtagagtcagctcttccacctcaacaacgtgaaggtgtgctttggaaacacgaacgggccctcgccgtcccaaatgctctctgtaatgttcacctcgtctttgccctccgtgttggttgccgtaagttccgaagccgttacggaatacacactcacatctttgccggcacccttgacatctaccttgaaatcttcctggtcattgatattgaccacggccagactgacgaaccccgccttatctaccgacgcgcttacgtcaagccatggtgcaccaccttcgagcgagccttgaagccatttcggttcggtctcgccctcataagtcccgg

SEQ ID NO: 13995 - DNA, 1512 bp, Muscodor strobelii
  misc_feature: SGI cDNA ID NO. 564603
  misc_feature: Encodes the peptide sequence at SEQ ID NO 13996
atgaccaccttcaccaaaatacgcggcaatgagactccagtcatagaagtcgacgcttctaagcgtttgtctgagatagatcctatgacatatggcggatttaccgagcacatgggtcgctgcatctacggcggaatttacgatccaaataacccattatcggataccaatggttttcgcaaggacgtcatcgaggcattgcgtgagctgaacgtacccgtgatccggtatccagggggcaacttcgtagccacgtaccactggcaagacggtatcgggccaagggaaaaccgtccttcacgaccagagctggcatggctcggtctagagacaaatcacttcggcacagacgaattcatgacctggcttgatgtgctatcagaaggtctaccggatgggaagcgtgtagagccatacatctgtctaaacatgggaaccggcacactagatgaagcactggcatgggtcgaatactgcaacggaacactcgacacgtactacgccaatcttcgccgaagaaacggtcatccagaaccgtataatgtgaagtactgggcgctaggaaacgagatttggggaccatggcaaatcgagcagatgacagccgaagactacgccaagaaagcaaatcaatgggcaaaagcacttcgccttctcgatccgagtattgtccttattctgtgtggttgcgacggcataaactcctgggatcatacagttttgcaggcttgcgtgcctgttgttgatatgcatagtatacatatgtacactgctgcaggaaagaaccatttgaaaaatgctacggctcccctagctgctgagcgcgcgatcaaaattaccgcctcgctaatcgaactcgcgcgcatcgagcgatctgttcctgtgagcaagccacctacgaaaatttgcttcgatgagtggaatgtctgggatcccgagcgtgcaccgggtgacaaaggtgccgaagagacatacacactctccgacgccctcgcagtagccgtctggctcaatgtcttcatacggcaaagcgcacacataggaatggcgaacatcgcacagtccgtaaacgtgatatcgcccctgatgacaacacccaatggtattgtaaagcagagcacctggtggccgctcctcctatactcaaaatacatgcgaggctggactgttgcaacacacgtacagtccgggacttatgagggcgagaccgaaccgaaatggcttcaaggctcgctcgaaggtggtgcaccatggcttgacgtaagcgcgtcggtagataaggcggggttcgtcagtctggccgtggtcaatatcaatgaccaggaagatttcaaggtagatgtcaagggtgccggcaaagatgtgagtgtgtattccgtaacggcttcggaacttacggcaaccaacacggagggcaaagacgaggtgaacattacagagagcatttgggacggcgagggcccgttcgtgtttccaaagcacaccttcacgttgttgaggtggaagagctga

SEQ ID NO: 13996 - protein, 503 aa, Muscodor strobelii
  misc_feature: SGI Peptide ID NO. 564603
  misc_feature (305)..(495): Pfam Id: PF06964 Pfam Desc: Alpha-L-arabinofuranosidase C-terminus
  misc_feature (305)..(476): Pfam Id: PF06964 Pfam Desc: Alpha-L-arabinofuranosidase C-terminus
  misc_feature (1)..(503): NCBI GI: 156065837 Blast Desc: SS1G_00929 [Sclerotinia sclerotiorum 1980] gi|154691788|gb|EDN91526.1| SS1G_00929 [Sclerotinia sclerotiorum 1980]
  misc_feature (1)..(503): NCBI GI: 154301747 Blast Desc: BC1G_10025 [Botryotinia fuckeliana B05.10] gi|150855687|gb|EDN30879.1| BC1G_10025 [Botryotinia fuckeliana B05.10]
  misc_feature (1)..(503): NCBI GI: 238498652 Blast Desc: alpha-L-arabinofuranosidase [Aspergillus flavus NRRL3357] gi|220693835|gb|EED50180.1| alpha-L-arabinofuranosidase [Aspergillus flavus NRRL3357]
  misc_feature (1)..(503): NCBI GI: 255940276 Blast Desc: Pc16g05680 [Penicillium chrysogenum Wisconsin 54-1255] gi|211585530|emb|CAP93238.1| Pc16g05680 [Penicillium chrysogenum Wisconsin 54-1255]
  misc_feature (1)..(503): NCBI GI: 115491313 Blast Desc: conserved [Aspergillus terreus NIH2624] gi|114197144|gb|EAU38844.1| conserved [Aspergillus terreus NIH2624]
  misc_feature (1)..(503): NCBI GI: 70995185 Blast Desc: alpha-L-arabinofuranosidase [Aspergillus fumigatus Af293] gi|66849992|gb|EAL90319.1| alpha-L-arabinofuranosidase [Aspergillus fumigatus Af293] gi|159131113|gb|EDP56226.1| A1163]
  misc_feature (1)..(503): NCBI GI: 46126329 Blast Desc: FG07542.1 [Gibberella zeae PH-1]
  misc_feature (1)..(502): NCBI GI: 145239287 Blast Desc: An08g01710 [Aspergillus niger] gi|134076796|emb|CAK39851.1| protein product [Aspergillus niger]
  misc_feature (1)..(503): NCBI GI: 212542883 Blast Desc: alpha-L-arabinofuranosidase [Penicillium marneffei ATCC 18224] gi|210066503|gb|EEA20596.1| alpha-L-arabinofuranosidase [Penicillium marneffei ATCC 18224]
  misc_feature (1)..(503): NCBI GI: 121702011 Blast Desc: alpha-L-arabinofuranosidase [Aspergillus clavatus NRRL 1] gi|119397413|gb|EAW07844.1| alpha-L-arabinofuranosidase [Aspergillus clavatus NRRL 1]
  misc_feature (12)..(402): SWISSPROT Homolog: EC 3.2.1.55 Alpha-N-arabinofuranosidase
MTTFTKIRGNETPVIEVDASKRLSEIDPMTYGGFTEHMGRCIYGGIYDPNNPLSDTNGFRKDVIEALRELNVPVIRYPGGNFVATYHWQDGIGPRENRPSRPELAWLGLETNHFGTDEFMTWLDVLSEGLPDGKRVEPYICLNMGTGTLDEALAWVEYCNGTLDTYYANLRRRNGHPEPYNVKYWALGNEIWGPWQIEQMTAEDYAKKANQWAKALRLLDPSIVLILCGCDGINSWDHTVLQACVPVVDMHSIHMYTAAGKNHLKNATAPLAAERAIKITASLIELARIERSVPVSKPPTKICFDEWNVWDPERAPGDKGAEETYTLSDALAVAVWLNVFIRQSAHIGMANIAQSVNVISPLMTTPNGIVKQSTWWPLLLYSKYMRGWTVATHVQSGTYEGETEPKWLQGSLEGGAPWLDVSASVDKAGFVSLAVVNINDQEDFKVDVKGAGKDVSVYSVTASELTATNTEGKDEVNITESIWDGEGPFVFPKHTFTLLRWKS

SEQ ID NO: 13997 - DNA, 536 bp, Muscodor strobelii
  misc_feature: SGI EST ID NO. CUFF.33394.0
  misc_feature: Variant of the nucleotide sequence at SEQ ID NO 13995
agcagatgacagccgaagactacgccaagaaagcaaatcaatgggcaaaagcacttcgccttctcgatccgagtattgtccttattctgtgtggttgcgacggcataaactcctgggatcatacagttttgcaggcttgcgtgcctgttgttgatatgcatagtatacatatgtacactgctgcaggaaagaaccatttgaaaaatgctacggctcccctagctgctgagcgcgcgatcaaaattaccgcctcgctaatcgaactcgcgcgcatcgagcgatctgttcctgtgagcaagccacctacgaaaatttgcttcgatgagtggaatgtctgggatcccgagcgtgcaccgggtgacaaaggtgccgaagagacatacacactctccgacgccctcgcagtagccgtctggctcaatgtcttcatacggcaaagcgcacacataggaatggcgaacatcgcacagtccgtaaacgtgatatcgcccctgatgacaacacccaatggtattgtaaagcagagcacctggtgg

SEQ ID NO: 13998 - DNA, 552 bp, Muscodor strobelii
  misc_feature: SGI cDNA ID NO. 564604
  misc_feature: Elevated expression when VOC is produced
  misc_feature: Encodes the peptide sequence at SEQ ID NO 13999
atgagcgggcaagggacatcaactcccaagcccaaaaagagctccagcagcaccgtcatcccgctcgaatccgcagataaaacggaagcgacaaacagtcgtttagcgcgaggtaggatcggcgagtacaactcagactcggacgatagtatgggggactgggcaatggaagcagagagcccgacccagttcgactcttcggccgcggcggaagttggaccttctcgcgtgaaatcgaaggagaagactagcaagaagaaggacaaggacggcaagaaaattcccgaatccttccttgacctggagcgtaaacgccttgcatacgacatttggaccaatcccgagttgatcatgatgaaatctttccaagacaacgacacttacgcaagcacacgcaagaagtatcaagacatatactacggcgtcccaccacgacagcctctgccacagacgaataaaaaggacccaaagaataagtccttgtctcgcaacatttccagtgatcctgcgttttcacgagagtcgtctccttgggatgactggaatgagtga

SEQ ID NO: 13999 - protein, 183 aa, Muscodor strobelii
  misc_feature: SGI Peptide ID NO. 564604
  misc_feature: Useful for introducing or modulating the production of volatile compounds
MSGQGTSTPKPKKSSSSTVIPLESADKTEATNSRLARGRIGEYNSDSDDSMGDWAMEAESPTQFDSSAAAEVGPSRVKSKEKTSKKKDKDGKKIPESFLDLERKRLAYDIWTNPELIMMKSFQDNDTYASTRKKYQDIYYGVPPRQPLPQTNKKDPKNKSLSRNISSDPAFSRESSPWDDWNE

SEQ ID NO: 14000 - DNA, 2228 bp, Muscodor strobelii
  misc_feature: SGI EST ID NO. CUFF.33409.0
  misc_feature: Variant of the nucleotide sequence at SEQ ID NO 13998
ttagaagtgacgcccaacagtgaacttcactcaaagttgatcgtccataatcctattgaatactgtacgggtctttcatacctatttgatcattcatcacaaatgcaccgtattcctgaccagtatcactcaatcacggcccctttctgagggtgtagccgacaagatgagcgggcaagggacatcaactcccaagcccaaaaagagctccagcagcaccgtcatcccgctcgaatccgcagataaaacggaagcgacaaacagtcgtttagcgcgaggtaggatcggcgagtacaactcagactcggacgatagtatgggggactgggcaatggaagcagagagcccgacccagttcgactcttcggccgcggcggaagttggaccttctcgcgtgaaatcgaaggagaagactagcaagaagaaggacaaggacggcaagaaaattcccgaatccttccttgacctggagcgtaaacgccttgcatacgacatttggaccaatcccgagttgatcatgatgaaatctttccaagacaacgacacttacgcaagcacacgcaagaagtatcaagacatatactacggcgtcccaccacgacagcctctgccacagacgaataaaaaggacccaaagaataagtccttgtctcgcaacatttccagtgatcctgcgttttcacgagagtcgtctccttgggatgactggaatgagtgagctatgaagtgagcagtggtatctcgtgtacaatggaccttgcgcggacaagaacagaatgagccgtagtgacagttgatcaatcacgatgctacttttccattgatgtagcaattaacaagttttgtccacactcatccatgagaaattgtaattgaaatcagaaagtgaccattgcatcggggaatgcgaaatctaacagctataattcaaggtggatatgaaagatagttccgttgaagaaatttcatctaagtggcccaacgtccacctgaactctcaagttgcgacccgccactgaggaccatatctctttttatagtcattgaagtacgacgtattgtagagaaggccatcgccttcatcctgcatcgcttcatgccgattttccggccagttgtcaaagatccagccggcatatacaaaaagcggataagcttgctcgaatagatcaattttgcaatggggatatcgtatctgaagtatttcgtcgttatttggccgcccattttgtcctggtagaccaccagtcttgccttgaagacgtatgcccttgatttgaatacctcggaaagaaagacgttccaacttcaggaacttgtgattgttttcgatcagtagccgaagtacggatctacaaaacaagacgtctccccggtctgctccaggattgatgaagtgccctcgtttattatctcctttgtattctggtttgggatcgccgtcgcctacagtgtcaccgcactccatagggagtcgatgctctaggataagctctcttagcgtaccgccgacagcttcaagaagggtaacccattccatgttcagaatctgttcgtatcgatgtggaatagacaagaaagaatcatgatttagaatgtagctactctcaccggtgtacggcttgaccaaatgaaggtgagtaagtgccgtgagtttgggaggtagggatcttgggagccagataggtccatgcaatgcccatggagggtcctcatcatcggactcatcgtcagagctttcgccttctgattcgtcatcgccatcgtcatcagacgcatcctcctcttcatcttcggcaatattggcgaaactttccgggtcggtagaattacccttgtccttttcaagagcaagtgcttcggcgccatgctctaggtagtgcaacgcttcttcttcagttactcttttatgatcaccttcgtttgccagcaagttgttcaagtaaggtacatcgtctgttggtgttgccaacaaaccaatatccaggtggctgatattttcggcgttattacagatgtttctgacaaaagcacctgggagatatccacgaagtttgaggtttcgtaactccggcattcgaatttccggagccttaggtggatgacccttggtcacaggaagaccgatgagctccaaagagcgtagctgatgaagacttgcgagcacttcggcagcttcatcgtcgactgcaattgacaaacacagcgagcggacgtaactcgagatt

SEQ ID NO: 14001 - DNA, 1707 bp, Muscodor strobelii
  misc_feature: SGI cDNA ID NO. 564605
  misc_feature: Elevated expression when VOC is produced
  misc_feature: Encodes the peptide sequence at SEQ ID NO 14002
atgactccaaaattagtctcattaccgaacgaggttataatctcgattgtgtcttaccttcggacaccagaccacgcggctctcacgcgaacatgcaagaatctcaatgctgtgcttacgccgctactgtggagcgagatcgagttgcaccacagcggaacccatgaaggcgtctgtgtcgaatcagaaatctgggatctgcagtccaagaggcacaaagggcaagacttggctatgaccaaggatctgaccgagaaagctgaatatccttataagaagctagtgtacgaaccatcgcgacgcaagtacgctcagcctgaccttgatccgttagactgggaaaagtacttttcccatgaacggcagcggatctacggacgagccacagacgcttgcaaccggagaaacaatcagttcggtagagaggagaagtttgtggtcgcaaggaggttcacttctaaagaacgctggactgaaatctcgagttacgtccgctcgctgtgtttgtcaattgcagtcgacgatgaagctgccgaagtgctcgcaagtcttcatcagctacgctctttggagctcatcggtcttcctgtgaccaagggtcatccacctaaggctccggaaattcgaatgccggagttacgaaacctcaaacttcgtggatatctcccaggtgcttttgtcagaaacatctgtaataacgccgaaaatatcagccacctggatattggtttgttggcaacaccaacagacgatgtaccttacttgaacaacttgctggcaaacgaaggtgatcataaaagagtaactgaagaagaagcgttgcactacctagagcatggcgccgaagcacttgctcttgaaaaggacaagggtaattctaccgacccggaaagtttcgccaatattgccgaagatgaagaggaggatgcgtctgatgacgatggcgatgacgaatcagaaggcgaaagctctgacgatgagtccgatgatgaggaccctccatgggcattgcatggacctatctggctcccaagatccctacctcccaaactcacggcacttactcaccttcatttggtcaagccgtacaccggtgagagtagctacattctaaatcatgattctttcttgtctattccacatcgatacgaacagattctgaacatggaatgggttacccttcttgaagctgtcggcggtacgctaagagagcttatcctagagcatcgactccctatggagtgcggtgacactgtaggcgacggcgatcccaaaccagaatacaaaggagataataaacgagggcacttcatcaatcctggagcagaccggggagacgtcttgttttgtagatccgtacttcggctactgatcgaaaacaatcacaagttcctgaagttggaacgtctttctttccgaggtattcaaatcaagggcatacgtcttcaaggcaagactggtggtctaccaggacaaaatgggcggccaaataacgacgaaatacttcagatacgatatccccattgcaaaattgatctattcgagcaagcttatccgctttttgtatatgccggctggatctttgacaactggccggaaaatcggcatgaagcgatgcaggatgaaggcgatggccttctctacaatacgtcgtacttcaatgactataaaaagagatatggtcctcagtggcgggtcgcaacttga

SEQ ID NO: 14002 - protein, 568 aa, Muscodor strobelii
  misc_feature: SGI Peptide ID NO. 564605
  misc_feature (3)..(49): Pfam Id: PF00646 Pfam Desc: F-box domain
  misc_feature (5)..(223): NCBI GI: 256731207 Blast Desc: NECHADRAFT_85221 [Nectria haematococca mpVI 77-13-4]
  misc_feature (6)..(56): NCBI GI: 256726358 Blast Desc: NECHADRAFT_68745 [Nectria haematococca mpVI 77-13-4]
  misc_feature (5)..(410): NCBI GI: 256724120 Blast Desc: NECHADRAFT_24855 [Nectria haematococca mpVI 77-13-4]
  misc_feature: Useful for introducing or modulating the production of volatile compounds
MTPKLVSLPNEVIISIVSYLRTPDHAALTRTCKNLNAVLTPLLWSEIELHHSGTHEGVCVESEIWDLQSKRHKGQDLAMTKDLTEKAEYPYKKLVYEPSRRKYAQPDLDPLDWEKYFSHERQRIYGRATDACNRRNNQFGREEKFVVARRFTSKERWTEISSYVRSLCLSIAVDDEAAEVLASLHQLRSLELIGLPVTKGHPPKAPEIRMPELRNLKLRGYLPGAFVRNICNNAENISHLDIGLLATPTDDVPYLNNLLANEGDHKRVTEEEALHYLEHGAEALALEKDKGNSTDPESFANIAEDEEEDASDDDGDDESEGESSDDESDDEDPPWALHGPIWLPRSLPPKLTALTHLHLVKPYTGESSYILNHDSFLSIPHRYEQILNMEWVTLLEAVGGTLRELILEHRLPMECGDTVGDGDPKPEYKGDNKRGHFINPGADRGDVLFCRSVLRLLIENNHKFLKLERLSFRGIQIKGIRLQGKTGGLPGQNGRPNNDEILQIRYPHCKIDLFEQAYPLFVYAGWIFDNWPENRHEAMQDEGDGLLYNTSYFNDYKKRYGPQWRVAT

SEQ ID NO: 14003 - DNA, 2921 bp, Muscodor strobelii
  misc_feature: SGI EST ID NO. CUFF.33410.1
  misc_feature: Variant of the nucleotide sequence at SEQ ID NO 14001
aattattcggccacctattcgacggtcaaatttgacgttcgatcatgactccaaaattagtctcattaccgaacgaggttataatctcgattgtgtcttaccttcggacaccagaccacgcggctctcacgcgaacatgcaagaatctcaatgctgtgcttacgccgctactgtggagcgagatcgagttgcaccacagcggaacccatgaaggcgtctgtgtcgaatcagaaatctgggatctgcagtccaagaggcacaaagggcaagacttggctatgaccaaggatctgaccgagaaagctgaatatccttataagaagctagtgtacgaaccatcgcgacgcaagtacgctcagcctgaccttgatccgttagactgggaaaagtacttttcccatgaacggcagcggatctacggacgagccacagacgcttgcaaccggagaaacaatcagttcggtagagaggagaagtttgtggtcgcaaggaggttcacttctaaagaacgctggactgaaatctcgagttacgtccgctcgctgtgtttgtcaattgcagtcgacgatgaagctgccgaagtgctcgcaagtcttcatcagctacgctctttggagctcatcggtcttcctgtgaccaagggtcatccacctaaggctccggaaattcgaatgccggagttacgaaacctcaaacttcgtggatatctcccaggtgcttttgtcagaaacatctgtaataacgccgaaaatatcagccacctggatattggtttgttggcaacaccaacagacgatgtaccttacttgaacaacttgctggcaaacgaaggtgatcataaaagagtaactgaagaagaagcgttgcactacctagagcatggcgccgaagcacttgctcttgaaaaggacaagggtaattctaccgacccggaaagtttcgccaatattgccgaagatgaagaggaggatgcgtctgatgacgatggcgatgacgaatcagaaggcgaaagctctgacgatgagtccgatgatgaggaccctccatgggcattgcatggacctatctggctcccaagatccctacctcccaaactcacggcacttactcaccttcatttggtcaagccgtacaccggtgagagtagctacattctaaatcatgattctttcttgtctattccacatcgatacgaacagattctgaacatggaatgggttacccttcttgaagctgtcggcggtacgctaagagagcttatcctagagcatcgactccctatggagtgcggtgacactgtaggcgacggcgatcccaaaccagaatacaaaggagataataaacgagggcacttcatcaatcctggagcagaccggggagacgtcttgttttgtagatccgtacttcggctactgatcgaaaacaatcacaagttcctgaagttggaacgtctttctttccgaggtattcaaatcaagggcatacgtcttcaaggcaagactggtggtctaccaggacaaaatgggcggccaaataacgacgaaatacttcagatacgatatccccattgcaaaattgatctattcgagcaagcttatccgctttttgtatatgccggctggatctttgacaactggccggaaaatcggcatgaagcgatgcaggatgaaggcgatggccttctctacaatacgtcgtacttcaatgactataaaaagagatatggtcctcagtggcgggtcgcaacttgagagttcaggtggacgttgggccacttagatgaaatttcttcaacggaactatctttcatatccaccttgaattatagctgttagatttcgcattccccgatgcaatggtcactttctgatttcaattacaatttctcatggatgagtgtggacaaaacttgttaattgctacatcaatggaaaagtagcatcgtgattgatcaactgtcactacggctcattctgttcttgtccgcgcaaggtccattgtacacgagataccactgctcacttcatagctcactcattccagtcatcccaaggagacgactctcgtgaaaacgcaggatcactggaaatgttgcgagacaaggacttattctttgggtcctttttattcgtctgtggcagaggctgtcgtggtgggacgccgtagtatatgtcttgatacttcttgcgtgtgcttgcgtaagtctggtcgaaagtcagtgagcgttagaaaagttggacatgtgaaaaatcgagatatatgacatgctacatggaattgttattcacaccgatttcaagctggcagacttacgtcgttgtcttggaaagatttcatcatgatcaactcgggattggtccaaatgtcgtatgcaaggcgtttacgctccaggtcaaggaaggattcgggaattttcttgccgtccttgtccttcttcttgctagtcttctccttcgatttccttttaaaattgatgagcgacaattccaggatgggaaaaggtagaatagttcatcgtcactcacacgcgagaaggtccaacttccgccgcggccgaagagtcgaactgggtcgggctctctgcttccattgcccagtcccccatactatcgtccgagtctgagttgtactcgccgatcctacctcgcgctaaacgactgtttgtcgcttccgttttatctgcggattcgagcgggatgacggtgctgctggagctctttttgggcttgggagttgatgtcccttgcccgctcatcttgtcggctacaccctcagaaaggggccgtgattgagtgatactggtcaggaatacggtgcatttgtgatgaatgatcaaataggtatgaaagacccgtacagtattcaataggattatggacgatcaactttgagtgaagttcactgttgggcgtcacttctaa

SEQ ID NO: 14004 - DNA, 2355 bp, Muscodor strobelii
  misc_feature: SGI cDNA ID NO. 564606
  misc_feature: Elevated expression when VOC is produced
  misc_feature: Encodes the peptide sequence at SEQ ID NO 14005
atgcgcttcccccttgcggcgacagccgtattcttctcgatattctcacatccgtccgaggctcattcggtccagcgaaaccctctgaactacatcactttggttgatagcccaactttacacacgccctcgaatcgggtacatgcgcatacttcatttgatctaagcttcttcctgcatgatgtgaaagacaagatccggatagtgctcgaaccgaaccacgatgtcttgtccgacacggcgacgatccatcatcttgcgccggatggaaccatcagatacgaagaaaagatagacaggtcgcagcacaagatatataaaggacatgcctatttacaacatcctcaccactctgagtggcttaataccggctgggccagagtaacagtctttcaagacggacggaatccgttattcgaaggaacgttcaaggtcaatggaaaccagcaccatattcaacgagcttccacatataggcaaacgcgtttggccgacgacccattattagcaaagcccggagatgactacatgattgtctggagagattccgacgtgatacctgatcatcttcttctgagccaagaactcaagcgagatggtatcggtggctcgtcttcgtgctcgtcgaatttgctggattttaatgcccgtgttgaccatccagttcatatgggctgggacatccgtgaactggatcccacccacccgcaaagcatttttggccggcagaccgatacaacaactggaggcaatggagcagtcgccaacctgacaagtaccattggatcgagcgaaggttgtcctacagcaaggaaagtagctttgataggaattgcaactgattgtacatacactgcgctattccccgcgaaagccaatgttacaaacaacgttatcaacatcgtcaaccaggcgtcacaagtctatgaggacaccttcaacattaccctggggatccagaacttgactatcagtgacggggaatgccctggatcccctccggccggatcccaatggaaccaaccatgcagtaccgatgttacaatcactgatcgtcttgtgctcttctcgcaatggagaggccagttcaatgacaccaatgcctactggaccctgctcagcacctgtaatacagaagctgcggtgggtttggcatggctgggtcaactgtgcaagcagggttcggagcctaatgggaacgacaccactgctggcgccaacgttgtgatccgtactaacacggaatggcaagttttcgcacacgaaaccggacacacatttggcgcataccacgactgtgtagataccacttgtgcagacggcacgtatacggctcaacaatgctgcccgctaaactcagatacttgtgatgcaaatggtagatacatcatgaacccgtcaacgagttccggtatcacacaattctcgccgtgcacagttggaaacatttgctcggcgatgcatcgaaatagtattaactcggcttgtcttagcgataacaaaaatgtggtgaccatcacaggtcaacaatgtggcaatggtattgttgagcagggcgaggaatgcgattgtggcggagaaactggttgcaaagacaatccttgctgtgatgcctcgacatgcaaattcacgaccaattctgtgtgcgacccagggaacgaagactgttgcaccaatcaatgccagtttgcctcctcggggacaacttgtcgagccagcacaggctcatgcgatccggctgagacatgcagtggcaactcaggagactgccccgaggacaacaaggcagaagatggcacagcatgcggagccgacggcgacggattgaaatgtgcttcaggtcaatgcacctctcgaaatctgcagtgccaaacgcttgttggctcgctgattcataatgatgatacgaccgcatgtaacgaggaaacgtgtgttgtgcaatgcaaatcgtccagctcgtccctcgcctgctacaactatcagcagtatttcttggatggtacaccttgtgatggaagcggaaaatgccagaatggcaaatgtaaaggagcaagtactgctgataagatcgcagccttcttccgtggtaataaggaagtgatcataccagttgcctcggctgtaggcggccttattctcattgcaatcgcaagttgctgctgcacctgtatccgacgcaggagaaggaggaacagaataggagcagcggtgcgaccaaacggtcccaggatgccacgtcccaatggtcaggctggctggcggaataagtcgtcgaaccattctagtttcgagcagcaacagatgtggcaacagccgcctcctccagcgagatttgctacggaacgatacgcatag

SEQ ID NO: 14005 - protein, 784 aa, Muscodor strobelii
  misc_feature: SGI Peptide ID NO. 564606
  misc_feature (517)..(596): Pfam Id: PF00200 Pfam Desc: Disintegrin
  misc_feature (271)..(501): Pfam Id: PF01421 Pfam Desc: Reprolysin (M12B) family zinc metalloprotease
  misc_feature (34)..(784): NCBI GI: 154310337 Blast Desc: BC1G_07088 [Botryotinia fuckeliana B05.10] gi|150851420|gb|EDN26613.1| BC1G_07088 [Botryotinia fuckeliana B05.10]
  misc_feature (35)..(710): NCBI GI: 18376099 Blast Desc: conserved [Neurospora crassa]
  misc_feature (35)..(710): NCBI GI: 85110874 Blast Desc: NCU06834 [Neurospora crassa OR74A] gi|28925361|gb|EAA34439.1| conserved [Neurospora crassa OR74A]
  misc_feature (21)..(732): NCBI GI: 171689200 Blast Desc: protein product [Podospora anserina] gi|170944562|emb|CAP70673.1| protein product [Podospora anserina]
  misc_feature (5)..(720): NCBI GI: 256735342 Blast Desc: NECHADRAFT_98871 [Nectria haematococca mpVI 77-13-4]
  misc_feature (1)..(742): NCBI GI: 189198660 Blast Desc: ADAM 8 precursor [Pyrenophora tritici-repentis Pt-1C-BFP] gi|187982766|gb|EDU48254.1| ADAM 8 precursor [Pyrenophora tritici-repentis Pt-1C-BFP]
  misc_feature (21)..(754): NCBI GI: 261199852 Blast Desc: ADAM protease ADM-B [Ajellomyces dermatitidis SLH14081] gi|239594535|gb|EEQ77116.1| ADAM protease ADM-B [Ajellomyces dermatitidis SLH14081]
  misc_feature (3)..(752): NCBI GI: 115391277 Blast Desc: ATEG_03965 [Aspergillus terreus NIH2624] gi|114194067|gb|EAU35767.1| ATEG_03965 [Aspergillus terreus NIH2624]
  misc_feature (21)..(754): NCBI GI: 239607927 Blast Desc: ADAM protease ADM-B [Ajellomyces dermatitidis ER-3]
  misc_feature (1)..(756): NCBI GI: 225559935 Blast Desc: ADAM protease ADM-B [Ajellomyces capsulatus G186AR]
  misc_feature: Useful for introducing or modulating the production of volatile compounds
MRFPLAATAVFFSIFSHPSEAHSVQRNPLNYITLVDSPTLHTPSNRVHAHTSFDLSFFLHDVKDKIRIVLEPNHDVLSDTATIHHLAPDGTIRYEEKIDRSQHKIYKGHAYLQHPHHSEWLNTGWARVTVFQDGRNPLFEGTFKVNGNQHHIQRASTYRQTRLADDPLLAKPGDDYMIVWRDSDVIPDHLLLSQELKRDGIGGSSSCSSNLLDFNARVDHPVHMGWDIRELDPTHPQSIFGRQTDTTTGGNGAVANLTSTIGSSEGCPTARKVALIGIATDCTYTALFPAKANVTNNVINIVNQASQVYEDTFNITLGIQNLTISDGECPGSPPAGSQWNQPCSTDVTITDRLVLFSQWRGQFNDTNAYWTLLSTCNTEAAVGLAWLGQLCKQGSEPNGNDTTAGANVVIRTNTEWQVFAHETGHTFGAYHDCVDTTCADGTYTAQQCCPLNSDTCDANGRYIMNPSTSSGITQFSPCTVGNICSAMHRNSINSACLSDNKNVVTITGQQCGNGIVEQGEECDCGGETGCKDNPCCDASTCKFTTNSVCDPGNEDCCTNQCQFASSGTTCRASTGSCDPAETCSGNSGDCPEDNKAEDGTACGADGDGLKCASGQCTSRNLQCQTLVGSLIHNDDTTACNEETCVVQCKSSSSSLACYNYQQYFLDGTPCDGSGKCQNGKCKGASTADKIAAFFRGNKEVIIPVASAVGGLILIAIASCCCTCIRRRRRRNRIGAAVRPNGPRMPRPNGQAGWRNKSSNHSSFEQQQMWQQPPPPARFATERYA

SEQ ID NO: 14006 - DNA, 3367 bp, Muscodor strobelii
  misc_feature: SGI EST ID NO. CUFF.33403.0
  misc_feature: Variant of the nucleotide sequence at SEQ ID NO 14004
gtgtcccccagccctgaaactttgcttcccaaaccagacatctctcgtccgccagacgtgaaacaagctgcgaactggcattgcatttgcatctcgtgcacaggacaatagattgctgttccacctgaacgtattcttttcttctgctgcgtgtagggctgaaaatagagacgtcttgaaggcgttttagtactcaaattgtgcgggtaaagcgggaaactgtaggcaacgtcagcagcctgcagtgcggatcgtcacattcttttggctactgacaccctctaactctctcggcggcgcatccacgtcggaaacgaggcagtctagccctctctccctatcccaccggtgcaggtgttgaacgcctcgatcttttggccctccattcgcccattccaatcactaattgcgtacaaactccgcctccgccaactgcgtgtttttggtcctttggatttccccttctttggttgtaattctccctgtttacagtcaatcggcaccatcgacggttgctgcatcatcgaaacatcgattacatcggctgagacattagatcgcgaccagatcatttttaattgagtctactaatcaaggaattgttactcgtatggggttgtaaggggaggcttccattcccgttcgcgggaccttcaattccctaatcatgcgcttcccccttgcggcgacagccgtattcttctcgatattctcacatccgtccgaggctcattcggtccagcgaaaccctctgaactacatcactttggttgatagcccaactttacacacgccctcgaatcgggtacatgcgcatacttcatttgatctaagcttcttcctgcatgatgtgaaagacaagatccggatagtgctcgaaccgaaccacgatgtcttgtccgacacggcgacgatccatcatcttgcgccggatggaaccatcagatacgaagaaaagatagacaggtcgcagcacaagatatataaaggacatgcctatttacaacatcctcaccactctgagtggcttaataccggctgggccagagtaacagtctttcaagacggacggaatccgttattcgaaggaacgttcaaggtcaatggaaaccagcaccatattcaacgagcttccacatataggcaaacgcgtttggccgacgacccattattagcaaagcccggagatgactacatgattgtctggagagattccgacgtgatacctgatcatcttcttctgagccaagaactcaagcgagatggtatcggtggctcgtcttcgtgctcgtcgaatttgctggattttaatgcccgtgttgaccatccagttcatatgggctgggacatccgtgaactggatcccacccacccgcaaagcatttttggccggcagaccgatacaacaactggaggcaatggagcagtcgccaacctgacaagtaccattggatcgagcgaaggttgtcctacagcaaggaaagtagctttgataggaattgcaactgattgtacatacactgcgctattccccgcgaaagccaatgttacaaacaacgttatcaacatcgtcaaccaggcgtcacaagtctatgaggacaccttcaacattaccctggggatccagaacttgactatcagtgacggggaatgccctggatcccctccggccggatcccaatggaaccaaccatgcagtaccgatgttacaatcactgatcgtcttgtgctcttctcgcaatggagaggccagttcaatgacaccaatgcctactggaccctgctcagcacctgtaatacagaagctgcggtgggtttggcatggctgggtcaactgtgcaagcagggttcggagcctaatgggaacgacaccactgctggcgccaacgttgtgatccgtactaacacggaatggcaagttttcgcacacgaaaccggacacacatttggcgcataccacgactgtgtagataccacttgtgcagacggcacgtatacggctcaacaatgctgcccgctaaactcagatacttgtgatgcaaatggtagatacatcatgaacccgtcaacgagttccggtatcacacaattctcgccgtgcacagttggaaacatttgctcggcgatgcatcgaaatagtattaactcggcttgtcttagcgataacaaaaatgtggtgaccatcacaggtcaacaatgtggcaatggtattgttgagcagggcgaggaatgcgattgtggcggagaaactggttgcaaagacaatccttgctgtgatgcctcgacatgcaaattcacgaccaattctgtgtgcgacccagggaacgaagactgttgcaccaatcaatgccagtttgcctcctcggggacaacttgtcgagccagcacaggctcatgcgatccggctgagacatgcagtggcaactcaggagactgccccgaggacaacaaggcagaagatggcacagcatgcggagccgacggcgacggattgaaatgtgcttcaggtcaatgcacctctcgaaatctgcagtgccaaacgcttgttggctcgctgattcataatgatgatacgaccgcatgtaacgaggaaacgtgtgttgtgcaatgcaaatcgtccagctcgtccctcgcctgctacaactatcagcagtatttcttggatggtacaccttgtgatggaagcggaaaatgccagaatggcaaatgtaaaggagcaagtactgctgataagatcgcagccttcttccgtggtaataaggaagtgatcataccagttgcctcggctgtaggcggccttattctcattgcaatcgcaagttgctgctgcacctgtatccgacgcaggagaaggaggaacagaataggagcagcggtgcgaccaaacggtcccaggatgccacgtcccaatggtcaggctggctggcggaataagtcgtcgaaccattctagtttcgagcagcaacagatgtggcaacagccgcctcctccagcgagatttgctacggaacgatacgcatagtgcacatagaaagggtattgggaactcgggcttctatcttggatccgcgacgcatcatagtcgggctggggaggattgcatatatatcttatacctggatataagagggaactatgggcgttctttgggcattattcatggcatggcgttcatggcaattttttgcattgtgatgggtgggtggactttacgataatcctattggatcacggtacctgtatcttgagagcatagatcatggccgattctgcggaagtatatagatagaatcgagtatctatcaagtcacaacattactagtatttcatccagaacgatacgctgtttttggtcacagtcttcgaa

SEQ ID NO: 14007 - DNA, 2001 bp, Muscodor strobelii
  misc_feature: SGI cDNA ID NO. 564607
  misc_feature: Encodes the peptide sequence at SEQ ID NO 14008
atgggtgaagaaagcaaggcgccagtggtcgctgaggcgcacatggtagacacataccatccaccacagaagatgcttgacaagcatcccagcaaaccacatatcgccaaccttgaggaataccaacaattataccaacaatccatcaccgaacctgagaaattctggggtgagaaggcaagggagcttttgacatggcagcgggactttcagacagttcgctcgggcagcctcgacaacggtgatgtggcttggttcctcgaaggtcaactcaacgcggcctacaactgtgtcgacagacatgctttcaaggatcctaataaggttgctataatctacgaggccgacgagcccaatgagggccgcaacttgacctacggcgagctgctgcgcgaggtctcaaaggtagcgtacgtactcaaggatatgggtgtgcgcaaaggagacaccgttgctgtctacctacctatggttcccgaagctctcattgctctgcttgccattgttcgcattggtgccgttcattcggttgtgtttgccgggttctcgtccgattctctgcgcgaccgtgtcatcgatggtcagtcaaaggtcgttatcacttccgatgagggcaagcgcggtggcaagcttattggcaccaagaagattgtggatgatgcgctcaagcagtgtcccgacgtcactggtgtcttggtattcaagcgcaccggtgctgatgtcccttttacaccgggtcgcgacctgtggtggcacgaagaagtcgagaagtggccttcctatgttgcgcccgaggtcatgaactctgaggatccaatgttcctattatacacatctggctcgactggtaagccaaagggcgtcatgcacacgactggtggctatcttttgggtgctgccatgaccggcaaatatgtcttcgacattcatgacggcgatcggtatttctgcggtggtgatgtcggctggatcactggtcatacctacgtcgtttacgcacctcttctcctcggtatctctacggtggtatttgagggtacaccagcttatccgaacttttcccgttattgggacatcatcgataagcacgaagtcacgcagttctatgttgctccaaccgctttgcgcttattaaagcgcgctggtaacgacttcgtcaaggctcctatggccaagttgagagttcttgggtctgtcggtgagcccattgcagctgaagtctggaaatggtacttcgaaattgtcggcaaagaggaggctcatatcgtggacacctactggcaaactgagaccggatccaacgtcattacgccgctcgctggtgtcacacccactaaacccggaagcgcatcactgcctttcttcggaattgagcctgccattgtcgaccccgtctccggcgaggagatccacggcaacgatgtcgagggcgttttggctttcaaacagccatggcccagcatggcgcgcacagtctacggagcgcacaagcggtatatggagacctatttgaccgtttacaagggctactactttaccggtgacggagctggccgtgatcacgagggcttctactggatcagaggacgtgttgacgatgtcgtcaatgttagtggtcaccgtctctccacggctgagattgaggctgcactcatcgagcatcatgccgtggccgagtccgccgtggttggcgtcacagacgagcttactggccaagcggtcaatgcattcgttgccatcaaggaggggaacgaggcaacggatgctctccgaaaggagttcattctgcaggtccgcaagagcattggacctttcgcagctcccaaggcagtatacatcgtgcccgacttacccaagacgcgcagtggcaagattatgcgccgtatcttgcggaagattttagcaggcgaggaagaccagcttggtgacattactacgctctccgatccaggcgttgttgacaagatcatctccgtcgtccacgaagcgaaaaagaagtag

SEQ ID NO: 14008 - protein, 666 aa, Muscodor strobelii
  misc_feature: SGI Peptide ID NO. 564607
  misc_feature (125)..(562): Pfam Id: PF00501 Pfam Desc: AMP-binding enzyme
  misc_feature (8)..(666): NCBI GI: 156055998 Blast Desc: SS1G_05351 [Sclerotinia sclerotiorum 1980] gi|154703135|gb|EDO02874.1| SS1G_05351 [Sclerotinia sclerotiorum 1980]
  misc_feature (9)..(665): NCBI GI: 164424614 Blast Desc: acetyl-coenzyme A synthetase [Neurospora crassa OR74A] gi|67476606|sp|P16929.2|ACSA_NEUCR RecName: Full=Acetyl-coenzyme A synthetase; AltName: Full=Acetate--CoA ligase; AltName: enzyme
  misc_feature (3)..(666): NCBI GI: 256735343 Blast Desc: [Nectria haematococca mpVI 77-13-4]
  misc_feature (6)..(666): NCBI GI: 189198662 Blast Desc: acetyl-coenzyme A synthetase [Pyrenophora tritici-repentis Pt-1C-BFP] gi|187982767|gb|EDU48255.1| acetyl-coenzyme A synthetase [Pyrenophora tritici-repentis
  misc_feature (36)..(666): NCBI GI: 171689202 Blast Desc: protein product [Podospora anserina] gi|170944563|emb|CAP70674.1| protein product [Podospora anserina]
  misc_feature (2)..(666): NCBI GI: 46105404 Blast Desc: FG00330.1 [Gibberella zeae PH-1]
  misc_feature (8)..(665): NCBI GI: 154310341 Blast Desc: BC1G_07090 [Botryotinia fuckeliana B05.10] gi|150851422|gb|EDN26615.1| BC1G_07090 [Botryotinia fuckeliana B05.10]
  misc_feature (8)..(666): NCBI GI: 169624774 Blast Desc: SNOG_15648 [Phaeosphaeria nodorum SN15] gi|111055903|gb|EAT77023.1| SNOG_15648 [Phaeosphaeria nodorum SN15]
  misc_feature (6)..(666): NCBI GI: 67538912 Blast Desc: ACSA_EMENI Acetyl-coenzyme A synthetase (Acetate--CoA ligase) (Acyl-activating enzyme) [Aspergillus nidulans FGSC A4] gi|146345357|sp|P16928.2|ACSA_EMENI RecName: Full=Acetyl-coenzyme
  misc_feature (6)..(666): NCBI GI: 145258043 Blast Desc: An04g05620 [Aspergillus niger] gi|134074531|emb|CAK38824.1| protein product [Aspergillus niger]
  misc_feature (9)..(665): SWISSPROT Homolog: EC 6.2.1.1 Acetate--CoA ligase
MGEESKAPVVAEAHMVDTYHPPQKMLDKHPSKPHIANLEEYQQLYQQSITEPEKFWGEKARELLTWQRDFQTVRSGSLDNGDVAWFLEGQLNAAYNCVDRHAFKDPNKVAIIYEADEPNEGRNLTYGELLREVSKVAYVLKDMGVRKGDTVAVYLPMVPEALIALLAIVRIGAVHSVVFAGFSSDSLRDRVIDGQSKVVITSDEGKRGGKLIGTKKIVDDALKQCPDVTGVLVFKRTGADVPFTPGRDLWWHEEVEKWPSYVAPEVMNSEDPMFLLYTSGSTGKPKGVMHTTGGYLLGAAMTGKYVFDIHDGDRYFCGGDVGWITGHTYVVYAPLLLGISTVVFEGTPAYPNFSRYWDIIDKHEVTQFYVAPTALRLLKRAGNDFVKAPMAKLRVLGSVGEPIAAEVWKWYFEIVGKEEAHIVDTYWQTETGSNVITPLAGVTPTKPGSASLPFFGIEPAIVDPVSGEEIHGNDVEGVLAFKQPWPSMARTVYGAHKRYMETYLTVYKGYYFTGDGAGRDHEGFYWIRGRVDDVVNVSGHRLSTAEIEAALIEHHAVAESAVVGVTDELTGQAVNAFVAIKEGNEATDALRKEFILQVRKSIGPFAAPKAVYIVPDLPKTRSGKIMRRILRKILAGEEDQLGDITTLSDPGVVDKIISVVHEAKKK

SEQ ID NO: 14009 - DNA, 2473 bp, Muscodor strobelii
  misc_feature: SGI EST ID NO. CUFF.33486.0
  misc_feature: Variant of the nucleotide sequence at SEQ ID NO 14007
tcgcaccctctctcccctcctttcacttattctctgctttctttctggctttagaatccagagactgcaaaacttgaacagtatagccctctgtgtgcctcacagctcgtcattaccccacgaaaagaaccctgcaacatcgtcagtcgccgtcaaaccgcgccgcaaacatgggtgaagaaagcaaggcgccagtggtcgctgaggcgcacatggtagacacataccatccaccacagaagatgcttgacaagcatcccagcaaaccacatatcgccaaccttgaggaataccaacaattataccaacaatccatcaccgaacctgagaaattctggggtgagaaggcaagggagcttttgacatggcagcgggactttcagacagttcgctcgggcagcctcgacaacggtgatgtggcttggttcctcgaaggtcaactcaacgcggcctacaactgtgtcgacagacatgctttcaaggatcctaataaggttgctataatctacgaggccgacgagcccaatgagggccgcaacttgacctacggcgagctgctgcgcgaggtctcaaaggtagcgtacgtactcaaggatatgggtgtgcgcaaaggagacaccgttgctgtctacctacctatggttcccgaagctctcattgctctgcttgccattgttcgcattggtgccgttcattcggttgtgtttgccgggttctcgtccgattctctgcgcgaccgtgtcatcgatggtcagtcaaaggtcgttatcacttccgatgagggcaagcgcggtggcaagcttattggcaccaagaagattgtggatgatgcgctcaagcagtgtcccgacgtcactggtgtcttggtattcaagcgcaccggtgctgatgtcccttttacaccgggtcgcgacctgtggtggcacgaagaagtcgagaagtggccttcctatgttgcgcccgaggtcatgaactctgaggatccaatgttcctattatacacatctggctcgactggtaagccaaagggcgtcatgcacacgactggtggctatcttttgggtgctgccatgaccggcaaatatgtcttcgacattcatgacggcgatcggtatttctgcggtggtgatgtcggctggatcactggtcatacctacgtcgtttacgcacctcttctcctcggtatctctacggtggtatttgagggtacaccagcttatccgaacttttcccgttattgggacatcatcgataagcacgaagtcacgcagttctatgttgctccaaccgctttgcgcttattaaagcgcgctggtaacgacttcgtcaaggctcctatggccaagttgagagttcttgggtctgtcggtgagcccattgcagctgaagtctggaaatggtacttcgaaattgtcggcaaagaggaggctcatatcgtggacacctactggcaaactgagaccggatccaacgtcattacgccgctcgctggtgtcacacccactaaacccggaagcgcatcactgcctttcttcggaattgagcctgccattgtcgaccccgtctccggcgaggagatccacggcaacgatgtcgagggcgttttggctttcaaacagccatggcccagcatggcgcgcacagtctacggagcgcacaagcggtatatggagacctatttgaccgtttacaagggctactactttaccggtgacggagctggccgtgatcacgagggcttctactggatcagaggacgtgttgacgatgtcgtcaatgttagtggtcaccgtctctccacggctgagattgaggctgcactcatcgagcatcatgccgtggccgagtccgccgtggttggcgtcacagacgagcttactggccaagcggtcaatgcattcgttgccatcaaggaggggaacgaggcaacggatgctctccgaaaggagttcattctgcaggtccgcaagagcattggacctttcgcagctcccaaggcagtatacatcgtgcccgacttacccaagacgcgcagtggcaagattatgcgccgtatcttgcggaagattttagcaggcgaggaagaccagcttggtgacattactacggtgattttttctccatccactgattttcaggcaatgatgctaatttgtaacgtttcatagctctccgatccaggcgttgttgacaagatcatctccgtcgtccacgaagcgaaaaagaagtagaagaataagaaggtacaaaaaagtaaagaataacagaggtcatgcggatacgcagattgcagtcgggttttgcggccgagttcttgataccaaactgtccatgtacttttcagttgctcctaaaccagcttacagcgctccaacaaataaacaagtaaaaatattagattatcttgatgttccagtctgttatctgacgagcgtggctattcgatttgtactgcgttaaaaacacggcgccg

SEQ ID NO: 14010 - DNA, 1059 bp, Muscodor strobelii
  misc_feature: SGI cDNA ID NO. 564608
  misc_feature: Encodes the peptide sequence at SEQ ID NO 14011
atggctctcatagtggacaagcatcggccgagatctctagatgctttgacctaccactcagagttgtctgaaagactccgatcactggcgcaaagcggcgatttcccccatctcctcgtgtacggcccctcgggcgctggcaagaagacccgaattgtcgcaacgctgaaggaactctatggacctggtgtcgacaaaatcaaaatagatgcccgtgttttccagaccacgagtaaccgcaagatcgagttcaacattgtcgcctctgtctaccaccttgagatcaccccgtctgacgttggcaactatgaccgtgtggtcatccaggatctcctcaaggaggtcgctcagacgcagcaggtcgaccagtctgcaaagcaaaagttcaagattgtcgtcatcaacgaggccgaccagctcacacgtgatgctcaagccgcccttaggcggacaatggagaaatacagccccaacttgagactcatcttgctcgcaaatagcacagccaatatcattgcgcccatacggagtcgaacgctcctcgtccgagtagctgcaccgacgatagatgagatatcgagtgtgctggccgattcagccaaacgcgagggatggcctgtagtaggaaaacttcacaggagaatcgcggaggagagtggccgaaacctgagacgagcgttgctgatgtacgaagcagtacatgcccaaaacgagaaagtaacagacacgacgccaattccaccgcccgactgggaggcattgatagcgcaaatcgcgaaagacatgatggaccagcatacacccgctcaaatccttgtcatacgatccaagctatacgaccttctcacgcactgcatcccgccaaccaccatcctcaagaccttgacattcaagttgattcctcagatcgatgatgacctaaagtgggaagtcatcaagtggtctgccttctacgagcacagggtcaagacgggaagcaaagtcatcttccatctggaggctttcgtcgcgaagttcatgaggatcattgagatgtatctcatgacaatggatatgtaa

SEQ ID NO: 14011 - protein, 352 aa, Muscodor strobelii
  misc_feature: SGI Peptide ID NO. 564608
  misc_feature (1)..(352): NCBI GI: 116205059 Blast Desc: conserved [Chaetomium globosum CBS 148.51] gi|88176541|gb|EAQ84009.1| conserved [Chaetomium globosum CBS 148.51]
  misc_feature (1)..(352): NCBI GI: 256735344 Blast Desc: [Nectria haematococca mpVI 77-13-4]
  misc_feature (1)..(352): NCBI GI: 39942244 Blast Desc: conserved [Magnaporthe grisea 70-15] gi|145015810|gb|EDK00300.1| conserved [Magnaporthe grisea 70-15]
  misc_feature (1)..(352): NCBI GI: 85110603 Blast Desc: activator 1 38 kDa subunit [Neurospora crassa OR74A] gi|30913260|sp|Q8X082.1|RFC5_NEUCR RecName: Full=Replication factor C subunit 5; Short=Replication factor C5; AltName: Full= 1
  misc_feature (1)..(352): NCBI GI: 46105402 Blast Desc: RFC5_NEUCR activator 1 subunit 5 (Replication factor C subunit 5) (Replication factor C5) [Gibberella zeae PH-1]
  misc_feature (1)..(352): NCBI GI: 171689292 Blast Desc: protein product [Podospora anserina] gi|170944608|emb|CAP70719.1| protein product [Podospora anserina]
  misc_feature (1)..(352): NCBI GI: 115383958 Blast Desc: activator 1 38 kDa subunit [Aspergillus terreus NIH2624] gi|114196218|gb|EAU37918.1| activator 1 38 kDa subunit [Aspergillus terreus NIH2624]
  misc_feature (1)..(352): NCBI GI: 242809831 Blast Desc: DNA replication factor C subunit Rfc5, [Talaromyces stipitatus ATCC 10500] gi|218716080|gb|EED15502.1| DNA replication factor C subunit Rfc5, [Talaromyces stipitatus ATCC
  misc_feature (1)..(352): NCBI GI: 225684714 Blast Desc: replication factor C subunit 5 [Paracoccidioides brasiliensis Pb03]
  misc_feature (1)..(352): NCBI GI: 212537245 Blast Desc: DNA replication factor C subunit Rfc5, [Penicillium marneffei ATCC 18224] gi|210068520|gb|EEA22611.1| DNA replication factor C subunit Rfc5, [Penicillium marneffei ATCC 18224]
MALIVDKHRPRSLDALTYHSELSERLRSLAQSGDFPHLLVYGPSGAGKKTRIVATLKELYGPGVDKIKIDARVFQTTSNRKIEFNIVASVYHLEITPSDVGNYDRVVIQDLLKEVAQTQQVDQSAKQKFKIVVINEADQLTRDAQAALRRTMEKYSPNLRLILLANSTANIIAPIRSRTLLVRVAAPTIDEISSVLADSAKREGWPVVGKLHRRIAEESGRNLRRALLMYEAVHAQNEKVTDTTPIPPPDWEALIAQIAKDMMDQHTPAQILVIRSKLYDLLTHCIPPTTILKTLTFKLIPQIDDDLKWEVIKWSAFYEHRVKTGSKVIFHLEAFVAKFMRIIEMYLMTMDM

SEQ ID NO: 14012 - DNA, 2102 bp, Muscodor strobelii
  misc_feature: SGI EST ID NO. CUFF.34192.1
  misc_feature: Variant of the nucleotide sequence at SEQ ID NO 14010
caagaatgaaagcgacttacaggacgtccaaattggagactcgacgttgtattagcacacgtgcttctgagcgacagtctcgaaaactctttgattagagtttcacagacgaaaataaccaggacaggctcaacgttacctgttgtccggtcgagcccgaattcttggaacgggaatttagcaaaagagacagccttggcgcggcggtactctaattgaaggaggggcatagaggggtcatttggcggaaggaacagtcgacggccggctggcagttcagggtgcctgttagggtgcgagtgccttctcaatagggtaagtggtgaacagcggcagacgcgctccggaaatcactttacgcgacttgacagcatcaatagctccatacaagatgttagtgcatctactctaagagcaggcaaacgagagcaatcactagaaaccggactcgtaaactgccttctctgcgcctcgccaggtactaccgcattgtctcacggcagtttctctcagcatcgaattgacaaatcgattgtcattctcatctaagcagtccagccaactataattgtatgccttttggtcacagtgcatcaccatggctctcatagtggacaagcatcggccgagatctctagatgctttgacctaccactcagagttgtctgaaagactccgatcactggtatgtgtttccagctcgtcatataccttcccatcttacttctctcatgaatgcttaggcgcaaagcggcgatttcccccatctcctcgtgtacggcccctcgggcgctggcaagaagacccgaattgtcgcaacgctgaaggaactctatggacctggtgtcgacaaaatcaaaatagatgcccgtgttttccagaccacgagtaaccgcaagatcgagttcaacattgtcgcctctgtctaccaccttgagatcaccccgtctgacgttggcaactatgaccgtgtggtcatccaggatctcctcaaggaggtcgctcagacgcagcaggtcgaccagtctgcaaagcaaaagttcaagattgtcgtcatcaacgaggccgaccagctcacacgtgatgctcaagccgcccttaggcggacaatggagaaatacagccccaacttgagactcatcttgctcgcaaatagcacagccaatatcattgcgcccatacggagtcgaacgctcctcgtccgagtagctgcaccgacgatagatgagatatcgagtgtgctggccgattcagccaaacgcgagggatggcctgtagtaggaaaacttcacaggagaatcgcggaggagagtggccgaaacctgagacgagcgttgctgatgtacgaagcagtacatgcccaaaacgagaaagtaacagacacgacgccaattccaccgcccgactgggaggcattgatagcgcaaatcgcgaaagacatgatggaccagcatacacccgctcaaatccttgtcatacgatccaagctatacgaccttctcacgcactgcatcccgccaaccaccatcctcaagaccttgacattcaagttgattcctcagatcgatgatgacctaaagtgggaagtcatcaagtggtctgccttctacgagcacagggtcaagacgggaagcaaagtcatcttccatctggaggctttcgtcgcgaagttcatgaggatcattgagatgtatctcatgacaatggatatgtaaaataaggatcgtttgaggaacgcgtttacatgttccgtcagctgcactgcttggagtttagggcgtttgacggatctggggcatggaaaattgatctcagtctgagagatgatcagagtctcgacaatggtaggagacagtatcggttatgtatatgtcagcgactgaatcatgatcacggacacggcacacaggaccccataacggccgcgtgctccatccggcgtggtggaccggaaccctagtcggccatatggaattgattagccgcatcattgcattgctcttcattgccgaatcagcggatgtgatataatcagtgcctctgtcgtaagatttgcaatattagtatacaccgagttctagctcatatgaaatggatcatga

SEQ ID NO: 14013 - DNA, 1380 bp, Muscodor strobelii
  misc_feature: SGI cDNA ID NO. 564609
  misc_feature: Encodes the peptide sequence at SEQ ID NO 14014
atgtcgtacaacaaccgcaagttttctatgaaccgaaacacgggtgtgccccgaagacggttcagtatcggtgaccctagcgccaacgaaacgagttccaaaatccatcgccaatttcgtgccgcaaacccgggacatctgcctcacgcaggtctcgatgctagccgtgcttctactggtgttgtttggtgtactgagcgtgctgccgagcatggtttcctggaggagcccgagctatgggccaatctaggtcaaggtgctcctgaagtcgaggacgagattgagggctcgttccctagacctactcacatcgacgtctccgtcgcttccagagagtatggccctactgctggcatcaagccgctgcgtgctgccgtcgccagaatgtacaatgaaatgcatcgccagggaaaagatagtcagtactcttgggagaacgttgctatcgtgcctggtggccgagctggtttgatccgcattgccgccattctgaacaacgcctacgttgctttcttcatccctgactatacggcttacaacgagatgatgtctcttttcaagaactttgctgccatccccacgcctctgtccgaagaggacggatatcacattcaccccgatgccatcgctcaggagattgcacgtggtacatcggtcattctgacctccaatccccgcaatcccactggccgcgttgttgccaaccccgagcttgctgagattcaggatatctgccgtggacgcgctacactgatcagcgacgagttttactctggatacaactataccagtgattgtgacggttctgtcatatcggctgctgacaacattgaggatgttgacgaggatgatgttctcatcatcgatggccttaccaagcggttccgtcttccgggctggcgtgttgcttggattcttggacccaaggagttcatcaaggccattggctcttgtggatcataccttgacggtggcgccaacgctcctttccaggaggctgctgttcccatgttagagcccgagaatgtccgtaaggaaatggttgctctacagagacactttcgcgacaagcgtgactatgtcgtcaagcgtctacgtgacatgggtttcgtgatcaagtacgtccctgacagcacattttacctttggctcaacctcgagggtctgcctggccctatctccgacggtctcaacttcttccaagcttgtctcgaagagaaggtcatcgttgtcccgggtatcttctttgatcttaacccagcccgccgtcgtgacctgtttgacagtccttgccaccacttcgtccgtttctcgtacggcccccaaatgaccgagctgaagagaggttgtgacggtatcgagagagttgtctctaagtga

SEQ ID NO: 14014 - protein, 459 aa, Muscodor strobelii
  misc_feature: SGI Peptide ID NO. 564609
  misc_feature (78)..(453): Pfam Id: PF00155 Pfam Desc: Aminotransferase class I and II
  misc_feature (192)..(413): Pfam Id: PF00155 Pfam Desc: Aminotransferase class I and II
  misc_feature (2)..(459): NCBI GI: 116200133 Blast Desc: conserved [Chaetomium globosum CBS 148.51] gi|88179501|gb|EAQ86969.1| conserved [Chaetomium globosum CBS 148.51]
  misc_feature (1)..(459): NCBI GI: 171690036 Blast Desc: protein product [Podospora anserina] gi|170944973|emb|CAP71084.1| protein product [Podospora anserina]
  misc_feature (2)..(459): NCBI GI: 164427447 Blast Desc: NCU03500 [Neurospora crassa OR74A] gi|18376327|emb|CAD21073.1| conserved [Neurospora crassa] gi|157071746|gb|EAA26601.2| NCU03500 [Neurospora crassa OR74A]
  misc_feature (1)..(459): NCBI GI: 256732528 Blast Desc: [Nectria haematococca mpVI 77-13-4]
  misc_feature (3)..(459): NCBI GI: 261352978 Blast Desc: conserved [Verticillium albo-atrum VaMs.102]
  misc_feature (3)..(459): NCBI GI: 145607041 Blast Desc: conserved [Magnaporthe grisea 70-15] gi|145014648|gb|EDJ99216.1| conserved [Magnaporthe grisea 70-15]
  misc_feature (1)..(457): NCBI GI: 46121581 Blast Desc: FG05169.1 [Gibberella zeae PH-1]
  misc_feature (1)..(459): NCBI GI: 156040361 Blast Desc: SS1G_12197 [Sclerotinia sclerotiorum 1980] gi|154696253|gb|EDN95991.1| SS1G_12197 [Sclerotinia sclerotiorum 1980]
  misc_feature (1)..(459): NCBI GI: 225682673 Blast Desc: aminotransferase [Paracoccidioides brasiliensis Pb03]
  misc_feature (1)..(459): NCBI GI: 226285167 Blast Desc: conserved [Paracoccidioides brasiliensis Pb01]
  misc_feature (113)..(453): SWISSPROT Homolog: EC 2.6.1.1 Aspartate transaminase
MSYNNRKFSMNRNTGVPRRRFSIGDPSANETSSKIHRQFRAANPGHLPHAGLDASRASTGVVWCTERAAEHGFLEEPELWANLGQGAPEVEDEIEGSFPRPTHIDVSVASREYGPTAGIKPLRAAVARMYNEMHRQGKDSQYSWENVAIVPGGRAGLIRIAAILNNAYVAFFIPDYTAYNEMMSLFKNFAAIPTPLSEEDGYHIHPDAIAQEIARGTSVILTSNPRNPTGRVVANPELAEIQDICRGRATLISDEFYSGYNYTSDCDGSVISAADNIEDVDEDDVLIIDGLTKRFRLPGWRVAWILGPKEFIKAIGSCGSYLDGGANAPFQEAAVPMLEPENVRKEMVALQRHFRDKRDYVVKRLRDMGFVIKYVPDSTFYLWLNLEGLPGPISDGLNFFQACLEEKVIVVPGIFFDLNPARRRDLFDSPCHHFVRFSYGPQMTELKRGCDGIERVVSK

SEQ ID NO: 14015 - DNA, 4617 bp, Muscodor strobelii
  misc_feature: SGI EST ID NO. CUFF.34191.2
  misc_feature: Variant of the nucleotide sequence at SEQ ID NO 14013
acctagccatctttctcaaatttctttttcttagcttccctccctctcctaaggtcaagcatacaagagatctttccttgtttttgcagctaagcactcaaagctagtgcagatatctctgcttttctcccttgcttatagtctaatagagacctcgtagtcccatcttgagttacccctcgtgccgccacagcttgtttattgtttgatcttcgactccacaacttacaaagatgtcgtacaacaaccgcaagttttctatgaaccgaaacacgggtgtgccccgaagacggttcagtatcggtgaccctagcgccaacgaaacgagttccaaaatccatcgccaatttcgtgccgcaaacccgggacatctgcctcacgcaggtctcgatgctagccgtgcttctactggtgttgtttggtgtactgagcgtgctgccgagcatggtttcctggaggagcccgagctatgggccaatctaggtcaaggtgctcctgaagtcgaggacgagattgagggctcgttccctagacctactcacatcgacgtctccgtcgcttccagagagtatggccctactgctggcatcaagccgctgcgtgctgccgtcgccagaatgtacaatgaaatgcatcgccagggaaaagatagtcagtactcttgggagaacgttgctatcgtgcctggtggccgagctggtttgatccgcattgccgccattctgaacaacgcctacgttgctttcttcatccctgactatacggcttacaacgagatgatgtctcttttcaagaactttgctgccatccccacgcctctgtccgaagaggacggatatcacattcaccccgatgccatcgctcaggagattgcacgtggtacatcggtcattctgacctccaatccccgcaatcccactggccgcgttgttgccaaccccgagcttgctgagattcaggatatctgccgtggacgcgctacactgatcagcgacgagttttactctggatacaactataccagtgattgtgacggttctgtcatatcggctgctgacaacattgaggatgttgacgaggatgatgttctcatcatcgatggccttaccaagcggttccgtcttccgggctggcgtgttgcttggattcttggacccaaggagttcatcaaggccattggctcttgtggatcataccttgacggtggcgccaacgctcctttccaggaggctgctgttcccatgttagagcccgagaatgtccgtaaggaaatggttgctctacagagacactttcgcgacaagcgtgactatgtcgtcaagcgtctacgtgacatgggtttcgtgatcaagtacgtccctgacagcacattttacctttggctcaacctcgagggtctgcctggccctatctccgacggtctcaacttcttccaagcttgtctcgaagagaaggtcatcgttgtcccgggtatcttctttgatcttaacccagcccgccgtcgtgacctgtttgacagtccttgccaccacttcgtccgtttctcgtacggcccccaaatgaccgagctgaagagaggttgtgacggtatcgagagagttgtctctaagtttaagaactacaaggactaaggtctctacacaaataacgtagactcacgagatcatggtaaacacgggagaaaaggagtacacttactggaaagagtacagctagacagacacgctgtcgttggattcagaaagactcgggtttctgcaatacactttcagactaggtctagattcaagacataatcaagaagaatcaatccaaaccacgtcttatattgtgattatttgtttgatggtagagctacgaattacgatcacatgtcgcatgagaacaccaatgcatcagaaagacagagatgcccgtaagaattgcagatctattgagcaaggcaatattacaatctgtctgcttccgccaaccgcgaacctggaagtagtgcctgcattgacagaccctagtggtgagtggaacctttattccacacaaaatgagactaatgaaacagtgtagtgagggaacttatgtaatcagacaaaagctgtagaatctccctgagcaaaaccggcccaaactcctatccacagctacccacattcaccatttcatgttttgttcccctagctccccgaaatgcaaccatttctctaattctgtgcgatgagtttactgtaaccatcgtgttagctcagaaatggcgatatcagtgaggggtcttaccaagatgtcctcatccatagcggcaccgttggtaccattagcagcggtagtgttctcggtctggttctgggcagaagactcgaaatagtcagccatctcggagtcgagctcctcagcagtcttcttggcagggcgagcattgcgagcgggtcggccgggcttcttgccacgagcgccacgagcgcctgctcctgcggcctttccggcatccttcttcttgtcattggcggcagacttgggttgagccttgggctgggtgacgcggtcattgagcgtcttgggggtggggaggatggcagcagccttggaagcatcgacgacaacctcgatctatgaactacgagttagcaccgagaatcttgtgcagagtcaagttgggagtgggtaccttgatggcacggttatcgatgagaatgccgttgagattgttgaaggccaagctggcaccatcagccttgtggaaggtgacggtggcgatgccgcggctctgaccaccggggccgtaagagagctcaacacgcttcatgggtccgactgctttagtgaagtactcctagggagggcacgaaggtcagcatagagcatctagtcgtgttcgttcatgtcgatcaattcatccaggaccgaaggaaatccgagccggtatcgtccacagccatgggcgagccacaacgagcacgcagtgagcattagtatcaagatagccgcagcaacaccccaatccgtccagcagtagtagtgtccaccacccctcatgatggatatgcagtctcaatcggcagagcaaatccacgtcaacggccatatatcgtcgcatcgcgtgcccacatattttcagcccaatcgacgttgatatttcgactcccacgttcaagccctctcatgttgatagtgtcattgctctgccaacacggacaaacatcaaatgcacgtatgcctactcaaccaagctagactgcatgtttcaaaaaatgctatgcggctgctaatgcattctgagagtctgctgtgtatgtgtgcccactgctgtgctcgctgctcttccccgatccatagtagcattgagagaatggagccagcaaagaaaacatgccgtgcgtcatcgagctcatgggctgttgtgtcacaccgtgcgatggcacggtcttgtctgcacactgtagcctatgaatggagaggttgccaagccttcctaaggacatgcaatgatcttgcaagacgaagaatgcgctcaacttccgacgctgcagctctaaggatgctcgcatagcgaagggaggagactgggtattgtgacagctccatggcacggtacgatgcgctggacaacaggcggtgctcatctcgatcgtcacagatacgcgagtgcggtttcaaagaaggcgtcgacgaaattccgtaggcgctagcccaggaaacataccttgatctgttgctcgttcacatccttgggctgcggtctgtgttagcgcactgagtagatgaagtaaggacagggtcgcaggacttaccaggttgctcacaacaaccttgctctcgacgttgcctcggggagccttggccggggcctgcttggcgccagcattgcggggctgcttggaggtcttctggacaccaccgacgggcgcggtcgtggcgggacgaccggcagcgcggcgagtgctgcgacggcgaccagcgggggtgccgcggcgctgggtggagatgatggcgtcaagagactgatcgagcttgccagacatgttgacgggttgacggtgatctgaagggtggtgcttgttgttgtgtagttaatgttgatgacagaccgacagagaaggcggcgcgaacggtcgtgaggagtggcttgacggttcgtgtgaaagggtggtctcttgacagatggaggattgagatctgtcgatgatgctaggcgacgcaaaatggtcgcaagcgtgtcttgtttatggcgcggcgacggatgagggagaaagggctgctgactcgcggtccggtgtttggcgcaacaagtggcagtcacgtctgcgaagatgcaaacagacgaagttggaattgattacaagtagaagtatgaaaaagaattatgtagctgtagaaatcctgcccgggcgaaaggtagtgatcggactgagaaaagaagtcgtgggttgtgatttgtgtggatggcgggagatggtgtgagagagattggaggtgctgaagtagaaatggaagaagaggtggaaatgcagggtgcggttgcctcagtgtctggcacacctgggcaacgggaggtgagatttgaatggaagcaggggaaggggctctagcctgggctgagctgggttgccttgggtgccttgggtg

SEQ ID NO: 14016 - DNA, 1398 bp, Muscodor strobelii
  misc_feature: SGI cDNA ID NO. 564610
  misc_feature: Encodes the peptide sequence at SEQ ID NO 14017
atgtcgtacaacaaccgcaagttttctatgaaccgaaacacgggtgtgccccgaagacggttcagtatcggtgaccctagcgccaacgaaacgagttccaaaatccatcgccaatttcgtgccgcaaacccgggacatctgcctcacgcaggtctcgatgctagccgtgcttctactggtgttgtttggtgtactgagcgtgctgccgagcatggtttcctggaggagcccgagctatgggccaatctaggtcaaggtgctcctgaagtcgaggacgagattgagggctcgttccctagacctactcacatcgacgtctccgtcgcttccagagagtatggccctactgctggcatcaagccgctgcgtgctgccgtcgccagaatgtacaatgaaatgcatcgccagggaaaagatagtcagtactcttgggagaacgttgctatcgtgcctggtggccgagctggtttgatccgcattgccgccattctgaacaacgcctacgttgctttcttcatccctgactatacggcttacaacgagatgatgtctcttttcaagaactttgctgccatccccacgcctctgtccgaagaggacggatatcacattcaccccgatgccatcgctcaggagattgcacgtggtacatcggtcattctgacctccaatccccgcaatcccactggccgcgttgttgccaaccccgagcttgctgagattcaggatatctgccgtggacgcgctacactgatcagcgacgagttttactctggatacaactataccagtgattgtgacggttctgtcatatcggctgctgacaacattgaggatgttgacgaggatgatgttctcatcatcgatggccttaccaagcggttccgtcttccgggctggcgtgttgcttggattcttggacccaaggagttcatcaaggccattggctcttgtggatcataccttgacggtggcgccaacgctcctttccaggaggctgctgttcccatgttagagcccgagaatgtccgtaaggaaatggttgctctacagagacactttcgcgacaagcgtgactatgtcgtcaagcgtctacgtgacatgggtttcgtgatcaagtacgtccctgacagcacattttacctttggctcaacctcgagggtctgcctggccctatctccgacggtctcaacttcttccaagcttgtctcgaagagaaggtcatcgttgtcccgggtatcttctttgatcttaacccagcccgccgtcgtgacctgtttgacagtccttgccaccacttcgtccgtttctcgtacggcccccaaatgaccgagctgaagagaggttgtgacggtatcgagagagttgtctctaagtttaagaactacaaggactaa

SEQ ID NO: 14017 - protein, 465 aa, Muscodor strobelii
  misc_feature: SGI Peptide ID NO. 564610
  misc_feature (78)..(453): Pfam Id: PF00155 Pfam Desc: Aminotransferase class I and II
  misc_feature (192)..(413): Pfam Id: PF00155 Pfam Desc: Aminotransferase class I and II
  misc_feature (2)..(462): NCBI GI: 116200133 Blast Desc: conserved [Chaetomium globosum CBS 148.51] gi|88179501|gb|EAQ86969.1| conserved [Chaetomium globosum CBS 148.51]
  misc_feature (1)..(464): NCBI GI: 171690036 Blast Desc: protein product [Podospora anserina] gi|170944973|emb|CAP71084.1| protein product [Podospora anserina]
  misc_feature (2)..(461): NCBI GI: 164427447 Blast Desc: NCU03500 [Neurospora crassa OR74A] gi|18376327|emb|CAD21073.1| conserved [Neurospora crassa] gi|157071746|gb|EAA26601.2| NCU03500 [Neurospora crassa OR74A]
  misc_feature (1)..(459): NCBI GI: 256732528 Blast Desc: [Nectria haematococca mpVI 77-13-4]
  misc_feature (3)..(462): NCBI GI: 261352978 Blast Desc: conserved [Verticillium albo-atrum VaMs.102]
  misc_feature (3)..(462): NCBI GI: 145607041 Blast Desc: conserved [Magnaporthe grisea 70-15] gi|145014648|gb|EDJ99216.1| conserved [Magnaporthe grisea 70-15]
  misc_feature (1)..(457): NCBI GI: 46121581 Blast Desc: FG05169.1 [Gibberella zeae PH-1]
  misc_feature (1)..(460): NCBI GI: 156040361 Blast Desc: SS1G_12197 [Sclerotinia sclerotiorum 1980] gi|154696253|gb|EDN95991.1| SS1G_12197 [Sclerotinia sclerotiorum 1980]
  misc_feature (1)..(461): NCBI GI: 226285167 Blast Desc: conserved [Paracoccidioides brasiliensis Pb01]
  misc_feature (1)..(461): NCBI GI: 225682673 Blast Desc: aminotransferase [Paracoccidioides brasiliensis Pb03]
  misc_feature (113)..(462): SWISSPROT Homolog: EC 2.6.1.1 Aspartate transaminase
MSYNNRKFSMNRNTGVPRRRFSIGDPSANETSSKIHRQFRAANPGHLPHAGLDASRASTGVVWCTERAAEHGFLEEPELWANLGQGAPEVEDEIEGSFPRPTHIDVSVASREYGPTAGIKPLRAAVARMYNEMHRQGKDSQYSWENVAIVPGGRAGLIRIAAILNNAYVAFFIPDYTAYNEMMSLFKNFAAIPTPLSEEDGYHIHPDAIAQEIARGTSVILTSNPRNPTGRVVANPELAEIQDICRGRATLISDEFYSGYNYTSDCDGSVISAADNIEDVDEDDVLIIDGLTKRFRLPGWRVAWILGPKEFIKAIGSCGSYLDGGANAPFQEAAVPMLEPENVRKEMVALQRHFRDKRDYVVKRLRDMGFVIKYVPDSTFYLWLNLEGLPGPISDGLNFFQACLEEKVIVVPGIFFDLNPARRRDLFDSPCHHFVRFSYGPQMTELKRGCDGIERVVSKFKNYKD

SEQ ID NO: 14018 - DNA, 4617 bp, Muscodor strobelii; identical to SEQ ID NO: 14015
  misc_feature: SGI EST ID NO. CUFF.34191.2
  misc_feature: Variant of the nucleotide sequence at SEQ ID NO 14016

SEQ ID NO: 14019 - DNA, 759 bp, Muscodor strobelii
  misc_feature: SGI cDNA ID NO. 564611
  misc_feature: Reduced expression when VOC is produced
  misc_feature: Encodes the peptide sequence at SEQ ID NO 14020
atgtctggcaagctcgatcagtctcttgacgccatcatctccacccagcgccgcggcacccccgctggtcgccgtcgcagcactcgccgcgctgccggtcgtcccgccacgaccgcgcccgtcggtggtgtccagaagacctccaagcagccccgcaatgctggcgccaagcaggccccggccaaggctccccgaggcaacgtcgagagcaaggttgttgtgagcaacctgcccaaggatgtgaacgagcaacagatcaaggagtacttcactaaagcagtcggacccatgaagcgtgttgagctctcttacggccccggtggtcagagccgcggcatcgccaccgtcaccttccacaaggctgatggtgccagcttggccttcaacaatctcaacggcattctcatcgataaccgtgccatcaagatcgaggttgtcgtcgatgcttccaaggctgctgccatcctccccacccccaagacgctcaatgaccgcgtcacccagcccaaggctcaacccaagtctgccgccaatgacaagaagaaggatgccggaaaggccgcaggagcaggcgctcgtggcgctcgtggcaagaagcccggccgacccgctcgcaatgctcgccctgccaagaagactgctgaggagctcgactccgagatggctgactatttcgagtcttctgcccagaaccagaccgagaacactaccgctgctaatggtaccaacggtgccgctatggatgaggacatcttgtaa

SEQ ID NO: 14020 - protein, 252 aa, Muscodor strobelii
  misc_feature: SGI Peptide ID NO. 564611
  misc_feature (72)..(143): Pfam Id: PF00076 Pfam Desc: RNA recognition motif. (a.k.a. RRM, RBD, or RNP domain)
  misc_feature (1)..(249): NCBI GI: 261356702 Blast Desc: conserved [Verticillium albo-atrum VaMs.102]
  misc_feature (1)..(252): NCBI GI: 85080068 Blast Desc: NCU01793 [Neurospora crassa OR74A] gi|18376118|emb|CAD21184.1| related to RNA annealing protein [Neurospora crassa] gi|28917537|gb|EAA27235.1| NCU01793 crassa
  misc_feature (1)..(227): NCBI GI: 256729116 Blast Desc: NECHADRAFT_80054 [Nectria haematococca mpVI 77-13-4]
  misc_feature (2)..(252): NCBI GI: 39977567 Blast Desc: MGG_06668 [Magnaporthe grisea 70-15] gi|145013817|gb|EDJ98458.1| MGG_06668 [Magnaporthe grisea 70-15]
  misc_feature (2)..(252): NCBI GI: 59802913 Blast Desc: protein mlo3-like protein [Magnaporthe grisea]
  misc_feature (1)..(252): NCBI GI: 116199465 Blast Desc: CHGG_07888 [Chaetomium globosum CBS 148.51] gi|88179167|gb|EAQ86635.1| CHGG_07888 [Chaetomium globosum CBS 148.51]
  misc_feature (3)..(252): NCBI GI: 171689476 Blast Desc: protein product [Podospora anserina] gi|170944700|emb|CAP70811.1| protein product [Podospora anserina]
  misc_feature (1)..(225): NCBI GI: 46138631 Blast Desc: FG10830.1 [Gibberella zeae PH-1]
  misc_feature (1)..(251): NCBI GI: 242818497 Blast Desc: RNA annealing protein Yra1, [Talaromyces stipitatus ATCC 10500] gi|218713594|gb|EED13018.1| RNA annealing protein Yra1, [Talaromyces stipitatus ATCC 10500]
  misc_feature (1)..(225): NCBI GI: 212530514 Blast Desc: RNA annealing protein Yra1, [Penicillium marneffei ATCC 18224] gi|210074812|gb|EEA28899.1| RNA annealing protein Yra1, [Penicillium marneffei ATCC 18224]
  misc_feature: Useful for introducing or modulating the production of volatile compounds
MSGKLDQSLDAIISTQRRGTPAGRRRSTRRAAGRPATTAPVGGVQKTSKQPRNAGAKQAPAKAPRGNVESKVVVSNLPKDVNEQQIKEYFTKAVGPMKRVELSYGPGGQSRGIATVTFHKADGASLAFNNLNGILIDNRAIKIEVVVDASKAAAILPTPKTLNDRVTQPKAQPKSAANDKKKDAGKAAGAGARGARGKKPGRPARNARPAKKTAEELDSEMADYFESSAQNQTENTTAANGTNGAAMDEDIL

SEQ ID NO: 14021 - DNA, 2391 bp, Muscodor strobelii
  misc_feature: SGI EST ID NO. CUFF.34192.4
  misc_feature: Variant of the nucleotide sequence at SEQ ID NO 14019
aggcacccaaggcacccaaggcaacccagctcagcccaggctagagccccttcccctgcttccattcaaatctcacctcccgttgcccaggtgtgccagacactgaggcaaccgcaccctgcatttccacctcttcttccatttctacttcagcacctccaatctctctcacaccatctcccgccatccacacaaatcacaacccacgacttcttttctcagtccgatcactacctttcgcccgggcaggatttctacagctacataattctttttcatacttctacttgtaatcaattccaacttcgtctgtttgcatcttcgcagacgtgactgccacttgttgcgccaaacaccggaccgcgagtcagcagccctttctccctcatccgtcgccgcgccataaacaagacacgcttgcgaccattttgcgtcgcctagcatcatcgacagatctcaatcctccatctgtcaagagaccaccctttcacacgaaccgtcaagccactcctcacgaccgttcgcgccgccttctctgtcggtctgtcatcaacattaactacacaacaacaagcaccacccttcagatcaccgtcaacccgtcaacatgtctggcaagctcgatcagtctcttgacgccatcatctccacccagcgccgcggcacccccgctggtcgccgtcgcagcactcgccgcgctgccggtcgtcccgccacgaccgcgcccgtcggtggtgtccagaagacctccaagcagccccgcaatgctggcgccaagcaggccccggccaaggctccccgaggcaacgtcgagagcaaggttgttgtgagcaacctgcccaaggatgtgaacgagcaacagatcaaggagtacttcactaaagcagtcggacccatgaagcgtgttgagctctcttacggccccggtggtcagagccgcggcatcgccaccgtcaccttccacaaggctgatggtgccagcttggccttcaacaatctcaacggcattctcatcgataaccgtgccatcaagatcgaggttgtcgtcgatgcttccaaggctgctgccatcctccccacccccaagacgctcaatgaccgcgtcacccagcccaaggctcaacccaagtctgccgccaatgacaagaagaaggatgccggaaaggccgcaggagcaggcgctcgtggcgctcgtggcaagaagcccggccgacccgctcgcaatgctcgccctgccaagaagactgctgaggagctcgactccgagatggctgactatttcgagtcttctgcccagaaccagaccgagaacactaccgctgctaatggtaccaacggtgccgctatggatgaggacatcttgtaaactcatcgcacagaattagagaaatggttgcatttcggggagctaggggaacaaaacatgaaatggtgaatgtgggtagctgtggataggagtttgggccggttttgctcagggagattctacagcttttgtctgattacataagttccctcactacactgtttcattagtctcattttgtgtggaataaaggttccactcaccactagggtctgtcaatgcaggcactacttccaggttcgcggttggcggaagcagacagattgtaatattgccttgctcaatagatctgcaattcttacgggcatctctgtctttctgatgcattggtgttctcatgcgacatgtgatcgtaattcgtagctctaccatcaaacaaataatcacaatataagacgtggtttggattgattcttcttgattatgtcttgaatctagacctagtctgaaagtgtattgcagaaacccgagtctttctgaatccaacgacagcgtgtctgtctagctgtactctttccagtaagtgtactccttttctcccgtgtttaccatgatctcgtgagtctacgttatttgtgtagagaccttagtccttgtagttcttaaacctgaagatattgcattagtgtcacatatagtagccaaagacgggagacgggactcacttagagacaactctctcgataccgtcacaacctctcttcagctcggtcatttgggggccgtacgagaaacggacgacttcacatcgttagatcaagatctctatggcaatacgagatggacttacagtggtggcaaggactgtcaaacaggtcacgacggcgggctgggttaagatcaaagaagatacccgggacaacgatgaccttctcttcgagacaagcttggaagaagttgagaccgtcggagatagggccaggcagaccctcgaggttgagccaaaggtaaaatgtgctgtcagggacgtacttgatcacgaaacccatgtcacgtagacgcttgacgacatagtcacgcttgtc

SEQ ID NO: 14022 - DNA, 1041 bp, Muscodor strobelii
  misc_feature: SGI cDNA ID NO. 564612
  misc_feature: Encodes the peptide sequence at SEQ ID NO 14023
atgccaccaaaaaagaaggaagagcccaagcccaagaaggctgcggccagcaagattgctgccgacaagacctttggaatgaaaaataagaagggctcggtcgcccagaaagcaatgaaacagatcgaagcaacagccaaatcgggtgggagcgccgaggagaaacgcaaacaggcagagaaagatgcgcgtgctcgtgagaagaaggctgctgaagatgccaagagagaagccgatctgctccttaacaaaccagcacaagttcagaaagtgcccttcggtgtcgatcctaagaccgtcgtctgcatcttttggagaaagggcaactgcgagaaggggaagaagtgcaagtttgcccacgacctctcggttgagcgcaagaccgaaaagatcaatctctactccgataacagggccgaggaggaagagaagaagaagcaagagacatcagacgactgggacgaagagaaactgcgaaaggtcgttctgtctaagaagggtaatcagatcacaactaccgacaaagtctgcaaatacttcatcgaggctatcgaggatggtaaatacggctggttttgggtatgtccaaacggaggtaatgagtgcaaatataagcacgctctcccaccaggcttcgttctcaagaccaaggaacagcgtgctgcggagaaggctctattggataaatctccactcaagacacttaccttagaagatttcttggaatcagaaagacacaaacttactggcacgttgacgccagttacgcccgaaacatttgcgaagtggaagaaggaacgtctcgataagaaggcggccgaagaacaggctcgacaagctaaagaatcgactggccgtgctatgttcgaaagtggaaattggagattcacggaagataacgactccgaagacgacgacgataacgacgatgtctggaatctcgagaaactacgagaggaaaccgctgctatgagagacaaaaaggaggaggaacggctggctgccctaaatggaacaggcgtcgcggttgatggatcttga

SEQ ID NO: 14023 - protein, 346 aa, Muscodor strobelii
  misc_feature: SGI Peptide ID NO. 564612
  misc_feature (97)..(122): Pfam Id: PF00642 Pfam Desc: Zinc finger C-x8-C-x5-C-x3-H type (and similar)
  misc_feature (1)..(341): NCBI GI: 39978251 Blast Desc: MGG_07010 [Magnaporthe grisea 70-15] gi|145013407|gb|EDJ98048.1| MGG_07010 [Magnaporthe grisea 70-15]
  misc_feature (1)..(341): NCBI GI: 171689480 Blast Desc: protein product [Podospora anserina] gi|170944702|emb|CAP70813.1| protein product [Podospora anserina]
  misc_feature (1)..(339): NCBI GI: 256728925 Blast Desc: [Nectria haematococca mpVI 77-13-4]
  misc_feature (1)..(343): NCBI GI: 85080075 Blast Desc: NCU01795 [Neurospora crassa OR74A] gi|18376116|emb|CAD21182.1| conserved [Neurospora crassa] gi|28917539|gb|EAA27237.1| [Neurospora crassa OR74A]
  misc_feature (1)..(343): NCBI GI: 261356704 Blast Desc: translation machinery-associated protein [Verticillium albo-atrum VaMs.102]
  misc_feature (2)..(333): NCBI GI: 46138629 Blast Desc: FG10829.1 [Gibberella zeae PH-1]
  misc_feature (1)..(338): NCBI GI: 116199463 Blast Desc: CHGG_07887 [Chaetomium globosum CBS 148.51] gi|88179166|gb|EAQ86634.1| CHGG_07887 [Chaetomium globosum CBS 148.51]
  misc_feature (1)..(343): NCBI GI: 226278615 Blast Desc: conserved [Paracoccidioides brasiliensis Pb01]
  misc_feature (1)..(343): NCBI GI: 261203038 Blast Desc: CCCH finger DNA binding protein [Ajellomyces dermatitidis SLH14081] gi|239590830|gb|EEQ73411.1| CCCH finger DNA binding protein [Ajellomyces dermatitidis SLH14081] CCCH DNA
  misc_feature (22)..(346): NCBI GI: 258572854 Blast Desc: conserved [Uncinocarpus reesii 1704] gi|237905459|gb|EEP79860.1| conserved [Uncinocarpus reesii 1704]
MPPKKKEEPKPKKAAASKIAADKTFGMKNKKGSVAQKAMKQIEATAKSGGSAEEKRKQAEKDARAREKKAAEDAKREADLLLNKPAQVQKVPFGVDPKTVVCIFWRKGNCEKGKKCKFAHDLSVERKTEKINLYSDNRAEEEEKKKQETSDDWDEEKLRKVVLSKKGNQITTTDKVCKYFIEAIEDGKYGWFWVCPNGGNECKYKHALPPGFVLKTKEQRAAEKALLDKSPLKTLTLEDFLESERHKLTGTLTPVTPETFAKWKKERLDKKAAEEQARQAKESTGRAMFESGNWRFTEDNDSEDDDDNDDVWNLEKLREETAAMRDKKEEERLAALNGTGVAVDGS

SEQ ID NO: 14024 - DNA, 3182 bp, Muscodor strobelii
  misc_feature: SGI EST ID NO. CUFF.33475.0
  misc_feature: Variant of the nucleotide sequence at SEQ ID NO 14022
cttactccccaccatgcattccatacaccaccaacggatcaaaggttacagcccactaataggccctacagctcaacggtgcagttgcttgcccacccagacatcaaactgcgtcgaattcgatccgcgctgactgagctaccgcacctcgtacctccgcaaacgatatcccattttgcaacgcaatctacgatcatttccctccctacaaccatatattctacataagacccatatctcgccaaaatgccaccaaaaaagaaggaagagcccaagcccaagaaggctgcggccagcaagattgctgccgacaagacctttggaatgaaaaataagaagggctcggtcgcccagaaagcaatgaaacagatcgaagcaacagccaaatcgggtgggagcgccgaggagaaacgcaaacaggcagagaaagatgcgcgtgctcgtgagaagaaggctgctgaagatgccaagagagaagccgatctgctccttaacaaaccagcacaagttcagaaagtgcccttcggtgtcgatcctaagaccgtcgtctgcatcttttggagaaagggcaactgcgagaaggggaagaagtgcaagtttgcccacgacctctcggttgagcgcaagaccgaaaagatcaatctctactccgataacagggccgaggaggaagagaagaagaagcaagagacatcagacgactgggacgaagagaaactgcgaaaggtcgttctgtctaagaagggtaatcagatcacaactaccgacaaagtctgcaaatacttcatcgaggctatcgaggatggtaaatacggctggttttgggtatgtccaaacggaggtaatgagtgcaaatataagcacgctctcccaccaggcttcgttctcaagaccaaggaacagcgtgctgcggagaaggctctattggataaatctccactcaagacacttaccttagaagatttcttggaatcagaaagacacaaacttactggcacgttgacgccagttacgcccgaaacatttgcgaagtggaagaaggaacgtctcgataagaaggcggccgaagaacaggctcgacaagctaaagaatcgactggccgtgctatgttcgaaagtggaaattggagattcacggaagataacgactccgaagacgacgacgataacgacgatgtctggaatctcgagaaactacgagaggaaaccgctgctatgagagacaaaaaggaggaggaacggctggctgccctaaatggaacaggcgtcgcggttgatggatcttgatcgcaacataagaagccagaagattcaagaaacagacgtcttgtagtacgtgactacgaaatcaagcgacgagtcgagataccttggggtaaatgtgagtgggcgagtctcggacatctgagatcctcaattgcctcttgctggcccaggctaggaccacgcgtagattgatcagtcgcccctcttcgttgagttgggtatacaactgacaattctgagcgatagtcccaatacagtcgatcatttggaggtccaaagctgtgcatagtctctcacaagaatcattactctattcaggcgtggcaattacgcatatacagctgatttatgagagaattgcttgcattacttgattatgagaccaatgcgtgacactggcaggtcgtgaacaagataggcacttgacgagcaatagttcatctcaagcaaattccaaggctcaactcattttcttgcctagatctttcttcttggatacaaattgccagcaataggttcaaactttcaaaatgacaaggaatagtatcgtataattattccgtctttacctattatacatccttgagaaaatacgttaaaacttctcaacatatggccgcaagtccagctcttgggtgaatgtcgagcgaggctgagtgtgcaggtgccagtagctctcggcaatctaggagacattaatcaatatttgctacaaattaatcaataggagcacattacttaccccctcaggcttaagctttccatcttcaacaccattattgacggtaaaccccttggatttctccaaatcaatgacaccatcgataatagcatgcacaacgtgaacgccctgcggtccgaattcacgagccagagactgagtaagagctcgccgaccaaacataccggctgccatagtatggaacttggccgagccccggattgatgagctggcgcctgttacgatcaatgttggagggtacttagattctggtacggcttctaggagaagtggaaccgtcttttgcgcgaagttgaagaatccccgactatcagaatatggtcagcatgtgctcagattattttagtataagtatgattataacaactcgcagaagaggtccgtttcgtcacaacaaccccatcgtgcagtttgaaagacatataacttacgtattccccgccaaactcgcctccagctcctcaggcttaacttcgaggaacggtttgaaggcatagccagctgcgacattataaacagcagcacccagcttcaagtcagggagctgtgtcttgatctgctcgaaagcggactccattgacttggcatcggcgacatcagcgctgatacctactgcctttccgccggcgttgttgatctcagatacggtgctttcgtatgattcgggacgccgcgccattagcaccactgggtatgtctgcgcgaaacgcaatgcggtagcgcgacctgtgcctgggcctacgccggcgatcactgcgaagagctttgaagacattgtgtgttattgatggaacagacgatagatgaatggtgtgtgattgatatgacttgtatagctttatgatattccaatgttgatagaagcatgaggctatcttatatagatgaatgagccagtggcttattagtgccttcaactcctcatcttcgcttctcgcgctccgtcacttgaggctacctaaagtctagatgcgtttagtcgtccagataccaatggttgattatcaaatcactagcattgttcgggaccgactttgccacgttttatttgactatacatgatgccaggttcatagtctagaagtcctacgctgtgcatcattggaggatgggcatttgccagccagtgccgcttaataatttggcagctgctgtccgattacaaacttccgtt

SEQ ID NO: 14025 - DNA, 741 bp, Muscodor strobelii
  misc_feature: SGI cDNA ID NO. 564613
  misc_feature: Reduced expression when VOC is produced
  misc_feature: Encodes the peptide sequence at SEQ ID NO 14026
atgtcttcaaagctcttcgcagtgatcgccggcgtaggcccaggcacaggtcgcgctaccgcattgcgtttcgcgcagacatacccagtggtgctaatggcgcggcgtcccgaatcatacgaaagcaccgtatctgagatcaacaacgccggcggaaaggcagtaggtatcagcgctgatgtcgccgatgccaagtcaatggagtccgctttcgagcagatcaagacacagctccctgacttgaagctgggtgctgctgtttataatgtcgcagctggctatgccttcaaaccgttcctcgaagttaagcctgaggagctggaggcgagtttggcggggaatactcggggattcttcaacttcgcgcaaaagacggttccacttctcctagaagccgtaccagaatctaagtaccctccaacattgatcgtaacaggcgccagctcatcaatccggggctcggccaagttccatactatggcagccggtatgtttggtcggcgagctcttactcagtctctggctcgtgaattcggaccgcagggcgttcacgttgtgcatgctattatcgatggtgtcattgatttggagaaatccaaggggtttaccgtcaataatggtgttgaagatggaaagcttaagcctgaggggattgccgagagctactggcacctgcacactcagcctcgctcgacattcacccaagagctggacttgcggccatatgttgagaagttttaa

SEQ ID NO: 14026 - protein, 246 aa, Muscodor strobelii
  misc_feature: SGI Peptide ID NO. 564613
  misc_feature (5)..(179): Pfam Id: PF00106 Pfam Desc: short chain dehydrogenase
  misc_feature (1)..(246): NCBI GI: 46110657 Blast Desc: FG02210.1 [Gibberella zeae PH-1]
  misc_feature (1)..(246): NCBI GI: 256724855 Blast Desc: NECHADRAFT_34599 [Nectria haematococca mpVI 77-13-4]
  misc_feature (3)..(246): NCBI GI: 171689482 Blast Desc: protein product [Podospora anserina] gi|170944703|emb|CAP70814.1| protein product [Podospora anserina]
  misc_feature (1)..(246): NCBI GI: 261356705 Blast Desc: short chain dehydrogenase [Verticillium albo-atrum VaMs.102]
  misc_feature (1)..(246): NCBI GI: 39978249 Blast Desc: MGG_07009 [Magnaporthe grisea 70-15] gi|145013408|gb|EDJ98049.1| MGG_07009 [Magnaporthe grisea 70-15]
  misc_feature (2)..(246): NCBI GI: 156060733 Blast Desc: SS1G_02509 [Sclerotinia sclerotiorum 1980] gi|154699913|gb|EDN99651.1| SS1G_02509 [Sclerotinia sclerotiorum 1980]
  misc_feature (1)..(246): NCBI GI: 116199461 Blast Desc: CHGG_07886 [Chaetomium globosum CBS 148.51] gi|88179165|gb|EAQ86633.1| CHGG_07886 [Chaetomium globosum CBS 148.51]
  misc_feature (2)..(246): NCBI GI: 154313996 Blast Desc: short chain dehydrogenase [Botryotinia fuckeliana B05.10] gi|150849087|gb|EDN24280.1| short chain dehydrogenase [Botryotinia fuckeliana B05.10]
  misc_feature (1)..(246): NCBI GI: 255953241 Blast Desc: Pc21g03090 [Penicillium chrysogenum Wisconsin 54-1255] gi|211589084|emb|CAP95206.1| Pc21g03090 [Penicillium chrysogenum Wisconsin 54-1255]
  misc_feature (5)..(246): NCBI GI: 256734795 Blast Desc: NECHADRAFT_90417 [Nectria haematococca mpVI 77-13-4]
  misc_feature (4)..(185): SWISSPROT Homolog: EC 1.1.1.5 Acetoin dehydrogenase
  misc_feature: Useful for introducing or modulating the production of volatile compounds
MSSKLFAVIAGVGPGTGRATALRFAQTYPVVLMARRPESYESTVSEINNAGGKAVGISADVADAKSMESAFEQIKTQLPDLKLGAAVYNVAAGYAFKPFLEVKPEELEASLAGNTRGFFNFAQKTVPLLLEAVPESKYPPTLIVTGASSSIRGSAKFHTMAAGMFGRRALTQSLAREFGPQGVHVVHAIIDGVIDLEKSKGFTVNNGVEDGKLKPEGIAESYWHLHTQPRSTFTQELDLRPYVEKF

SEQ ID NO: 14027 - DNA, 2063 bp, Muscodor strobelii
  misc_feature: SGI EST ID NO. CUFF.33476.1
  misc_feature: Variant of the nucleotide sequence at SEQ ID NO 14025
ccatcctccaatgatgcacagcgtaggacttctagactatgaacctggcatcatgtatagtcaaataaaacgtggcaaagtcggtcccgaacaatgctagtgatttgataatcaaccattggtatctggacgactaaacgcatctagactttaggtagcctcaagtgacggagcgcgagaagcgaagatgaggagttgaaggcactaataagccactggctcattcatctatataagatagcctcatgcttctatcaacattggaatatcataaagctatacaagtcatatcaatcacacaccattcatctatcgtctgttccatcaataacacacaatgtcttcaaagctcttcgcagtgatcgccggcgtaggcccaggcacaggtcgcgctaccgcattgcgtttcgcgcagacatacccagtggtgctaatggcgcggcgtcccgaatcatacgaaagcaccgtatctgagatcaacaacgccggcggaaaggcagtaggtatcagcgctgatgtcgccgatgccaagtcaatggagtccgctttcgagcagatcaagacacagctccctgacttgaagctgggtgctgctgtttataatgtcgcagctggctatgccttcaaaccgttcctcgaagttaagcctgaggagctggaggcgagtttggcggggaatactcggggattcttcaacttcgcgcaaaagacggttccacttctcctagaagccgtaccagaatctaagtaccctccaacattgatcgtaacaggcgccagctcatcaatccggggctcggccaagttccatactatggcagccggtatgtttggtcggcgagctcttactcagtctctggctcgtgaattcggaccgcagggcgttcacgttgtgcatgctattatcgatggtgtcattgatttggagaaatccaaggggtttaccgtcaataatggtgttgaagatggaaagcttaagcctgaggggattgccgagagctactggcacctgcacactcagcctcgctcgacattcacccaagagctggacttgcggccatatgttgagaagttttaacgtattttctcaaggatgtataataggtaaagacggaataattatacgatactattccttgtcattttgaaagtttgaacctattgctggcaatttgtatccaagaagaaagatctaggcaagaaaatgagttgagccttggaatttgcttgagatgaactattgctcgtcaagtgcctatcttgttcacgacctgccagtgtcacgcattggtctcataatcaagtaatgcaagcaattctctcataaatcagctgtatatgcgtaattgccacgcctgaatagagtaatgattcttgtgagagactatgcacagctttggacctccaaatgatcgactgtattgggactatcgctcagaattgtcagttgtatacccaactcaacgaagaggggcgactgatcaatctacgcgtggtcctagcctgggccagcaagaggcaattgaggatctcagatgtccgagactcgcccactcacatttaccccaaggtatctcgactcgtcgcttgatttcgtagtcacgtactacaagacgtctgtttcttgaatcttctggcttcttatgttgcgatcaagatccatcaaccgcgacgcctgttccatttagggcagccagccgttcctcctcctttttgtctctcatagcagcggtttcctctcgtagtttctcgagattccagacatcgtcgttatcgtcgtcgtcttcggagtcgttatcttccgtgaatctccaatttccactttcgaacatagcacggccagtcgattctttagcttgtcgagcctgttcttcggccgccttcttatcgagacgttccttcttccacttcgcaaatgtttcgggcgtaactggcgtcaacgtgccagtaagtttgtgtctttctgattccaagaaatcttctaaggtaagtgtcttgagtggagatttatccaatagagccttctccgcagcacgctgttccttggtcttgagaacgaagct

SEQ ID NO: 14028 - DNA, 735 bp, Muscodor strobelii
  misc_feature: SGI cDNA ID NO. 564614
  misc_feature: Encodes the peptide sequence at SEQ ID NO 14029
atggctgattccgtcacgacttcaacagcccaagaaggcagcgtcacatcagagccgaagaagagaggtcggcctaaaggctggaagaaaccaccagtcacggattccatgggagaaacagaggctaagcgtaggaagaaggaagaagcagctaagaatcaagatgccaaacgtcgtggtcgtcctcctcgaccgcctgagatgacgcccagagagtggtatgaaaggtcggatcccgatttcatgccatatagatgcgactgggacatttcgcacgaggagcaccagcagaagggttcaatatgtcccgcacaactacacaacctaaacacactgcgaagacatgtgtccctcatccacggcgaggacgacccgctgatctgccgatatcccaagtgcaaagatcagaagaacccaaaagagtttctgacgttggaggagttcgagcaacatatggagaagaagcacttcatatcgtacttatggcattggggcgagggatacaagaacgacggcatcgagacgctggagcaagaccccgagaagttaccgtcttacctgttcaatgagaagggagagcaggtcacgccatcgattaaagaccagacgactttgtctgatgccgagatgaagctgcggatgaagaaggttaggaagatgcaggctgagcagaatgcgaaagctccttcggatgcagagtgggcgaagcagatactgggtactgcttctcagtga

SEQ ID NO: 14029 - protein, 244 aa, Muscodor strobelii
  misc_feature: SGI Peptide ID NO. 564614
  misc_feature (1)..(234): NCBI GI: 171689484 Blast Desc: protein product [Podospora anserina] gi|170944704|emb|CAP70815.1| protein product [Podospora anserina]
  misc_feature (6)..(202): NCBI GI: 256729261 Blast Desc: NECHADRAFT_95744 [Nectria haematococca mpVI 77-13-4]
  misc_feature (15)..(242): NCBI GI: 116199459 Blast Desc: CHGG_07885 [Chaetomium globosum CBS 148.51] gi|88179164|gb|EAQ86632.1| CHGG_07885 [Chaetomium globosum CBS 148.51]
  misc_feature (4)..(202): NCBI GI: 156034202 Blast Desc: SS1G_13404 [Sclerotinia sclerotiorum 1980] gi|154698807|gb|EDN98545.1| SS1G_13404 [Sclerotinia sclerotiorum 1980]
  misc_feature (20)..(202): NCBI GI: 85080079 Blast Desc: NCU01796 [Neurospora crassa OR74A] gi|18376115|emb|CAD21181.1| [Neurospora crassa] gi|28917540|gb|EAA27238.1| [Neurospora crassa OR74A]
  misc_feature (19)..(216): NCBI GI: 154310823 Blast Desc: BC1G_06390 [Botryotinia fuckeliana B05.10] gi|150851189|gb|EDN26382.1| BC1G_06390 [Botryotinia fuckeliana B05.10]
  misc_feature (18)..(201): NCBI GI: 39978253 Blast Desc: MGG_07011 [Magnaporthe grisea 70-15] gi|145013406|gb|EDJ98047.1| MGG_07011 [Magnaporthe grisea 70-15]
  misc_feature (3)..(202): NCBI GI: 46117074 Blast Desc: FG04379.1 [Gibberella zeae PH-1]
  misc_feature (104)..(202): NCBI GI: 261356706 Blast Desc: conserved [Verticillium albo-atrum VaMs.102]
  misc_feature (81)..(167): NCBI GI: 261203034 Blast Desc: C2H2 finger domain-containing protein [Ajellomyces dermatitidis SLH14081] gi|239590828|gb|EEQ73409.1| C2H2 finger domain-containing protein [Ajellomyces dermatitidis SLH14081]
MADSVTTSTAQEGSVTSEPKKRGRPKGWKKPPVTDSMGETEAKRRKKEEAAKNQDAKRRGRPPRPPEMTPREWYERSDPDFMPYRCDWDISHEEHQQKGSICPAQLHNLNTLRRHVSLIHGEDDPLICRYPKCKDQKNPKEFLTLEEFEQHMEKKHFISYLWHWGEGYKNDGIETLEQDPEKLPSYLFNEKGEQVTPSIKDQTTLSDAEMKLRMKKVRKMQAEQNAKAPSDAEWAKQILGTASQ

SEQ ID NO: 14030 - DNA, 2179 bp, Muscodor strobelii
  misc_feature: SGI EST ID NO. CUFF.33482.0
  misc_feature: Variant of the nucleotide sequence at SEQ ID NO 14028
cacaaacgcgactagcagtgcatataagatcatcgccagtcagcactccgttcaccccgattaatgagccatctcatcctataccttcaagacttatttcagaatctggaacacgtacaaaacgacaactagtatctggtaattcaaacgctggagcaaacatggctgattccgtcacgacttcaacagcccaagaaggcagcgtcacatcagagccgaagaagagaggtcggcctaaaggctggaagaaaccaccagtcacggattccatgggagaaacagaggctaagcgtaggaagaaggaagaagcagctaagaatcaagatgccaaacgtcgtggtcgtcctcctcgaccgcctgagatgacgcccagagagtggtatgaaaggtcggatcccgatttcatgccatatagatgcgactgggacatttcgcacgaggagcaccagcagaagggttcaatatgtcccgcacaactacacaacctaaacacactgcgaagacatgtgtccctcatccacggcgaggacgacccgctgatctgccgatatcccaagtgcaaagatcagaagaacccaaaagagtttctgacgttggaggagttcgagcaacatatggagaagaagcacttcatatcgtacttatggcattggggcgagggatacaagaacgacggcatcgagacgctggagcaagaccccgagaagttaccgtcttacctgttcaatgagaagggagagcaggtcacgccatcgattaaagaccagacgactttgtctgatgccgagatgaagctgcggatgaagaaggttaggaagatgcaggctgagcagaatgcgaaagctccttcggatgcagagtgggcgaagcagatactgggtactgcttctcagtgaggacatatgtcgatgtcgttacgattccttaggtcttaaaaagaggttggggcaagattatagtctctcgctgagaagggtatgccaatacgtcgacagacctgggctacaggagagctttctacgagagtacatgaaagcttttatgatgagatgtattattgcttgaaaggcgctgaaggaacaacctctcaaaaaatcagaagaacaggctatagaccacgggcgagttcgcatatcaggtcgtccacgatttgtattgcaacgcctaactcaagaatcaaaaaaactccatgattcaatataatgaaatccaccgcatctgacatgtctaatgaatacctgatcagctctatctgcttcctgagtttcacatattcgactagagagtgcgagtaatacacagaatgactcgttatcgaagtcccggattgctaggtgtacgtgcgtacacctgagatagatcatagagtttgtggcgttacccgtgcaagaatgtctggtgccttcgcattttatttttatccaggttcgatggtcgttgcgctttgaaatcggccgcactggcgacaggttcggaattattgggaatacatacgatttcaaccgctgactgttgctcactttcagcgaatttgtattgatgacttgtactcgttagtagccggtgttatgaacctgaataccaccagcacttttataatgtgttacgaatcaccattgaacgtcgtgctttctgatctcggcattatcctgcgttgcatgaatcatgtacgcacatactcacatccgaaaaggcaactaaggtatgagaattgatgtaatccaactactgctgtattggtgcctgcatcgatcattcaggattctgggctgtctgcatcctgtcgtagcttctaagtactttctcatccttacggaattaactgtccttcgggtagctacatcttgacgtctgtggtattataaatgtagctgttcatgcataacggtacgcgtaaggcgcatctggctggctccaaagtttaatgcatcgacactcatgtctttgcagtgcatgacgggagtaaattgtgaacaagcttcttgatccgaatgtctcgtatacacagtgtccgatcattcttacctgagccggcctgagctctgtcctaccgcaagccaacctcctgacagccgtttgcccgtttttcatccctctcccctagaaatcattctcatctaggaggccggcacagatgctgtagctgatctcacgtagtcaatgctctatggttgtcaaa

SEQ ID NO: 14031 - DNA, 2082 bp, Muscodor strobelii
  misc_feature: SGI cDNA ID NO. 564615
  misc_feature: Encodes the peptide sequence at SEQ ID NO 14032
atggccacaggcgttgacgatccatcccaggccgcctcctcttctgcctcatcgaccctcctgccaactccaacgcccatccccaccgccaaccgccgtgcgcaccactttcgcatcagacagcggcttgcgtcatggcatcacccgcaacctgagcaccgcactcctccatcccacgcaccttccgcccgcaactcctcgcttcacgccgacgacgaaaacatgccccccaagtcctcggccgcccaacccggcagcaatggtcacttcaaccagaagctgaagaacttcttcggccgtctgaacacacacaatggcgtcaccgacaaagagaaagagaggcattccgacaatggacccaacaagtcagacacgaagcgcatccagcctaaacgcttcttcaccggcaccgtcggcaggttgagatcgactaccaccgctagcgaaggtaaccctctcgaagatgccatgagtcctatcgtctctgccaacccttacttcgcacaccaaggtcagccaaaataccaccatcaagacaccggctctgtaccgcctagtccgccgcacaccccgagtatcaagatcgacggcccgaatggtgctaaggaacaggcgaccaacgccggcaaggaggaactggcccgcaagctgcgaagagtcgctagtgcccccaatgctcagggtctttttaacaagggccagtctgaaggtgaacggcctgctaccgctgagcttggcaaggagcctctcgtgcaaggcgaaaacgcttcgtccttgggcctggtggactccaagtcctccccctccctcgctgatgccagagcgctgtcggcacccgacagagatggacttggcgcccttcctccgccaggccagaatgccctatcgttccgccgcacatacagttccaattcgatcaaagtccggacggtggaagttggaccctccagttttgacaagatcaagttgattggcaagggcgacgttggaaaggtttatctggttagagagaagaagagtactagactgtttgccatgaaagttctaagcaagaaagagatgataaaacgcaacaagattaaacgagcgcttgccgaacaagaaatcctagccaccagcaatcacccatttatcgtgacgctataccattctttccagtctgaggaccatctctacctttgtatggaatactgcagcggtggtgaattcttccgcgcgttgcagactcgtcccggaaaatgcatacctgaagatgcagcccgtttctatgcggctgaggtgacagcagctctagaatacctgcatctgatgggcttcatctaccgagatctgaagccagaaaatattctgctgcatcaatctggacacatcatgctttccgatttcgatctgtctaaacagtcgggccctggtggcaagcctacgatgattatgggaaagaatggcgccagcacctcgtctctacctacaatcgatacgaaatcatgcatcgccgacttccggaccaactcgttcgtgggaaccgaggaatacatcgcccctgaagtcatcaagggaagtggacacactagtgctgtagactggtggacactcggtattctagtattcgaaatgctctacggcactactcctttcaaaggaaaaaataggaatgcaacgtttgcgaatatcctccgcgaggaggtcactttcccagaacattcgggcgcccctccgatctccaatttatgtaaatctctgataagaaagctgctcatcaaagacgaaacacgccggctcggcgcaagagccggcgcctctgatataaaaacacatgctttcttccgaacaacgcagtgggccctcatcaggcatcaagcgcctcccatagtccctcatgctggtcgcggtgttgacactgtcaacttcagaaatgtcaaagagagccaaagtgtcgatatcacaaccagcaagggagttcctctagacagcggcctagcaacaccgggtaacgagatcgccgatccgtttgaagaattcaacagcgtaactttacatcatgacggagacgaacattacagtgaccacgattctaaccgatag

SEQ ID NO: 14032 - protein, 693 aa, Muscodor strobelii
  misc_feature: SGI Peptide ID NO. 564615
  misc_feature (318)..(608): Pfam Id: PF00069 Pfam Desc: Protein kinase domain
  misc_feature (318)..(479): Pfam Id: PF00069 Pfam Desc: Protein kinase domain
  misc_feature (502)..(608): Pfam Id: PF00069 Pfam Desc: Protein kinase domain
  misc_feature (318)..(462): Pfam Id: PF07714 Pfam Desc: Protein tyrosine kinase
  misc_feature (88)..(686): NCBI GI: 85080083 Blast Desc: NCU01797 [Neurospora crassa OR74A] gi|6093530|sp|O42626.1|NRC2_NEUCR RecName: Full=Serine/threonine-protein kinase nrc-2; AltName: conidiation
  misc_feature (85)..(686): NCBI GI: 256729262 Blast Desc: NECHADRAFT_71336 [Nectria haematococca mpVI 77-13-4]
  misc_feature (77)..(683): NCBI GI: 115387583 Blast Desc: serine/threonine-protein kinase nrc-2 [Aspergillus terreus NIH2624] gi|114195381|gb|EAU37081.1| serine/threonine-protein kinase nrc-2 [Aspergillus terreus
  misc_feature (86)..(678): NCBI GI: 156047753 Blast Desc: SS1G_09566 [Sclerotinia sclerotiorum 1980] gi|154693961|gb|EDN93699.1| SS1G_09566 [Sclerotinia sclerotiorum 1980]
  misc_feature (89)..(684): NCBI GI: 242762789 Blast Desc: serine/threonine protein kinase (Nrc-2), [Talaromyces stipitatus ATCC 10500] gi|218723645|gb|EED23062.1| serine/threonine protein kinase (Nrc-2), [Talaromyces stipitatus
  misc_feature (89)..(683): NCBI GI: 121713674 Blast Desc: serine/threonine protein kinase (Nrc-2), [Aspergillus clavatus NRRL 1] gi|119402601|gb|EAW13022.1| serine/threonine protein kinase (Nrc-2), [Aspergillus clavatus NRRL 1]
  misc_feature (89)..(683): NCBI GI: 119479027 Blast Desc: serine/threonine protein kinase (Nrc-2), [Neosartorya fischeri NRRL 181] gi|119407696|gb|EAW17645.1| serine/threonine protein kinase (Nrc-2), [Neosartorya fischeri NRRL 181]
  misc_feature (86)..(678): NCBI GI: 154311789 Blast Desc: BC1G_05928 [Botryotinia fuckeliana B05.10] gi|150850578|gb|EDN25771.1| BC1G_05928 [Botryotinia fuckeliana B05.10]
  misc_feature (89)..(684): NCBI GI: 212529576 Blast Desc: serine/threonine protein kinase (Nrc-2), [Penicillium marneffei ATCC 18224] gi|210074343|gb|EEA28430.1| serine/threonine protein kinase (Nrc-2), [Penicillium marneffei
  misc_feature (89)..(684): NCBI GI: 225558325 Blast Desc: serine/threonine-protein kinase nrc-2 [Ajellomyces capsulatus G186AR]
  misc_feature (88)..(686): SWISSPROT Homolog: EC 2.7.11.1 Non-specific serine/threonine protein kinase
MATGVDDPSQAASSSASSTLLPTPTPIPTANRRAHHFRIRQRLASWHHPQPEHRTPPSHAPSARNSSLHADDENMPPKSSAAQPGSNGHFNQKLKNFFGRLNTHNGVTDKEKERHSDNGPNKSDTKRIQPKRFFTGTVGRLRSTTTASEGNPLEDAMSPIVSANPYFAHQGQPKYHHQDTGSVPPSPPHTPSIKIDGPNGAKEQATNAGKEELARKLRRVASAPNAQGLFNKGQSEGERPATAELGKEPLVQGENASSLGLVDSKSSPSLADARALSAPDRDGLGALPPPGQNALSFRRTYSSNSIKVRTVEVGPSSFDKIKLIGKGDVGKVYLVREKKSTRLFAMKVLSKKEMIKRNKIKRALAEQEILATSNHPFIVTLYHSFQSEDHLYLCMEYCSGGEFFRALQTRPGKCIPEDAARFYAAEVTAALEYLHLMGFIYRDLKPENILLHQSGHIMLSDFDLSKQSGPGGKPTMIMGKNGASTSSLPTIDTKSCIADFRTNSFVGTEEYIAPEVIKGSGHTSAVDWWTLGILVFEMLYGTTPFKGKNRNATFANILREEVTFPEHSGAPPISNLCKSLIRKLLIKDETRRLGARAGASDIKTHAFFRTTQWALIRHQAPPIVPHAGRGVDTVNFRNVKESQSVDITTSKGVPLDSGLATPGNEIADPFEEFNSVTLHHDGDEHYSDHDSNR

SEQ ID NO: 14033 - DNA, 2948 bp, Muscodor strobelii
  misc_feature: SGI EST ID NO. CUFF.33529.0
  misc_feature: Variant of the nucleotide sequence at SEQ ID NO 14031
cgctaataaccaagttctccaagaaacccattgacccagtcctgttccaggcgagccaggcgaatcaggcgaatcagccagagggcagcccaggcctgttgctagtgtctagcaccgctctgaatcggccctgagtcccctaccagcggaccacagcgcatccaacaggccgaaaactgggcttcgtatcgcggccgtctggctggctgtgtcccaccccagtatccccagcaccagcaccagaaacagccgcaagccgctgccgccgcgatggccacaggcgttgacgatccatcccaggccgcctcctcttctgcctcatcgaccctcctgccaactccaacgcccatccccaccgccaaccgccgtgcgcaccactttcgcatcagacagcggcttgcgtcatggcatcacccgcaacctgagcaccgcactcctccatcccacgcaccttccgcccgcaactcctcgcttcacgccgacgacgaaaacatgccccccaagtcctcggccgcccaacccggcagcaatggtcacttcaaccagaagctgaagaacttcttcggccgtctgaacacacacaatggcgtcaccgacaaagagaaagagaggcattccgacaatggacccaacaagtcagacacgaagcgcatccagcctaaacgcttcttcaccggcaccgtcggcaggttgagatcgactaccaccgctagcgaaggtaaccctctcgaagatgccatgagtcctatcgtctctgccaacccttacttcgcacaccaaggtcagccaaaataccaccatcaagacaccggctctgtaccgcctagtccgccgcacaccccgagtatcaagatcgacggcccgaatggtgctaaggaacaggcgaccaacgccggcaaggaggaactggcccgcaagctgcgaagagtcgctagtgcccccaatgctcagggtctttttaacaagggccagtctgaaggtgaacggcctgctaccgctgagcttggcaaggagcctctcgtgcaaggcgaaaacgcttcgtccttgggcctggtggactccaagtcctccccctccctcgctgatgccagagcgctgtcggcacccgacagagatggacttggcgcccttcctccgccaggccagaatgccctatcgttccgccgcacatacagttccaattcgatcaaagtccggacggtggaagttggaccctccagttttgacaagatcaagttgattggcaagggcgacgttggaaaggtttatctggttagagagaagaagagtactagactgtttgccatgaaagttctaagcaagaaagagatgataaaacgcaacaagattaaacgagcgcttgccgaacaagaaatcctagccaccagcaatcacccatttatcgtgacgctataccattctttccagtctgaggaccatctctacctttgtatggaatactgcagcggtggtgaattcttccgcgcgttgcagactcgtcccggaaaatgcatacctgaagatgcagcccgtttctatgcggctgaggtgacagcagctctagaatacctgcatctgatgggcttcatctaccgagatctgaagccagaaaatattctgctgcatcaatctggacacatcatgctttccgatttcgatctgtctaaacagtcgggccctggtggcaagcctacgatgattatgggaaagaatggcgccagcacctcgtctctacctacaatcgatacgaaatcatgcatcgccgacttccggaccaactcgttcgtgggaaccgaggaatacatcgcccctgaagtcatcaagggaagtggacacactagtgctgtagactggtggacactcggtattctagtattcgaaatgctctacggcactactcctttcaaaggaaaaaataggaatgcaacgtttgcgaatatcctccgcgaggaggtcactttcccagaacattcgggcgcccctccgatctccaatttatgtaaatctctgataagaaagctgctcatcaaagacgaaacacgccggctcggcgcaagagccggcgcctctgatataaaaacacatgctttcttccgaacaacgcagtgggccctcatcaggcatcaagcgcctcccatagtccctcatgctggtcgcggtgttgacactgtcaacttcagaaatgtcaaagagagccaaagtgtcgatatcacaaccagcaagggagttcctctagacagcggcctagcaacaccgggtaacgagatcgccgatccgtttgaagaattcaacagcgtaactttacatcatgacggagacgaacattacagtgaccacgattctaaccgatagcacaatcgtacatttatcgggacccgattcatgatctagctacatacgtcatattcaacggccggccttttcttcattagatttcgtacacagtccttgtcacacgcgtttgggatgtattatgagcctccgatcacattgtactaggtatttaccgttcttctacctctcagttctaggcgattggcggaatgccgcgttgggcggggaccatggaatggataagaaagaggatgcgcaaagcagcaacaagcaagtaaatcaaagtcgcattgtcggcgtttcttccaacctcacattggcgtatggagtttgggagacgaacaagaagaaaaagcgacaatacttgacatcaaccacacctacatcagtagtagcaaacccttatgtagcatcaatcagaacaggtttgccgacctcatccggtccatttaaagctgtcgtcgtgaacaataatgtttgtgactgccttttatgttcgacctactggggaagaagcgatgacatctcggcagtagacggttatgacttgctaagtaatactagctagccgtattcaacgatgagataatgatagaatgggagaaacatttaaa

SEQ ID NO: 14034 - DNA, 795 bp, Muscodor strobelii
  misc_feature: SGI cDNA ID NO. 564616
  misc_feature: Encodes the peptide sequence at SEQ ID NO 14035
atgcctgagcagcagaattcaacccaacaagccgcgggcgatgtagccgtggtaaagccagcctcatcgtcacaagatgccgaggtcgacgccaacggctatggttacgactcaacgaatgattcctcatcacaacccgacgagggtcggcggagtctagaccgtgtaacatacctcggtggagtcgtcgtacccttcacagttatatcaggtatcttgtcaataagtgagccatatgggcctggtggctctaaattctggatattctgggttgtcagcgtaccgctgaccatcttgacacttctcctcatatacgcggactcgatccgcaaagcagaagtctggatcgaagaagcatccgctgcatccgaaaaacaggatgatcctcccacgcctcaacttgaagaggctattccgtacagtatctcgatgccgacgaacaggatagcaacagcggagaccgcttccccgcccggggctatgtccgctccgggcagactagatacggattctgagatggatgatggtgatattccggatacgtttgtcgagaagcgatgggcgaactatcagaatggtagtgctgcgaatgcgatgaaagcgaagaagtggaagaaggaacagttgggctggatgggtgcttgcgcgaccctttttcaggtttacaaacttaagaaaggggtgccgcctggtcatccgccctatggtcatgggaggaaacctggtggtggtggtggaggaggaggaggaggaggaggaaggggtcctagacgggcgaagacgatgactttttag

SEQ ID NO: 14035 - protein, 264 aa, Muscodor strobelii
  misc_feature: SGI Peptide ID NO. 564616
  misc_feature (47)..(119): NCBI GI: 171689448 Blast Desc: protein product [Podospora anserina] gi|170944686|emb|CAP70797.1| protein product [Podospora anserina]
  misc_feature (47)..(216): NCBI GI: 116199449 Blast Desc: CHGG_07880 [Chaetomium globosum CBS 148.51] gi|88179159|gb|EAQ86627.1| CHGG_07880 [Chaetomium globosum CBS 148.51]
  misc_feature (48)..(120): NCBI GI: 85080088 Blast Desc: NCU01798 [Neurospora crassa OR74A] gi|18376113|emb|CAD21179.1| [Neurospora crassa] gi|28917542|gb|EAA27240.1| [Neurospora crassa OR74A]
  misc_feature (1)..(127): NCBI GI: 46117082 Blast Desc: FG04383.1 [Gibberella zeae PH-1]
  misc_feature (47)..(120): NCBI GI: 256729263 Blast Desc: NECHADRAFT_95749 [Nectria haematococca mpVI 77-13-4]
  misc_feature (48)..(111): NCBI GI: 154291805 Blast Desc: BC1G_14979 [Botryotinia fuckeliana B05.10] gi|150846587|gb|EDN21780.1| BC1G_14979 [Botryotinia fuckeliana B05.10]
  misc_feature (39)..(107): NCBI GI: 242763409 Blast Desc: conserved [Talaromyces stipitatus ATCC 10500] gi|218723765|gb|EED23182.1| conserved [Talaromyces stipitatus ATCC 10500]
  misc_feature (48)..(103): NCBI GI: 256725035 Blast Desc: NECHADRAFT_26045 [Nectria haematococca mpVI 77-13-4]
  misc_feature (48)..(101): NCBI GI: 242788204 Blast Desc: conserved [Talaromyces stipitatus ATCC 10500] gi|218721318|gb|EED20737.1| conserved [Talaromyces stipitatus ATCC 10500]
  misc_feature (55)..(103): NCBI GI: 145607946 Blast Desc: MGG_09963 [Magnaporthe grisea 70-15] gi|145015420|gb|EDJ99956.1| MGG_09963 [Magnaporthe grisea 70-15]
MPEQQNSTQQAAGDVAVVKPASSSQDAEVDANGYGYDSTNDSSSQPDEGRRSLDRVTYLGGVVVPFTVISGILSISEPYGPGGSKFWIFWVVSVPLTILTLLLIYADSIRKAEVWIEEASAASEKQDDPPTPQLEEAIPYSISMPTNRIATAETASPPGAMSAPGRLDTDSEMDDGDIPDTFVEKRWANYQNGSAANAMKAKKWKKEQLGWMGACATLFQVYKLKKGVPPGHPPYGHGRKPGGGGGGGGGGGGRGPRRAKTMTF

SEQ ID NO: 14036 - DNA, 2685 bp, Muscodor strobelii
  misc_feature: SGI EST ID NO. CUFF.33436.1
  misc_feature: Variant of the nucleotide sequence at SEQ ID NO 14034
ccggaaaactgcaccatctcgtgactctcagcactcacgagacacttgagcaatatgaatgagagtggatgcgaaacgacctcgctgatcctcacatggtttgtctagtgagcctatcatattgtcaaaatagatttattccgctcgatccgtaagcatctggatggtttgaatagctctatttcgagtattctgagtacaaactgcgcgttttcgaattttcggggatgctcgtatcggccggagagactgcgtttacattgcacggagttcattttagtacaacaacagaggaaactcatgaaataaacagcattcctcttgcgctcttgtttgatgttaaatgcattaaatatcttcatatcttacttacgccgcatcgacgcattacctaacctctcgcctaggtagctcgtgacgaacacagatctgggttagtctaggtaagatcgtcagccttagcagagctgagctctcccaattcctactgaacttcaaatggaattcggccactatggactatgacatcacctgttaatttctcatctgcatacatcaaaaatgtgaaaaaagacatcggctcccagcgaggaataaaacaacgactgccactacctagccctgagtaaaaccatcgcgatacctaatttactggggattcatatgtttatgggataagttcggaccatatttcccagcacgggataaatccccaccatgcaaccagacgacacaacatcttcaaagtcggagccaacactgagtcctctcacatatcccgacgcgccaatccgtccaccgaacaacctaggactcaaagaaaacaagcagaccaacaagcagcctcctacgtcttaacatggacagacgacgagatcgccacgacgcgcattaacagcgcggcgcagctccgctcgcgcatccagcaagatgggaactctgaacggcatttatttgtgcttcatggcttaccggtggattatctgatggttctgagggaagtcctggggattgatgataagtttgttgagggacatgttggtagacggaatccgagacggatgaagaagtgtaaggcgagttgggcgcattgggattatccggagcttgttcagcagtctggtggtccggttgcgggtgcgggtgatgctgcgcagactgcgcagaagccgtggacaccgacggatcttgtgggtgagccgccgtttcatcggatttccacgagtggtgaaggggtcttgttttgtcgggcgagcatttgggttgaggagagaggacatgttctctgtttagaccgccccgtgtgggcaagtcctgggtcaggtatttccaaagcgcggtataaaactgaggctgcgcagtcgatacctgatgcgaacggtatatcgacggtcaccatgacgtacgatagtaatggcaacgcaacaacagtgggcgatgagattccgagtctggagacagtgctccgtgagactctgcgcgatgagtggcatgattgtgaagatctaggggatttcttagaggaactcgttatcgcgcaatggtctgccttcctggatgaattaggtgctgaccttcctcttggtgcgtccgagactacggcactttactggcaggcgcagaattgtatggagcggaatttaaacgtttcgcggcagagggcgaagttgagggtgtcaactggccttaaatctaaaggtccttccgcaaccgaggaatggcaggctttgatcgcgcgattaagccgacgagtgcaactgctcagtcaacttagccctctcatggcgattcagatgcctgagcagcagaattcaacccaacaagccgcgggcgatgtagccgtggtaaagccagcctcatcgtcacaagatgccgaggtcgacgccaacggctatggttacgactcaacgaatgattcctcatcacaacccgacgagggtcggcggagtctagaccgtgtaacatacctcggtggagtcgtcgtacccttcacagttatatcaggtatcttgtcaataagtgagccatatgggcctggtggctctaaattctggatattctgggttgtcagcgtaccgctgaccatcttgacacttctcctcatatacgcggactcgatccgcaaagcagaagtctggatcgaagaagcatccgctgcatccgaaaaacaggatgatcctcccacgcctcaacttgaagaggctattccgtacagtatctcgatgccgacgaacaggatagcaacagcggagaccgcttccccgcccggggctatgtccgctccgggcagactagatacggattctgagatggatgatggtgatattccggatacgtttgtcgagaagcgatgggcgaactatcagaatggtagtgctgcgaatgcgatgaaagcgaagaagtggaagaaggaacagttgggctggatgggtgcttgcgcgaccctttttcaggtttacaaacttaagaaaggggtgccgcctggtcatccgccctatggtcatgggaggaaacctggtggtggtggtggaggaggaggaggaggaggaggaaggggtcctagacgggcgaagacgatgactttttagataccattttttaaatgtgagatcttgctccttgatccccttgatcacgagtagttcttgcgaaattaatatattgagatgtcatatatcctctgag

SEQ ID NO: 14037 - DNA, 267 bp, Muscodor strobelii
  misc_feature: SGI cDNA ID NO. 564617
  misc_feature: Encodes the peptide sequence at SEQ ID NO 14038
atggatccatcccaaaacccattgctatcaccgccagagctctcgcctttagagcaggaggttttggaggagtatgagcgtctagcagagaacatgaagaagctcgcctcagtactagacgacatggccagccgccccacaacagagattctcgatggtctgagagagctcgagcgcaagactagtctcgtttttacgcttctgaaggctagtgtgtacagtattgtgcttcagcaggagatcgattgggggaaccaggatcagtga

SEQ ID NO: 14038 - protein, 88 aa, Muscodor strobelii
  misc_feature: SGI Peptide ID NO. 564617
  misc_feature (14)..(88): Pfam Id: PF08656 Pfam Desc: DASH complex subunit Dad3
  misc_feature (14)..(84): Pfam Id: PF08656 Pfam Desc: DASH complex subunit Dad3
  misc_feature (8)..(88): NCBI GI: 261356708 Blast Desc: conserved [Verticillium albo-atrum VaMs.102]
  misc_feature (1)..(85): NCBI GI: 46107530 Blast Desc: FG00648.1 [Gibberella zeae PH-1]
  misc_feature (6)..(83): NCBI GI: 85080092 Blast Desc: NCU01799 [Neurospora crassa OR74A] gi|18376112|emb|CAD21178.1| [Neurospora crassa] gi|28917543|gb|EAA27241.1| conserved [Neurospora crassa OR74A]
  misc_feature (6)..(86): NCBI GI: 145605615 Blast Desc: MGG_06996 [Magnaporthe grisea 70-15] gi|145013425|gb|EDJ98066.1| MGG_06996 [Magnaporthe grisea 70-15]
  misc_feature (10)..(81): NCBI GI: 171689470 Blast Desc: protein product [Podospora anserina] gi|170944697|emb|CAP70808.1| protein product [Podospora anserina]
  misc_feature (2)..(81): NCBI GI: 156034238 Blast Desc: SS1G_13422 [Sclerotinia sclerotiorum 1980] gi|154698825|gb|EDN98563.1| SS1G_13422 [Sclerotinia sclerotiorum 1980]
  misc_feature (6)..(84): NCBI GI: 238841212 Blast Desc: conserved [Microsporum canis CBS 113480]
  misc_feature (2)..(84): NCBI GI: 225558323 Blast Desc: [Ajellomyces capsulatus G186AR]
  misc_feature (6)..(84): NCBI GI: 240108229 Blast Desc: CPC735_005750 [Coccidioides posadasii C735 delta SOWgp]
  misc_feature (14)..(82): NCBI GI: 169623494 Blast Desc: SNOG_14989 [Phaeosphaeria nodorum SN15] gi|111056412|gb|EAT77532.1| SNOG_14989 [Phaeosphaeria nodorum SN15]
MDPSQNPLLSPPELSPLEQEVLEEYERLAENMKKLASVLDDMASRPTTEILDGLRELERKTSLVFTLLKASVYSIVLQQEIDWGNQDQ

SEQ ID NO: 14039 - DNA, 2601 bp, Muscodor strobelii
  misc_feature: SGI EST ID NO. CUFF.33494.0
  misc_feature: Variant of the nucleotide sequence at SEQ ID NO 14037
aaaccatttccgaaaacttggatagctgtagatctagagctgttgaaatagacttgaatagtgggggcggggcatcaagacgcggtgcgacacaactcaacctcaactctccaatcaaccaaatgactacatcaacatcaacagcgtgaactcaaattctactcccgttccatcgcgctcaccaaaatcactcagtccaaaacgcatattccagatcctcagccaaaatggatccatcccaaaacccattgctatcaccgccagagctctcgcctttagagcaggaggttttggaggagtatgagcgtctagcagagaacatgaagaagctcgcctcagtactagacgacatggccagccgccccacaacagagattctcgatggtctgagagagctcgagcgcaagactagtctcgtttttacgcttctgaaggctagtgtgtacagtattgtgcttcagcaggagatcgattgggggaaccaggatcagtgaggatgtatgtcgcttggcgagcggtcggtttgtgatagagaggctgaatcatatcgagtgagggttgagatgtgatatggtgacgaagtatgcgaggctcttgaaaaaggatgtacgagagaggcatgatggcctggctcatcgttgaaggtcatcgccgctgcgctttggtgcccatacagcagcagagcgcaacattatactggatgtgtatctatactcaggcgctctgcatgggcgtggggaggaagctaggaaaggaaggaaatgagaattcgtaaagaattcatggtacggatacttatgatacccaaaaacacggagagagatccctctacaacgacaatggaatcacaccagctaaacatgcacttgatggtgccttatcaacgatggatatagtgcgctcccttgaacttgctgcttttctacaaaagaagccttcaggttgtagtataaatatacacataagtacatgtattatatctttcataatatacaaagtcttcccgcactgtacatcccatctaataggggttaccaccataatacaccttccgtacatcgaccatcttctttccgcggccgatggcgatctcgttgggatcccgctggttcatcagggcgtcgacgcaggctttggcggagttcatggggttgcggcctcgtggcatcttggcagcgatgtctttgatgccgacgatacggaagatctcgaagaatcggtgggaggcgcggagtccgaatcctgtgggagatcgttagaaattttacgatgttggggtgaatgaggagatttaaacgggtagtgaggtctggcagagcgtggttggtaggtttgtacgtaccgggaggacgagcttcgagcttcacgatcgtcgaaccgaatttactctcactgttgccgaagatagtcctgtcttcataccgacgtataggcaccatgttctgaatagcgagtagctttgctttctgaacagcaatttgagactcggtcgatttcgcctcgccaacaccaagacgtccatccccatttccagcgatggcgagaacccaggtactcatgattttcccgagacgggtctggttggtgacgaaacgacggacgagaatcttaacgctaatggtgttgatgtccttcaacgtcatgcccgtcttccgcttcgtgaccgtgtaaacacccaattcgtcatcgtcgcgctcggcttcgtccgctgcgcttctgtacatgccggcgacaccgctgagtttctcgcctagctcgggggctagcgccgtgtcggatttgcccttgaagttggcgaacgttgagcgctctgttagatacttctcggtggctagttcccagtcgactttttcgagaatcgtctcctccatttccttctctgacatgcccttgaagtcgatgcccttgggcacctggctcttgaggtagtctgtgaggtcgtcggcgtgctcctcggggctcatgaacctgagtttgtggggaggcatggggttggattgctggcgcttgtcgacgattgggaggtgcttgctgaagtcgtcgaggtaagggagtctgtaggagtcgaggcgtatgcggccctgtatcgtcaggtctttggggtcgatggcggcttcacccgcttctaatgctgccatctgggcgggtgtgtatttctgcttcaagacctccatctcctcgggtgtgtagttggggaatttctccttggcgaactcgtcgattttctcgggcgtcaccaagcccagctcctcagcccgtatgctcttgaaccgcggcttccgcttggccaggctggccgagctgtgaaaaggagcgtgacatcgcggtgctggggcggctttgacggcgctgcagctcggtgcgttgagcccccgcgacagcaggcttcgtgctggccgtgctacactcatcgcatcgccggctgaagtcgaaagccgtgtgtttggctatgtgatgagtgacgcaacggtgagaattgatgacaggcgctcgtactggtctttcgcagcttcaatctcgactgcaattggcacatggatcttttttctgggaccctgaccaagtacgggttttcagttctgccgatctaccccggtcgcg

SEQ ID NO: 14040 - DNA, 1290 bp, Muscodor strobelii
  misc_feature: SGI cDNA ID NO. 564618
  misc_feature: Reduced expression when VOC is produced
  misc_feature: Encodes the peptide sequence at SEQ ID NO 14041
atgagtgtagcacggccagcacgaagcctgctgtcgcgggggctcaacgcaccgagctgcagcgccgtcaaagccgccccagcaccgcgatgtcacgctccttttcacagctcggccagcctggccaagcggaagccgcggttcaagagcatacgggctgaggagctgggcttggtgacgcccgagaaaatcgacgagttcgccaaggagaaattccccaactacacacccgaggagatggaggtcttgaagcagaaatacacacccgcccagatggcagcattagaagcgggtgaagccgccatcgaccccaaagacctgacgatacagggccgcatacgcctcgactcctacagactcccttacctcgacgacttcagcaagcacctcccaatcgtcgacaagcgccagcaatccaaccccatgcctccccacaaactcaggttcatgagccccgaggagcacgccgacgacctcacagactacctcaagagccaggtgcccaagggcatcgacttcaagggcatgtcagagaaggaaatggaggagacgattctcgaaaaagtcgactgggaactagccaccgagaagtatctaacagagcgctcaacgttcgccaacttcaagggcaaatccgacacggcgctagcccccgagctaggcgagaaactcagcggtgtcgccggcatgtacagaagcgcagcggacgaagccgagcgcgacgatgacgaattgggtgtttacacggtcacgaagcggaagacgggcatgacgttgaaggacatcaacaccattagcgttaagattctcgtccgtcgtttcgtcaccaaccagacccgtctcgggaaaatcatgagtacctgggttctcgccatcgctggaaatggggatggacgtcttggtgttggcgaggcgaaatcgaccgagtctcaaattgctgttcagaaagcaaagctactcgctattcagaacatggtgcctatacgtcggtatgaagacaggactatcttcggcaacagtgagagtaaattcggttcgacgatcgtgaagctcgaagctcgtcctcccggattcggactccgcgcctcccaccgattcttcgagatcttccgtatcgtcggcatcaaagacatcgctgccaagatgccacgaggccgcaaccccatgaactccgccaaagcctgcgtcgacgccctgatgaaccagcgggatcccaacgagatcgccatcggccgcggaaagaagatggtcgatgtacggaaggtgtattatggtggtaacccctattag

SEQ ID NO: 14041 - protein, 429 aa, Muscodor strobelii
  misc_feature: SGI Peptide ID NO. 564618
  misc_feature (264)..(330): Pfam Id: PF00333 Pfam Desc: Ribosomal protein S5, N-terminal domain
  misc_feature (340)..(413): Pfam Id: PF03719 Pfam Desc: Ribosomal protein S5, C-terminal domain
  misc_feature (268)..(330): Pfam Id: PF00333 Pfam Desc: Ribosomal protein S5, N-terminal domain
  misc_feature (341)..(413): Pfam Id: PF03719 Pfam Desc: Ribosomal protein S5, C-terminal domain
  misc_feature (1)..(427): NCBI GI: 145605617 Blast Desc: MGG_06995 [Magnaporthe grisea 70-15] gi|145013426|gb|EDJ98067.1| MGG_06995 [Magnaporthe grisea 70-15]
  misc_feature (1)..(426): NCBI GI: 116199447 Blast Desc: CHGG_07879 [Chaetomium globosum CBS 148.51] gi|88179158|gb|EAQ86626.1| CHGG_07879 [Chaetomium globosum CBS 148.51]
  misc_feature (34)..(426): NCBI GI: 171689468 Blast Desc: protein product [Podospora anserina] gi|170944696|emb|CAP70807.1| protein product [Podospora anserina]
  misc_feature (42)..(429): NCBI GI: 85080096 Blast Desc: NCU01800 [Neurospora crassa OR74A] gi|18376111|emb|CAD21177.1| related to ribosomal protein S5 (mitochondrial) [Neurospora crassa] gi|28917544|gb|EAA27242.1|
  misc_feature (1)..(429): NCBI GI: 256734653 Blast Desc: [Nectria haematococca mpVI 77-13-4]
  misc_feature (1)..(426): NCBI GI: 154310847 Blast Desc: BC1G_06402 [Botryotinia fuckeliana B05.10] gi|150851201|gb|EDN26394.1| BC1G_06402 [Botryotinia fuckeliana B05.10]
  misc_feature (1)..(429): NCBI GI: 46107532 Blast Desc: FG00649.1 [Gibberella zeae PH-1]
  misc_feature (1)..(426): NCBI GI: 156034236 Blast Desc: SS1G_13421 [Sclerotinia sclerotiorum 1980] gi|154698824|gb|EDN98562.1| SS1G_13421 [Sclerotinia sclerotiorum 1980]
  misc_feature (104)..(429): NCBI GI: 261356709 Blast Desc: 37S ribosomal protein S5 [Verticillium albo-atrum VaMs.102]
  misc_feature (1)..(427): NCBI GI: 189189150 Blast Desc: 37S ribosomal protein S5 [Pyrenophora tritici-repentis Pt-1C-BFP] gi|187972520|gb|EDU40019.1| 37S ribosomal protein S5 [Pyrenophora tritici-repentis Pt-1C-BFP]
  misc_feature: Useful for introducing or modulating the production of volatile compounds
MSVARPARSLLSRGLNAPSCSAVKAAPAPRCHAPFHSSASLAKRKPRFKSIRAEELGLVTPEKIDEFAKEKFPNYTPEEMEVLKQKYTPAQMAALEAGEAAIDPKDLTIQGRIRLDSYRLPYLDDFSKHLPIVDKRQQSNPMPPHKLRFMSPEEHADDLTDYLKSQVPKGIDFKGMSEKEMEETILEKVDWELATEKYLTERSTFANFKGKSDTALAPELGEKLSGVAGMYRSAADEAERDDDELGVYTVTKRKTGMTLKDINTISVKILVRRFVTNQTRLGKIMSTWVLAIAGNGDGRLGVGEAKSTESQIAVQKAKLLAIQNMVPIRRYEDRTIFGNSESKFGSTIVKLEARPPGFGLRASHRFFEIFRIVGIKDIAAKMPRGRNPMNSAKACVDALMNQRDPNEIAIGRGKKMVDVRKVYYGGNPY

SEQ ID NO: 14042 - DNA, 2118 bp, Muscodor strobelii
  misc_feature: SGI EST ID NO. CUFF.33495.1
  misc_feature: Variant of the nucleotide sequence at SEQ ID NO 14040
aaaagatccatgtgccaattgcagtcgagattgaagctgcgaaagaccagtacgagcgcctgtcatcaattctcaccgttgcgtcactcatcacatagccaaacacacggctttcgacttcagccggcgatgcgatgagtgtagcacggccagcacgaagcctgctgtcgcgggggctcaacgcaccgagctgcagcgccgtcaaagccgccccagcaccgcgatgtcacgctccttttcacagctcggccagcctggccaagcggaagccgcggttcaagagcatacgggctgaggagctgggcttggtgacgcccgagaaaatcgacgagttcgccaaggagaaattccccaactacacacccgaggagatggaggtcttgaagcagaaatacacacccgcccagatggcagcattagaagcgggtgaagccgccatcgaccccaaagacctgacgatacagggccgcatacgcctcgactcctacagactcccttacctcgacgacttcagcaagcacctcccaatcgtcgacaagcgccagcaatccaaccccatgcctccccacaaactcaggttcatgagccccgaggagcacgccgacgacctcacagactacctcaagagccaggtgcccaagggcatcgacttcaagggcatgtcagagaaggaaatggaggagacgattctcgaaaaagtcgactgggaactagccaccgagaagtatctaacagagcgctcaacgttcgccaacttcaagggcaaatccgacacggcgctagcccccgagctaggcgagaaactcagcggtgtcgccggcatgtacagaagcgcagcggacgaagccgagcgcgacgatgacgaattgggtgtttacacggtcacgaagcggaagacgggcatgacgttgaaggacatcaacaccattagcgttaagattctcgtccgtcgtttcgtcaccaaccagacccgtctcgggaaaatcatgagtacctgggttctcgccatcgctggaaatggggatggacgtcttggtgttggcgaggcgaaatcgaccgagtctcaaattgctgttcagaaagcaaagctactcgctattcagaacatggtgcctatacgtcggtatgaagacaggactatcttcggcaacagtgagagtaaattcggttcgacgatcgtgaagctcgaagctcgtcctcccggattcggactccgcgcctcccaccgattcttcgagatcttccgtatcgtcggcatcaaagacatcgctgccaagatgccacgaggccgcaaccccatgaactccgccaaagcctgcgtcgacgccctgatgaaccagcgggatcccaacgagatcgccatcggccgcggaaagaagatggtcgatgtacggaaggtgtattatggtggtaacccctattagatgggatgtacagtgcgggaagactttgtatattatgaaagatataatacatgtacttatgtgtatatttatactacaacctgaaggcttcttttgtagaaaagcagcaagttcaagggagcgcactatatccatcgttgataaggcaccatcaagtgcatgtttagctggtgtgattccattgtcgttgtagagggatctctctccgtgtttttgggtatcataagtatccgtaccatgaattctttacgaattctcatttccttcctttcctagcttcctccccacgcccatgcagagcgcctgagtatagatacacatccagtataatgttgcgctctgctgctgtatgggcaccaaagcgcagcggcgatgaccttcaacgatgagccaggccatcatgcctctctcgtacatcctttttcaagagcctcgcatacttcgtcaccatatcacatctcaaccctcactcgatatgattcagcctctctatcacaaaccgaccgctcgccaagcgacatacatcctcactgatcctggttcccccaatcgatctcctgctgaagcacaatactgtacacactagccttcagaagcgtaaaaacgagactagtcttgcgctcgagctctctcagaccatcgagaatctctgttgtggggcggctggccatgtcgtctagtactgaggcgagct

SEQ ID NO: 14043 - DNA, 303 bp, Muscodor strobelii
  misc_feature: SGI cDNA ID NO. 564619
  misc_feature: Elevated expression when VOC is produced
  misc_feature: Encodes the peptide sequence at SEQ ID NO 14044
atgggtgtccgccctggcccccgacagtacctagcagctacaatgtcagcacgcgtgagccctccggtgacaggccaattcgctttcctacacaagatcggcgcgacgccagaagccgtcgcgaccttgaatgatcagccatacgtcttcttcgttctcgtcgccgccctcatcatcttgattgttcaaggcgtcttcctatggttcatccacttcgccacactgaaaccggagcagaagaagaagaaggaaaagaagacgcctgagaagaagcctggtggcaagcctcctgcccaacgatga

SEQ ID NO: 14044 - protein, 100 aa, Muscodor strobelii
  misc_feature: SGI Peptide ID NO. 564619
  misc_feature (25)..(80): NCBI GI: 85080101 Blast Desc: NCU01801 [Neurospora crassa OR74A] gi|18376110|emb|CAD21176.1| [Neurospora crassa] gi|28917545|gb|EAA27243.1| [Neurospora crassa OR74A]
  misc_feature (25)..(77): NCBI GI: 171689466 Blast Desc: protein product [Podospora anserina] gi|170944695|emb|CAP70806.1| protein product [Podospora anserina]
  misc_feature (25)..(80): NCBI GI: 46107534 Blast Desc: FG00650.1 [Gibberella zeae PH-1]
  misc_feature: Useful for introducing or modulating the production of volatile compounds
MGVRPGPRQYLAATMSARVSPPVTGQFAFLHKIGATPEAVATLNDQPYVFFVLVAALIILIVQGVFLWFIHFATLKPEQKKKKEKKTPEKKPGGKPPAQR

SEQ ID NO: 14045 - DNA, 1578 bp, Muscodor strobelii
  misc_feature: SGI cDNA ID NO. 564620
  misc_feature: Encodes the peptide sequence at SEQ ID NO 14046
atgactaatcatttcgagcttgacatgaaagcatttgttatagaaagcaaagcttcaaacttagtgctatcagtaacctcgaaggcctttatcgaaaacgtggaaatcgacaatgtgactatcgaagacgtcgttatcttgatcgagtcaaaaaagatatggcttcttcctcgcggctgtagccaactagacattatcgttcagctatccgagatgaacaaggaacatgaagccgaattcctcgatttccttgctgatgcggttcgccagtactcattatggacggcactcgggctcaccatcgagattttgcatattcagtattgtcaagagggcgacgagtcccccagtctgtgtttcagcgttgaacaacccgacatgtcttccgccttgctgtgtcctccacacatggacactgcttatttcaaaggtttgaagtgtgttctgcgattcaagccctcacaaggctgcagattcttccatcaacatggcgagcatgtaagctcagacactcttctctcgccaagccagctctttgcgcacaccgaagtttcatgcgaggaacacaacacgttcgactttaatgatatggaacagtgggagttcgccggccatctagtagaagcagctctgtgccatatgataggactcaggaaacgattcaaaggattgagagttcggaattccacaacattggacggcatgccttggctagaacttgcacctcatatctggaatgcccactatctcaagctggccaaatctcattcggataagttctcgaccatatctgaatgtctggcaaccacaagcagcactgaatcgcgaaacacaatatcaatatacatgctggcggaggagagcgttactcagctcgatgcacacgatccaagcactgacaagattgaacgctacgtcgaacggaatctgtgggacttgcttcaaaattcgctgagcccaagggtgggagtccaaagagtgatcaaagatgccgtgccagacgttcagcagtatgaccctaattctcagttacctttcaacgagattgaagatctctacgaagatgttaatagcgacataccgtatacgatgttatatgaggataatgagagcggagatctgttaccaatagaatccaactcaacatatgatcatcatagtagcaacatggacactttcctggattttgacctcggctctaactacgacgatatgcctgctgagaataatgatggcgttgggatatacggtgacgagcaagacgagcaagacgagcattacatgttcgagggaatacagacagacaccacagacgatgagcagctcgagatagataacccctacggaattcaggactcgaaggatttgatgtctaatcctatggtagatgaggatgtcaaagcagtactacaatcatgggctggcccgaataacattttggacggggaacttagtccttcacagctacaacttacattaggtttagacgaggatatagatgatatcgataacagactgtctcggacgtcgacgacattgacggacagagcttgtgacgaagaagaatatagtctgtaa

SEQ ID NO: 14046 - protein, 525 aa, Muscodor strobelii
  misc_feature: SGI Peptide ID NO. 564620
  misc_feature (206)..(337): NCBI GI: 85080106 Blast Desc: NCU01802 [Neurospora crassa OR74A] gi|18376109|emb|CAD21175.1| [Neurospora crassa] gi|28917546|gb|EAA27244.1| [Neurospora crassa OR74A]
MTNHFELDMKAFVIESKASNLVLSVTSKAFIENVEIDNVTIEDVVILIESKKIWLLPRGCSQLDIIVQLSEMNKEHEAEFLDFLADAVRQYSLWTALGLTIEILHIQYCQEGDESPSLCFSVEQPDMSSALLCPPHMDTAYFKGLKCVLRFKPSQGCRFFHQHGEHVSSDTLLSPSQLFAHTEVSCEEHNTFDFNDMEQWEFAGHLVEAALCHMIGLRKRFKGLRVRNSTTLDGMPWLELAPHIWNAHYLKLAKSHSDKFSTISECLATTSSTESRNTISIYMLAEESVTQLDAHDPSTDKIERYVERNLWDLLQNSLSPRVGVQRVIKDAVPDVQQYDPNSQLPFNEIEDLYEDVNSDIPYTMLYEDNESGDLLPIESNSTYDHHSSNMDTFLDFDLGSNYDDMPAENNDGVGIYGDEQDEQDEHYMFEGIQTDTTDDEQLEIDNPYGIQDSKDLMSNPMVDEDVKAVLQSWAGPNNILDGELSPSQLQLTLGLDEDIDDIDNRLSRTSTTLTDRACDEEEYSL

SEQ ID NO: 14047 - DNA, 876 bp, Muscodor strobelii
  misc_feature: SGI cDNA ID NO. 564621
  misc_feature: Encodes the peptide sequence at SEQ ID NO 14048
atgccttggctagaacttgcacctcatatctggaatgcccactatctcaagctggccaaatctcattcggataagttctcgaccatatctgaatgtctggcaaccacaagcagcactgaatcgcgaaacacaatatcaatatacatgctggcggaggagagcgttactcagctcgatgcacacgatccaagcactgacaagattgaacgctacgtcgaacggaatctgtgggacttgcttcaaaattcgctgagcccaagggtgggagtccaaagagtgatcaaagatgccgtgccagacgttcagcagtatgaccctaattctcagttacctttcaacgagattgaagatctctacgaagatgttaatagcgacataccgtatacgatgttatatgaggataatgagagcggagatctgttaccaatagaatccaactcaacatatgatcatcatagtagcaacatggacactttcctggattttgacctcggctctaactacgacgatatgcctgctgagaataatgatggcgttgggatatacggtgacgagcaagacgagcaagacgagcattacatgttcgagggaatacagacagacaccacagacgatgagcagctcgagatagataacccctacggaattcaggactcgaaggatttgatgtctaatcctatggtagatgaggatgtcaaagcagtactacaatcatgggctggcccgaataacattttggacggggaacttagtccttcacagctacaacttacattaggtttagacgaggatatagatgatatcgataacagactgtctcggacgtcgacgacattgacggacagagcttgtgacgaagaagaatatagtctgtaa

SEQ ID NO: 14048 - protein, 291 aa, Muscodor strobelii
  misc_feature: SGI Peptide ID NO. 564621
MPWLELAPHIWNAHYLKLAKSHSDKFSTISECLATTSSTESRNTISIYMLAEESVTQLDAHDPSTDKIERYVERNLWDLLQNSLSPRVGVQRVIKDAVPDVQQYDPNSQLPFNEIEDLYEDVNSDIPYTMLYEDNESGDLLPIESNSTYDHHSSNMDTFLDFDLGSNYDDMPAENNDGVGIYGDEQDEQDEHYMFEGIQTDTTDDEQLEIDNPYGIQDSKDLMSNPMVDEDVKAVLQSWAGPNNILDGELSPSQLQLTLGLDEDIDDIDNRLSRTSTTLTDRACDEEEYSL

SEQ ID NO: 14049 - DNA, 744 bp, Muscodor strobelii
  misc_feature: SGI cDNA ID NO. 564622
  misc_feature: Reduced expression when VOC is produced
  misc_feature: Encodes the peptide sequence at SEQ ID NO 14050
atgcgtcctagcaatgctacgaacttggctgcggccctccgctcgctgactatctcacatacatcacttgttcgaccctcgataatacctgccatcaccgctaccgctcgaaagaccccttccacccagaatgtacgcctcttctctgcttcggccccgatggccggcacctggctcgaaccttcgatagatcgcaagaagaagatgatgaagggccggcccagagtggcaactggaggctctaccaagggaactactgtcgtctggggtgactacggcttgcgcatgacggatcacggccggaggatcagcgcccaacagctcaaagtcgctgaagataccatcaaggccagattacgtggtcagaaataccgtttatataaaagggtctgctgcaacgtaggcgtctacgtcagcggtaacgagatgcgtatgggtaaaggaaaaggttctttcgatcactgggctgctcgcgtagccgtgaatcagattgcactagaactccgaggtgtcatccacgaacaagttgtacgcgatgcattccgtttagccggtaacaagcttccaggccagtgggagttcgtcaagaggggcgagcccccaattgtgggcatcacaaaactcgacggcatcacattagaagagctgaagagaccgaggcgaaaaattgatgctgaaactgtgaaacctgtccctccgcctccgggagcttctgaaagcaatcctcctctcgatcttccttga

SEQ ID NO: 14050 - protein, 247 aa, Muscodor strobelii
  misc_feature: SGI Peptide ID NO. 564622
  misc_feature (61)..(196): Pfam Id: PF00252 Pfam Desc: Ribosomal protein L16p/L10e
  misc_feature (67)..(196): Pfam Id: PF00252 Pfam Desc: Ribosomal protein L16p/L10e
  misc_feature (1)..(223): NCBI GI: 46105400 Blast Desc: FG00328.1 [Gibberella zeae PH-1]
  misc_feature (1)..(223): NCBI GI: 116205061 Blast Desc: CHGG_10414 [Chaetomium globosum CBS 148.51] gi|88176542|gb|EAQ84010.1| CHGG_10414 [Chaetomium globosum CBS 148.51]
  misc_feature (1)..(223): NCBI GI: 164424570 Blast Desc: 60S ribosomal protein L16, mitochondrial precursor [Neurospora crassa OR74A] gi|18376022|emb|CAB91756.2| related to ribosomal protein L16 precursor, mitochondrial [Neurospora 60S
  misc_feature (1)..(228): NCBI GI: 156065803 Blast Desc: SS1G_00912 [Sclerotinia sclerotiorum 1980] gi|154691771|gb|EDN91509.1| SS1G_00912 [Sclerotinia sclerotiorum 1980]
  misc_feature (6)..(243): NCBI GI: 145608324 Blast Desc: MGG_03203 [Magnaporthe grisea 70-15] gi|145015809|gb|EDK00299.1| MGG_03203 [Magnaporthe grisea 70-15]
  misc_feature (66)..(228): NCBI GI: 154301783 Blast Desc: BC1G_10043 [Botryotinia fuckeliana B05.10] gi|150855705|gb|EDN30897.1| BC1G_10043 [Botryotinia fuckeliana B05.10]
  misc_feature (44)..(235): NCBI GI: 119190367 Blast Desc: conserved [Coccidioides immitis RS] gi|240107210|gb|EER25395.1| 54S ribosomal protein L16, mitochondrial precursor, [Coccidioides posadasii C735 delta
  misc_feature (16)..(243): NCBI GI: 212537241 Blast Desc: mitochondrial large ribosomal subunit protein L16, [Penicillium marneffei ATCC 18224] gi|210068518|gb|EEA22609.1| mitochondrial large ribosomal subunit protein L16, [Penicillium
  misc_feature (42)..(243): NCBI GI: 242809841 Blast Desc: mitochondrial large ribosomal subunit protein L16, [Talaromyces stipitatus ATCC 10500] gi|218716082|gb|EED15504.1| mitochondrial large ribosomal subunit protein L16, [Talaromyces
  misc_feature (19)..(243): NCBI GI: 238841769 Blast Desc: 60S ribosomal protein L16 [Microsporum canis CBS 113480]
  misc_feature: Useful for introducing or modulating the production of volatile compounds
MRPSNATNLAAALRSLTISHTSLVRPSIIPAITATARKTPSTQNVRLFSASAPMAGTWLEPSIDRKKKMMKGRPRVATGGSTKGTTVVWGDYGLRMTDHGRRISAQQLKVAEDTIKARLRGQKYRLYKRVCCNVGVYVSGNEMRMGKGKGSFDHWAARVAVNQIALELRGVIHEQVVRDAFRLAGNKLPGQWEFVKRGEPPIVGITKLDGITLEELKRPRRKIDAETVKPVPPPPGASESNPPLDLP

SEQ ID NO: 14051 - DNA, 999 bp, Muscodor strobelii
  misc_feature: SGI EST ID NO. CUFF.33443.0
  misc_feature: Variant of the nucleotide sequence at SEQ ID NO 14049
gaaattccgaaagtttgaatgttgcgatattgtcgatgataacctgacgtccgcgagcttgactacgcccaattgctcgccaccatgcgtcctagcaatgctacgaacttggctgcggccctccgctcgctgactatctcacatacatcacttgttcgaccctcgataatacctgccatcaccgctaccgctcgaaagaccccttccacccagaatgtacgcctcttctctgcttcggccccgatggccggcacctggctcgaaccttcgatagatcgcaagaagaagatgatgaagggccggcccagagtggcaactggaggctctaccaagggaactactgtcgtctggggtgactacggcttgcgcatgacggatcacggccggaggatcagcgcccaacagctcaaagtcgctgaagataccatcaaggccagattacgtggtcagaaataccgtttatataaaagggtctgctgcaacgtaggcgtctacgtcagcggtaacgagatgcgtatgggtaaaggaaaaggttctttcgatcactgggctgctcgcgtagccgtgaatcagattgcactagaactccgaggtgtcatccacgaacaagttgtacgcgatgcattccgtttagccggtaacaagcttccaggccagtgggagttcgtcaagaggggcgagcccccaattgtgggcatcacaaaactcgacggcatcacattagaagagctgaagagaccgaggcgaaaaattgatgctgaaactgtgaaacctgtccctccgcctccgggagcttctgaaagcaatcctcctctcgatcttccttgaggatgtgcatcagcattctcgtgtatatataaggcaacatggtgcgcgtcgggttattatagataccaatgtataatactaccgtgcgaatgtacaacacaaacaacctacgttaactacaagatcttcgtgcctcgcctcttccccctttcctgtcctggaagccagagc

SEQ ID NO: 14052 - DNA, 3192 bp, Muscodor strobelii
  misc_feature: SGI cDNA ID NO. 564623
  misc_feature: Encodes the peptide sequence at SEQ ID NO 14053
atgcctgatatccgcaacttcttcggtgccaagggcggccctcctcccgcaaagcccgcagcctcaaagaagacggagccagaggcccccaagaagcgtggcgccaaggcaagaagagtcgtagacgatagtgatgatgacgagccggttgttgagacaaagaagctagctactcggtcaacaccgaggaaaaagacggccaacacagaaattcaaggcactgaaatcactgcgagcgaatatttctccgccaaacccaagatccaacaacccgcaaagccagacaccaaatctcctgcaaagcctaaagagacggcccgtgcaagtcccgcgagcaagaaggatagtgcaaaaagcgcagccccagccaagagcgcaactacgagacgatctgccaccaaggcaaaaaactataatctgcacgacgacgatgatgcattcatggacgatgatggagatgcaggtgacgacattttcgccgccgatgcaaaatcccgtaacaagcgaaagaacgatgactatgctgaagaggagagcgaagaagagttccttcccaagcctaagcgagttgcttctcgggccaagccagtggcagatgatgatgaggatgaagaagacgacgacgatgacgatgacgatttcgaggtgaaggtcacaactaagaagccagcctcgaaggcatccaagacttcagccgcaactaagaagcggaagacacctgaacctgactccgacgaagaagaggaggaagatgtgcccacttctcgtaaaaagcccgctgcaaagaagcctcgagccccgagagccaagaaggcgcaagagccagaggatgccggtatgcaagccatctttgatgacatccccacggtcagggcaccgagcccgcccgcaaaggacccgaatggccccaagtttgactggagaaaggctcagcagggaggtggcaactcaggacccccgcctaaccctatagcatcgagtgatctgcctgtcggcgagccagattgtcttgcgggtctgacttttgtcctgacggggcagttagccaagatcgcccgtgaagatgctcaggaacttgtcaaacgtcacggtggcaaaatcactggtgctccgagtagcaagaccagctatgtgattttgggggaagacgccggcccgagcaagttgaccaagatcaaacaacatggcatcaagactatcaatgaagacggcctattcgagctgatccgtcgacttccagccggcggtggaagcggaaagggcgcagagaaagttcggcaaaagcgcaaagaagaggaagaaaaaatcaagacgcaggctgccgagatggaacgcgaagagaagcagaagaagattgaacaagagaaggctcggaaagctgccgtggcgcgaggtgctgctacctcgagtcagccgacgcaacccctttcagcgcaactctggacagtcaagtatgcccccactcaaccgagccatatctgcggaaacaaagccgcagtggaaaaaatccagaagtggctcaagaactggtctcaagcaaagagatatgacttcaagaagcgtggagcggatggcatgggtggcgagcgtgctgtcattctttccggacctcctgggattggcaaaaccacggcggcgcatcttgcggctaaattggagggttacgatgtcatcgaaagcaatgccagtgacacacgaagcaaaaagctggtagaagctggtgtcagcgaagtcatgaacaatacgtctttaaacggcttctttgccgccgacggaaagaaggttgacaaggagaagaagaaaattgtcctaattatggatgaagtcgacggcatgtcagccggcgaccgtggcggcgtcggtgctcttgctaaattttgcaagaaaacagaagtgccgctcattctcatctgcaacgaacgtaggctgccgaagatgaagccatttgattttgtggctgctgatgtcaagttccaacgacctcaagtagatcagatcagatcgcgaatgatgacaatctgccatcgagaaggtctgaagctaccgacacaagttcttgatgccctcattgaaggtagcaaccgagatattcgacagatcgtcaacatgctgtcgacgatcaaactggaccaggaaacgatgagctttgataagggtaaagacatgtcgaaagcctgggaaaagtcgattgttttgaagccatgggacatcgtccagaagatgctaggaggtggacttttttctgcgaccagcaaagcaacattgaacgacaagattgagctctactttaatgatcacgagacgagctatttgatggtgcaagaaaactacatcagaacgagaccatccgcacttatctcgtatcgtgacaacaagcgcgaacacgacgtaaagcttctcgaattaatggaccaagccgcggaaagcatctcggatggcgacttggtagacaaaatgatccacggacctcagcaacactggagtctcatgcctactcatgctgtcttcagcacggttcgacctgcgagcttcgtctcgggtcaactgatggactccaagttcactggatggcttggaaaccatagcaaaagtggcaaattgggccgctatgtccgcgagatccactcccacatgcgacttcgagcatcgggtgatcataatgagatccgtcagcagtatctaccagtcttatggacacagctaatacagaaaatggccgacgaaggcaaagaatcagttgaagaagttattgaactgatggacagctactttttgacgcgagatgatttcgactacatcaaggagctgggtgtaggcccacaaaatgaagactctgtctcaattgagacacagacaaaggctacattcacaagactatataatacgatgtctcacccgattcctttcatgaaagcgagcactgttgcaggtgctaaggtagctgcgaaagagaagcccgatcttgaagaagctatcgatgatgaggatgccgctccagaacctgtggaggctgcagatgatgaagaggaccaaagtattgagaaggacaaatacatcaagaaacccaaagccaaggctgcgaagaagagcacgaagaagactgcaaaggctgatgaggaagatgaggaagacgagaaacccaaggcaaagggaagaaaggcaggaggagcaaaaggaaaggcaaagaaatga

SEQ ID NO: 14053 - protein, 1063 aa, Muscodor strobelii
  misc_feature: SGI Peptide ID NO. 564623
  misc_feature (332)..(409): Pfam Id: PF00533 Pfam Desc: BRCA1 C Terminus (BRCT) domain
  misc_feature (531)..(710): Pfam Id: PF00004 Pfam Desc: ATPase family associated with various cellular activities (AAA)
  misc_feature (810)..(962): Pfam Id: PF08519 Pfam Desc: Replication factor RFC1 C terminal domain
  misc_feature (1)..(1031): NCBI GI: 116205063 Blast Desc: CHGG_10415 [Chaetomium globosum CBS 148.51] gi|88176543|gb|EAQ84011.1| CHGG_10415 [Chaetomium globosum CBS 148.51]
  misc_feature (1)..(1022): NCBI GI: 164424568 Blast Desc: NCU06767 [Neurospora crassa OR74A] gi|157070569|gb|EAA34303.2| NCU06767 [Neurospora crassa OR74A]
  misc_feature (1)..(1022): NCBI GI: 18376023 Blast Desc: related to replication factor C protein [Neurospora crassa]
  misc_feature (70)..(1063): NCBI GI: 256734613 Blast Desc: NECHADRAFT_30719 [Nectria haematococca mpVI 77-13-4]
  misc_feature (1)..(997): NCBI GI: 46105398 Blast Desc: FG00327.1 [Gibberella zeae PH-1]
  misc_feature (1)..(986): NCBI GI: 39942248 Blast Desc: MGG_03204 [Magnaporthe grisea 70-15] gi|145015808|gb|EDK00298.1| MGG_03204 [Magnaporthe grisea 70-15]
  misc_feature (1)..(1041): NCBI GI: 154301785 Blast Desc: BC1G_10044 [Botryotinia fuckeliana B05.10] gi|150855706|gb|EDN30898.1| BC1G_10044 [Botryotinia fuckeliana B05.10]
  misc_feature (1)..(1021): NCBI GI: 156065801 Blast Desc: SS1G_00911 [Sclerotinia sclerotiorum 1980] gi|154691770|gb|EDN91508.1| SS1G_00911 [Sclerotinia sclerotiorum 1980]
  misc_feature (65)..(960): NCBI GI: 171689552 Blast Desc: protein product [Podospora anserina] gi|170944738|emb|CAP70849.1| protein product [Podospora anserina]
  misc_feature (1)..(1022): NCBI GI: 145232225 Blast Desc: An02g04290 [Aspergillus niger] gi|134056478|emb|CAK37567.1| protein product [Aspergillus niger]
MPDIRNFFGAKGGPPPAKPAASKKTEPEAPKKRGAKARRVVDDSDDDEPVVETKKLATRSTPRKKTANTEIQGTEITASEYFSAKPKIQQPAKPDTKSPAKPKETARASPASKKDSAKSAAPAKSATTRRSATKAKNYNLHDDDDAFMDDDGDAGDDIFAADAKSRNKRKNDDYAEEESEEEFLPKPKRVASRAKPVADDDEDEEDDDDDDDDFEVKVTTKKPASKASKTSAATKKRKTPEPDSDEEEEEDVPTSRKKPAAKKPRAPRAKKAQEPEDAGMQAIFDDIPTVRAPSPPAKDPNGPKFDWRKAQQGGGNSGPPPNPIASSDLPVGEPDCLAGLTFVLTGQLAKIAREDAQELVKRHGGKITGAPSSKTSYVILGEDAGPSKLTKIKQHGIKTINEDGLFELIRRLPAGGGSGKGAEKVRQKRKEEEEKIKTQAAEMEREEKQKKIEQEKARKAAVARGAATSSQPTQPLSAQLWTVKYAPTQPSHICGNKAAVEKIQKWLKNWSQAKRYDFKKRGADGMGGERAVILSGPPGIGKTTAAHLAAKLEGYDVIESNASDTRSKKLVEAGVSEVMNNTSLNGFFAADGKKVDKEKKKIVLIMDEVDGMSAGDRGGVGALAKFCKKTEVPLILICNERRLPKMKPFDFVAADVKFQRPQVDQIRSRMMTICHREGLKLPTQVLDALIEGSNRDIRQIVNMLSTIKLDQETMSFDKGKDMSKAWEKSIVLKPWDIVQKMLGGGLFSATSKATLNDKIELYFNDHETSYLMVQENYIRTRPSALISYRDNKREHDVKLLELMDQAAESISDGDLVDKMIHGPQQHWSLMPTHAVFSTVRPASFVSGQLMDSKFTGWLGNHSKSGKLGRYVREIHSHMRLRASGDHNEIRQQYLPVLWTQLIQKMADEGKESVEEVIELMDSYFLTRDDFDYIKELGVGPQNEDSVSIETQTKATFTRLYNTMSHPIPFMKASTVAGAKVAAKEKPDLEEAIDDEDAAPEPVEAADDEEDQSIEKDKYIKKPKAKAAKKSTKKTAKADEEDEEDEKPKAKGRKAGGAKGKAKK

SEQ ID NO: 14054 - DNA, 3653 bp, Muscodor strobelii
  misc_feature: SGI EST ID NO. CUFF.33445.0
  misc_feature: Variant of the nucleotide sequence at SEQ ID NO 14052
agacgtcttaggcagtttcacagcacgtacggatcaatccggactgcgtctgttgcctgggctagcctcacaacactgacgttgttgctcaaacttctgcactcgcgtcgtctttaagcccacgctattatcctgtctgtcctgtctcagacgctgatagtcgtcaacgttgcgtgaatgtcaccggcgccgagtgttcctcagaatgcctgatatccgcaacttcttcggtgccaagggcggccctcctcccgcaaagcccgcagcctcaaagaagacggagccagaggcccccaagaagcgtggcgccaaggcaagaagagtcgtagacgatagtgatgatgacgagccggttgttgagacaaagaagctagctactcggtcaacaccgaggaaaaagacggccaacacagaaattcaaggcactgaaatcactgcgagcgaatatttctccgccaaacccaagatccaacaacccgcaaagccagacaccaaatctcctgcaaagcctaaagagacggcccgtgcaagtcccgcgagcaagaaggatagtgcaaaaagcgcagccccagccaagagcgcaactacgagacgatctgccaccaaggcaaaaaactataatctgcacgacgacgatgatgcattcatggacgatgatggagatgcaggtgacgacattttcgccgccgatgcaaaatcccgtaacaagcgaaagaacgatgactatgctgaagaggagagcgaagaagagttccttcccaagcctaagcgagttgcttctcgggccaagccagtggcagatgatgatgaggatgaagaagacgacgacgatgacgatgacgatttcgaggtgaaggtcacaactaagaagccagcctcgaaggcatccaagacttcagccgcaactaagaagcggaagacacctgaacctgactccgacgaagaagaggaggaagatgtgcccacttctcgtaaaaagcccgctgcaaagaagcctcgagccccgagagccaagaaggcgcaagagccagaggatgccggtatgcaagccatctttgatgacatccccacggtcagggcaccgagcccgcccgcaaaggacccgaatggccccaagtttgactggagaaaggctcagcagggaggtggcaactcaggacccccgcctaaccctatagcatcgagtgatctgcctgtcggcgagccagattgtcttgcgggtctgacttttgtcctgacggggcagttagccaagatcgcccgtgaagatgctcaggaacttgtcaaacgtcacggtggcaaaatcactggtgctccgagtagcaagaccagctatgtgattttgggggaagacgccggcccgagcaagttgaccaagatcaaacaacatggcatcaagactatcaatgaagacggcctattcgagctgatccgtcgacttccagccggcggtggaagcggaaagggcgcagagaaagttcggcaaaagcgcaaagaagaggaagaaaaaatcaagacgcaggctgccgagatggaacgcgaagagaagcagaagaagattgaacaagagaaggctcggaaagctgccgtggcgcgaggtgctgctacctcgagtcagccgacgcaacccctttcagcgcaactctggacagtcaagtatgcccccactcaaccgagccatatctgcggaaacaaagccgcagtggaaaaaatccagaagtggctcaagaactggtctcaagcaaagagatatgacttcaagaagcgtggagcggatggcatgggtggcgagcgtgctgtcattctttccggacctcctgggattggcaaaaccacggcggcgcatcttgcggctaaattggagggttacgatgtcatcgaaagcaatgccagtgacacacgaagcaaaaagctggtagaagctggtgtcagcgaagtcatgaacaatacgtctttaaacggcttctttgccgccgacggaaagaaggttgacaaggagaagaagaaaattgtcctaattatggatgaagtcgacggcatgtcagccggcgaccgtggcggcgtcggtgctcttgctaaattttgcaagaaaacagaagtgccgctcattctcatctgcaacgaacgtaggctgccgaagatgaagccatttgattttgtggctgctgatgtcaagttccaacgacctcaagtagatcagatcagatcgcgaatgatgacaatctgccatcgagaaggtctgaagctaccgacacaagttcttgatgccctcattgaaggtagcaaccgagatattcgacagatcgtcaacatgctgtcgacgatcaaactggaccaggaaacgatgagctttgataagggtaaagacatgtcgaaagcctgggaaaagtcgattgttttgaagccatgggacatcgtccagaagatgctaggaggtggacttttttctgcgaccagcaaagcaacattgaacgacaagattgagctctactttaatgatcacgagacgagctatttgatggtgcaagaaaactacatcagaacgagaccatccgcacttatctcgtatcgtgacaacaagcgcgaacacgacgtaaagcttctcgaattaatggaccaagccgcggaaagcatctcggatggcgacttggtagacaaaatgatccacggacctcagcaacactggagtctcatgcctactcatgctgtcttcagcacggttcgacctgcgagcttcgtctcgggtcaactgatggactccaagttcactggatggcttggaaaccatagcaaaagtggcaaattgggccgctatgtccgcgagatccactcccacatgcgacttcgagcatcgggtgatcataatgagatccgtcagcagtatctaccagtcttatggacacagctaatacagaaaatggccgacgaaggcaaagaatcagttgaagaagttattgaactgatggacagctactttttgacgcgagatgatttcgactacatcaaggagctgggtgtaggcccacaaaatgaagactctgtctcaattgagacacagacaaaggctacattcacaagactatataatacgatgtctcacccgattcctttcatgaaagcgagcactgttgcaggtgctaaggtagctgcgaaagagaagcccgatcttgaagaagctatcgatgatgaggatgccgctccagaacctgtggaggctgcagatgatgaagaggaccaaagtattgagaaggacaaatacatcaagaaacccaaagccaaggctgcgaagaagagcacgaagaagactgcaaaggctgatgaggaagatgaggaagacgagaaacccaaggcaaagggaagaaaggcaggaggagcaaaaggaaaggcaaagaaatgatgttctccagaccacactgcccaagctaaaatgtggtccctcgagtcacgtgttttatgggacagtttgagttttggggccatcctgtgatccacattcttattaccccttgctttacggtgctaccctgaagacacaatctataccttgccagccatatacaatatatgagagcttcgaccaagatcttagccatgcccgaaacgataagtcaccttgttataacatgaacagatggacacattgtccatgtcag

SEQ ID NO: 14055 - DNA, 3720 bp, Muscodor strobelii
  misc_feature: SGI cDNA ID NO. 564624
  misc_feature: Encodes the peptide sequence at SEQ ID NO 14056
atgtcggacgacaacccggagaccctgaggcccgtggcttacaacaacccggctctgcctcgccgtcccgagaacgatgacttccccaccaactctcccgcagaggcaaggcctcgtcaccgtcgaacgcgagcgatcacatgccgtaccgacttgatcggaggcccgtcgcgtagccctatccagaagatgaccaaagggccagattgggagtatgcagttgagttcgaggaggaaactcccgctgtgcccagaatcccagagaagtattcgcctgagaagagtatcgcacccaatgaggatgccacctccaagaaacttgcttcgcctgacgggtattttttctcacccggaaagtatcattcttcacccgagaaatacacttcttctcctaaagagcctacttcacttgagacgtacacttcctcattcaagacaaatgcttcgcctggtaagcatttttcgtctaaatcatttgcttcgcgcaagcaagctcttgagcagagcacgtatgcttctcctgagaagcccaagaatgacacgttcgttatccccgatgagtatccgcctactcttcagaatttccgtttcccgcctatgactgccacgaaagatgctgtgagccataccgaggaactcccgtctaccccagagcggcgtcttgcgttgattgagcctcggacggtggtcactcagatgcgcatcaatgaacgtccttctgctcgtgatgagcggactgtatcctatgattctggctctcctgtcgcaaagcttcgtcctggtacttcagatagaagtaaagcacgcttgagtaacgactcttcagccaacacatttgcgcagcatgtgcaagatgatgataaaggctgtaaggacggcaatgttccccgtgatcagcatgcttgttaccaaggccaccaactctctccggtccttgaaggttcctcccctttaagcattgcctgtcctatcccagttcgacagcatggtcttcttgcggacaatggccgtgataacacaatgctttcagcggcgggtggttacttcgacgaagaagatggtgatgaagagaactataaggttttgtcaccggtcatgtcaggatttcctggtggtcatatccacggtactgacaaaggaaaggggaaggagagagaggcgaaccttccttccaagtccgagattgagcgcgttgtacgcgatttatatccgtacaagaaacattcactaatgagcgcgaaattgcgtcccggcccggaaagacgcgtccatatcaacgtgtcacctacttatgacagccattctgctttgactggagagtacacaacccagagtcagtacaactctccacttaaccctggaaagacatttcgtgttgtctaccctgacaacaacctgccccgcggtgaagctctgccgttcggtacaaacacaccacgcgcccagcgcatttctaacaccagcttcccaactccagagtacttgaagcagtatcgccagaacaatcctaacgtgagaaaacacttgcctagtcttatagagaagtataagaccaccatgcaggactcagatgtcttctctcaggagccggaggcgacgaaccagcttcctgcacctgacctaaacacctctaccgctcagcatctctcctgcggtcaacattcctctggtctgcacttctcccccagtcagcaactccatcctggcgctcctgcccagcacgtgccgggatgcacctgcggcagttcaaaagacactatggtgctttcaaactcgcaacttaaggccatcaacgcgatgcgcggtaaccagccaccggtctttgatgaccctctctttgcctctgtgagagagcaagaaggcagcaaggtagtggactgggagaaatgggcaaagttttgccatgagattgacgagtcagttgatgacgagggctggcagaagaagcccaagtccgattcgccacgtgaatcttccgtcgagattcccaagcccaagttccctcacatcatgcctcccccgggcatggatctcaccgatcacgaggctgctctacaagctgcggcttctcatacattcccagaggactctgatgacgatgaggccgatgctggtagtggccgaatctcgccatgcactttccttcgcctagctcagggctgtaaacgttgggatgagagagagcagaaggccaaagccgagaggacccccgtccaaaagagaatgcgccctgatgcgtctgctcctcaggcttcgggttccgacacacctactcgtccgtccaagacgaagttcacccgtcaattcgatgcacatgacggcggtgaaatatctcctaactacaatgtcacgcctgatccgtcgcttcgctttactcctcctggagtggatcacacgcagtggcagaaccctacattccaggagcaatatagacgcatggcccctggcgttgttcgacaggtcgagcaggacatgtacggaagcaccacgcgtgtcacggcatccgacccgggatatgacacgttctcgaaggaagagatcgagagcgctaccgctttcctacctgaagtaggcatgacaggagagcaagcgaagacgaccctaaaagagaactgggatttcgtaacccagatgaaggatgctgaaaaggccatttacgatcacaatgagacgcagaagaagtatctcaaaagcctcgaggcggatctcgcataccttaccaagtgcatgccagccttgcagctgaagcgagatgaggtcgacactgctgaacgtcagcgtcaagagcaccgtcgcgaacgcattcgtcaccaggtcgtcaattccttggatgaggtccgtcaagtcgcagacgaagccatggcgaaacacgagtatgagcgtgatgagctccgccatactgttgatgagatctctcgcattgaggctcgcattaaggaactttgcgatgaagtaggaatccgtgacttggatcatggattggctgtcttgcagggccatgaagagcccatctgcgagacttcacctcagcgaggacgttcgcagcaggagtcttctctgcgtccggctctgtctcgccatcagtcatctcctcatgcgcagcctcaagaggttgttgccgctcgcgaacccaccgcccccgaggcacagtctgctctgcccgtccccggtgctcagcagaacgtcatccgcccgcctcgatactcttctcttttcgcaccagtaggtgctgatgttccgggtccccctatgcctacccaaatccccgatgacttccatcccggaactccccgaggcacttcaatgaacggccctgtcattgcccccggtcgtgctccgcatggtctacctgctggcgttcagcctttcgccccgtccaatgtcgctcatgtcactccacttgtcggtgcaagctggatggaggtatgcaccaacggaggtatccctatcggcggagtctacggcaccggtatgcccaacgacggtccctactacatccctcctggatacggcctctccttcattggagaccagttccgcgtctcatccgatagccaagctgtctatcggtatggcatcctccgaagctacgacagtgctcgcgagaatggcgtggccaacgccacctctggtcccgccgctgtcgatgtcggcgacagcggtgaggatggcgacaacgacgacagtttcgccgacaccgagggcaccgatactttctaa

SEQ ID NO: 14056 - protein, 1239 aa, Muscodor strobelii
  misc_feature: SGI Peptide ID NO. 564624
  misc_feature (697)..(827): NCBI GI: 85110756 Blast Desc: NCU06775 [Neurospora crassa OR74A] gi|28925302|gb|EAA34380.1| [Neurospora crassa OR74A]
  misc_feature (697)..(827): NCBI GI: 18376016 Blast Desc: [Neurospora crassa]
  misc_feature (687)..(906): NCBI GI: 145608304 Blast Desc: [Magnaporthe grisea 70-15] gi|145015795|gb|EDK00285.1| [Magnaporthe grisea 70-15]
MSDDNPETLRPVAYNNPALPRRPENDDFPTNSPAEARPRHRRTRAITCRTDLIGGPSRSPIQKMTKGPDWEYAVEFEEETPAVPRIPEKYSPEKSIAPNEDATSKKLASPDGYFFSPGKYHSSPEKYTSSPKEPTSLETYTSSFKTNASPGKHFSSKSFASRKQALEQSTYASPEKPKNDTFVIPDEYPPTLQNFRFPPMTATKDAVSHTEELPSTPERRLALIEPRTVVTQMRINERPSARDERTVSYDSGSPVAKLRPGTSDRSKARLSNDSSANTFAQHVQDDDKGCKDGNVPRDQHACYQGHQLSPVLEGSSPLSIACPIPVRQHGLLADNGRDNTMLSAAGGYFDEEDGDEENYKVLSPVMSGFPGGHIHGTDKGKGKEREANLPSKSEIERVVRDLYPYKKHSLMSAKLRPGPERRVHINVSPTYDSHSALTGEYTTQSQYNSPLNPGKTFRVVYPDNNLPRGEALPFGTNTPRAQRISNTSFPTPEYLKQYRQNNPNVRKHLPSLIEKYKTTMQDSDVFSQEPEATNQLPAPDLNTSTAQHLSCGQHSSGLHFSPSQQLHPGAPAQHVPGCTCGSSKDTMVLSNSQLKAINAMRGNQPPVFDDPLFASVREQEGSKVVDWEKWAKFCHEIDESVDDEGWQKKPKSDSPRESSVEIPKPKFPHIMPPPGMDLTDHEAALQAAASHTFPEDSDDDEADAGSGRISPCTFLRLAQGCKRWDEREQKAKAERTPVQKRMRPDASAPQASGSDTPTRPSKTKFTRQFDAHDGGEISPNYNVTPDPSLRFTPPGVDHTQWQNPTFQEQYRRMAPGVVRQVEQDMYGSTTRVTASDPGYDTFSKEEIESATAFLPEVGMTGEQAKTTLKENWDFVTQMKDAEKAIYDHNETQKKYLKSLEADLAYLTKCMPALQLKRDEVDTAERQRQEHRRERIRHQVVNSLDEVRQVADEAMAKHEYERDELRHTVDEISRIEARIKELCDEVGIRDLDHGLAVLQGHEEPICETSPQRGRSQQESSLRPALSRHQSSPHAQPQEVVAAREPTAPEAQSALPVPGAQQNVIRPPRYSSLFAPVGADVPGPPMPTQIPDDFHPGTPRGTSMNGPVIAPGRAPHGLPAGVQPFAPSNVAHVTPLVGASWMEVCTNGGIPIGGVYGTGMPNDGPYYIPPGYGLSFIGDQFRVSSDSQAVYRYGILRSYDSARENGVANATSGPAAVDVGDSGEDGDNDDSFADTEGTDTF

SEQ ID NO: 14057 - DNA, 1050 bp, Muscodor strobelii
  misc_feature: SGI cDNA ID NO. 564625
  misc_feature: Encodes the peptide sequence at SEQ ID NO 14058
atggcattgactgtagctcacggctcggagattcctcccgacgtcaacaggggctatatcatcgacattgtgtcatgggtcggcgccggtatctcgacattttgcgtcctgttgcgcatatacagccgggtattcgtaataaaacgtcctggttgggatgactggatgatcgtgttctctgcgcttctaaacgtagctagtagagcgatcctttccgttacgattgcctatggcttgggtcgacacatctactatctgaccagtaatgacatttacatggtggcctattatatcccgctatacggggctgttggattcccctcttatatcttccaaaagttggcgatcgtcatttttcttgacagactgacaggtgcaacaaaggcaagacgcgggatctggtttctgtatggcatcgccaccgtgtttgctatctttactgtcgtctcaatcttcgttctattcctagagtgtagtcctccaggtgtggcgaagcagccgttcgaacctgaacattgcattccaaggtatttcttctatgttttcaacattccaggaagtgcaatcggagcctttgtggatttgatgctagcccttttcccggcgattttactctggaatttgaaaatgaagaaatcgcgcaaggttatcctgatgttgatcatgggtcttggtgtctttgccttgatcgttgccgtcataaaagttatccaatacccgagctacaactcacctgacgtgacttacgacgttttcttgataccacttctctccaatgtcgaggcagaccttcttctcattgctgcaagtgtgccagcgtatccaaggctctggaagcggattttcggaagacccttagaccgctctgcgacaacggggcgcctcaacatcacaccatcttggtatggatatagacgacatgatgaatcgaacgaaactaacagcacgaaccaactacggactttggatcctgctgatcgtatgaacactgttcaggacaacgcatcccttcgcaaatatgagaggaagggcagccatattaccgaatga

SEQ ID NO: 14058 - protein, 349 aa, Muscodor strobelii
  misc_feature: SGI Peptide ID NO. 564625
  misc_feature (14)..(337): NCBI GI: 119175352 Blast Desc: CIMG_09540 [Coccidioides immitis RS]
  misc_feature (14)..(337): NCBI GI: 240107097 Blast Desc: CPC735_018880 [Coccidioides posadasii C735 delta SOWgp]
  misc_feature (8)..(284): NCBI GI: 238842889 Blast Desc: integral membrane protein [Microsporum canis CBS 113480]
  misc_feature (1)..(342): NCBI GI: 242783189 Blast Desc: conserved [Talaromyces stipitatus ATCC 10500] gi|218720293|gb|EED19712.1| conserved [Talaromyces stipitatus ATCC 10500]
  misc_feature (16)..(349): NCBI GI: 255943321 Blast Desc: Pc18g06020 [Penicillium chrysogenum Wisconsin 54-1255] gi|211587162|emb|CAP94826.1| Pc18g06020 [Penicillium chrysogenum Wisconsin 54-1255]
  misc_feature (16)..(334): NCBI GI: 46135673 Blast Desc: FG09352.1 [Gibberella zeae PH-1]
  misc_feature (12)..(290): NCBI GI: 226287054 Blast Desc: integral membrane protein [Paracoccidioides brasiliensis Pb18]
  misc_feature (1)..(341): NCBI GI: 116203241 Blast Desc: CHGG_09505 [Chaetomium globosum CBS 148.51] gi|88178023|gb|EAQ85491.1| CHGG_09505 [Chaetomium globosum CBS 148.51]
  misc_feature (26)..(284): NCBI GI: 212527270 Blast Desc: conserved [Penicillium marneffei ATCC 18224] gi|210073190|gb|EEA27277.1| conserved [Penicillium marneffei ATCC 18224]
  misc_feature (16)..(342): NCBI GI: 256724898 Blast Desc: NECHADRAFT_34461 [Nectria haematococca mpVI 77-13-4]
MALTVAHGSEIPPDVNRGYIIDIVSWVGAGISTFCVLLRIYSRVFVIKRPGWDDWMIVFSALLNVASRAILSVTIAYGLGRHIYYLTSNDIYMVAYYIPLYGAVGFPSYIFQKLAIVIFLDRLTGATKARRGIWFLYGIATVFAIFTVVSIFVLFLECSPPGVAKQPFEPEHCIPRYFFYVFNIPGSAIGAFVDLMLALFPAILLWNLKMKKSRKVILMLIMGLGVFALIVAVIKVIQYPSYNSPDVTYDVFLIPLLSNVEADLLLIAASVPAYPRLWKRIFGRPLDRSATTGRLNITPSWYGYRRHDESNETNSTNQLRTLDPADRMNTVQDNASLRKYERKGSHITE

SEQ ID NO: 14059 - DNA, 1561 bp, Muscodor strobelii
  misc_feature: SGI EST ID NO. CUFF.33466.0
  misc_feature: Variant of the nucleotide sequence at SEQ ID NO 14057
aatcactgggcattggtcccaaatatacacacaagactgcaaccagatgcactcaccatagttacaatggccaattgccccgtagtgcttccggcagaagcgaatcctccatactttcgctaaattcctactctttcatgttgcgctttcttatatgtgtctcctgatgtgccacctaatgtgctagaattgcgccgcactaaatcatgtcttccgtctcccattcctccactcaaattctgtcgagtctggtcccttcaatacccaacatataattccggcgactaatcgagcttggctgtgttttgtgaactactcgacctccgagacggagcatggcattgactgtagctcacggctcggagattcctcccgacgtcaacaggggctatatcatcgacattgtgtcatgggtcggcgccggtatctcgacattttgcgtcctgttgcgcatatacagccgggtattcgtaataaaacgtcctggttgggatgactggatgatcgtgttctctgcgcttctaaacgtagctagtagagcgatcctttccgttacgattgcctatggcttgggtcgacacatctactatctgaccagtaatgacatttacatggtggcctattatatcccgctatacggggctgttggattcccctcttatatcttccaaaagttggcgatcgtcatttttcttgacagactgacaggtgcaacaaaggcaagacgcgggatctggtttctgtatggcatcgccaccgtgtttgctatctttactgtcgtctcaatcttcgttctattcctagagtgtagtcctccaggtgtggcgaagcagccgttcgaacctgaacattgcattccaaggtatttcttctatgttttcaacattccaggaagtgcaatcggagcctttgtggatttgatgctagcccttttcccggcgattttactctggaatttgaaaatgaagaaatcgcgcaaggttatcctgatgttgatcatgggtcttggtgtctttgccttgatcgttgccgtcataaaagttatccaatacccgagctacaactcacctgacgtgacttacgacgttttcttgataccacttctctccaatgtcgaggcagaccttcttctcattgctgcaagtgtgccagcgtatccaaggctctggaagcggattttcggaagacccttagaccgctctgcgacaacggggcgcctcaacatcacaccatcttggtatggatatagacgacatgatgaatcgaacgaaactaacagcacgaaccaactacggactttggatcctgctgatcgtatgaacactgttcaggacaacgcatcccttcgcaaatatgagaggaagggcagccatattaccgaatgacttatcacggtctggtggatcgcatatctagaactattatcttatatgaaagtcaataaacatttgatagcataatcccacgctacgtcgatgtattgataacgaggcgaacacggtctggaatattggtactcatgatctgcaatccgattagctgacaagccaaggaaggaaag

SEQ ID NO: 14060 - DNA, 600 bp, Muscodor strobelii
  misc_feature: SGI cDNA ID NO. 564626
  misc_feature: Encodes the peptide sequence at SEQ ID NO 14061
atgtcgcaagtcactcccgaagttctctgggcccagcgctcctccagctctgaccccgagaagaacttcatctacctgaccatctctgtccccgatgtccccaaggagaacctgaagctggacctccagcctactggcctgactttccagggccactctgagacccttaagcgaacgtatcatctcgagctcagcttcttcgacgagatcgatactgctgagagcaagatccaccacaccgctcgcaatgtcgagatgaagctgcgcaagaaggagctcaaggaggagtactggcctcgtctcctcaaggacgctaagaaggttcagttcctcaagaccgacttcgacaagtgggtcgacgaggacgagcagaacgaggctcccgaggaggatttctcccagttcggtggcatgggtggcatgcccggcatgggtggtatgggtggcggtgacttcggaggaattgacttctccaaactcggcggtggtgctcccggcgcccctggctcagacgacgaggaagatgaggaggatgatgatgacgacatgcccgcgctcgagggcgaggaggatgacaaggccgccaagaagccagagtaa

SEQ ID NO: 14061 - protein, 199 aa, Muscodor strobelii
  misc_feature: SGI Peptide ID NO. 564626
  misc_feature (6)..(90): Pfam Id: PF04969 Pfam Desc: CS domain
  misc_feature (3)..(160): NCBI GI: 39977569 Blast Desc: MGG_06669 [Magnaporthe grisea 70-15] gi|145013816|gb|EDJ98457.1| MGG_06669 [Magnaporthe grisea 70-15]
  misc_feature (2)..(194): NCBI GI: 164428197 Blast Desc: NCU01792 [Neurospora crassa OR74A] gi|18376119|emb|CAD21185.1| related to Hsp90 associated co-chaperone [Neurospora crassa] gi|157072051|gb|EAA27234.2|
  misc_feature (4)..(138): NCBI GI: 256728924 Blast Desc: NECHADRAFT_93330 [Nectria haematococca mpVI 77-13-4]
  misc_feature (4)..(188): NCBI GI: 46138633 Blast Desc: FG10831.1 [Gibberella zeae PH-1]
  misc_feature (2)..(164): NCBI GI: 171689472 Blast Desc: protein product [Podospora anserina] gi|170944698|emb|CAP70809.1| protein product [Podospora anserina]
  misc_feature (2)..(187): NCBI GI: 119176084 Blast Desc: CIMG_09789 [Coccidioides immitis RS]
  misc_feature (2)..(187): NCBI GI: 240108787 Blast Desc: protein wos2, [Coccidioides posadasii C735 delta SOWgp]
  misc_feature (5)..(199): NCBI GI: 258572852 Blast Desc: conserved [Uncinocarpus reesii 1704] gi|237905458|gb|EEP79859.1| conserved [Uncinocarpus reesii 1704]
  misc_feature (2)..(135): NCBI GI: 261356701 Blast Desc: wos2 [Verticillium albo-atrum VaMs.102]
  misc_feature (1)..(189): NCBI GI: 70997019 Blast Desc: Hsp90 binding co-chaperone (Sba1) [Aspergillus fumigatus Af293] gi|66850900|gb|EAL91226.1| Hsp90 binding co-chaperone (Sba1), [Aspergillus fumigatus Af293] Hsp90 binding
MSQVTPEVLWAQRSSSSDPEKNFIYLTISVPDVPKENLKLDLQPTGLTFQGHSETLKRTYHLELSFFDEIDTAESKIHHTARNVEMKLRKKELKEEYWPRLLKDAKKVQFLKTDFDKWVDEDEQNEAPEEDFSQFGGMGGMPGMGGMGGGDFGGIDFSKLGGGAPGAPGSDDEEDEEDDDDDMPALEGEEDDKAAKKPE

SEQ ID NO: 14062 - DNA, 1090 bp, Muscodor strobelii
  misc_feature: SGI EST ID NO. CUFF.33558.0
  misc_feature: Variant of the nucleotide sequence at SEQ ID NO 14060
gtctgcctatacgtaccttgcgtagctaccagcaacccactctcttggaagagagccgccctcctaacgctatcatacagacagcagtgcttcctgaaagcaactatcttttctcaacctccaagtagttccacacaaaatctcagctcgacatgtcgcaagtcactcccgaagttctctgggcccagcgctcctccagctctgaccccgagaagaacttcatctacctgaccatctctgtccccgatgtccccaaggagaacctgaagctggacctccagcctactggcctgactttccagggccactctgagacccttaagcgaacgtatcatctcgagctcagcttcttcgacgagatcgatactgctgagagcaagatccaccacaccgctcgcaatgtcgagatgaagctgcgcaagaaggagctcaaggaggagtactggcctcgtctcctcaaggacgctaagaaggttcagttcctcaagaccgacttcgacaagtgggtcgacgaggacgagcagaacgaggctcccgaggaggatttctcccagttcggtggcatgggtggcatgcccggcatgggtggtatgggtggcggtgacttcggaggaattgacttctccaaactcggcggtggtgctcccggcgcccctggctcagacgacgaggaagatgaggaggatgatgatgacgacatgcccgcgctcgagggcgaggaggatgacaaggccgccaagaagccagagtaaaagctgccataagatgcttctgagcattccaacacatccgcggtcatgtcccggaggatgttattcgtggtcaaggtcccatcatcggcgcatagagcagaactggcaaaacggcaacgcggtgtttagcagtgggttctgcgacataggaaatgactttttgcagggtaactggacatgcttgaatggattcgacggtcaaccgagttttttcactactgaaaggtttagcctaagtgacgtcaatcgtcattttgtatggaataaaacaaacccttaatccgtatcacgaacaatccacttgttggtcaccctgattcagatgtgaagcacgccgg

SEQ ID NO: 14063 - DNA, 693 bp, Muscodor strobelii
  misc_feature: SGI cDNA ID NO. 564627
  misc_feature: Encodes the peptide sequence at SEQ ID NO 14064
atggagggtctcaaagctctcttcgttaaaccagacccaaatgcccagatgcgaaaatgcaacgccctcatccgctccaacctacgtaaactcgaccgcgacataacagccgtgaaaggcgtcgagcaaaagaccaagaacctcatcctcgcagccgacaagcgaggcgcccgcgacgcatcaagacgcgtccaagcccagcgagaagcccgagaattcgccaaagagctcatccgcgcgcgcaagacctccgccagactcgtgacctcgaaagcccagttatcttccgtacagatgcaggtcaatgaggccttcgccgtgaggaaaatcgagggcagcatcagggctagtgtgggcatcatgaaggatgtgaatagtctgatgagattaccggagtttgcgggaaccatgagggagctcagtgtggagttgatgaaggcgggtgttattgaggagatggttgatgagacgctgcctggtggagaggagggactatttgaggatgaggagatggaggctgaaggcgaggttgataaggtgcttggtgagatactgaagggcaagatggagaaggcgggtccaatgcccagtacgcctgttgagtctgcgccgacacccgtgctggaggatgaggaggaagatgaggaggccatggaccagatgaggaatcggctcgaggctttgcggagctaa

SEQ ID NO: 14064 - protein, 230 aa, Muscodor strobelii
  misc_feature: SGI Peptide ID NO. 564627
  misc_feature (19)..(200): Pfam Id: PF03357 Pfam Desc: Snf7
  misc_feature (1)..(230): NCBI GI: 261356698 Blast Desc: vacuolar protein-sorting-associated protein [Verticillium albo-atrum VaMs.102]
  misc_feature (1)..(230): NCBI GI: 145606090 Blast Desc: MGG_06670 [Magnaporthe grisea 70-15] gi|145013815|gb|EDJ98456.1| MGG_06670 [Magnaporthe grisea 70-15]
  misc_feature (1)..(230): NCBI GI: 256729115 Blast Desc: [Nectria haematococca mpVI 77-13-4]
  misc_feature (1)..(230): NCBI GI: 46138635 Blast Desc: FG10832.1 [Gibberella zeae PH-1]
  misc_feature (1)..(230): NCBI GI: 116199427 Blast Desc: CHGG_07869 [Chaetomium globosum CBS 148.51] gi|88179148|gb|EAQ86616.1| CHGG_07869 [Chaetomium globosum CBS 148.51]
  misc_feature (1)..(230): NCBI GI: 85080059 Blast Desc: NCU01791 [Neurospora crassa OR74A] gi|18376120|emb|CAD21186.1| related to endosomal Vps protein complex subunit [Neurospora crassa] gi|28917535|gb|EAA27233.1|
  misc_feature (1)..(230): NCBI GI: 156060495 Blast Desc: SS1G_02386 [Sclerotinia sclerotiorum 1980] gi|154699794|gb|EDN99532.1| SS1G_02386 [Sclerotinia sclerotiorum 1980]
  misc_feature (1)..(230): NCBI GI: 171689474 Blast Desc: protein product [Podospora anserina] gi|170944699|emb|CAP70810.1| protein product [Podospora anserina]
  misc_feature (1)..(230): NCBI GI: 119477753 Blast Desc: SNF7 family protein [Neosartorya fischeri NRRL 181] gi|119407442|gb|EAW17391.1| SNF7 family protein [Neosartorya fischeri NRRL 181]
  misc_feature (1)..(230): NCBI GI: 159127009 Blast Desc: SNF7 family protein [Aspergillus fumigatus A1163]
MEGLKALFVKPDPNAQMRKCNALIRSNLRKLDRDITAVKGVEQKTKNLILAADKRGARDASRRVQAQREAREFAKELIRARKTSARLVTSKAQLSSVQMQVNEAFAVRKIEGSIRASVGIMKDVNSLMRLPEFAGTMRELSVELMKAGVIEEMVDETLPGGEEGLFEDEEMEAEGEVDKVLGEILKGKMEKAGPMPSTPVESAPTPVLEDEEEDEEAMDQMRNRLEALRS

SEQ ID NO: 14065 - DNA, 3131 bp, Muscodor strobelii
  misc_feature: SGI EST ID NO. CUFF.33805.0
  misc_feature: Variant of the nucleotide sequence at SEQ ID NO 14063
gtattgacgagagtaaaaagtgggatgcaaaagcagtagcggggtagtagccccccaaatttccgtctggaggcgccgtcgtacctggtcccacattgtttcccgtcagccttgaacgtcgcagccttgggctttcgttatcacactaccgcgccaacgtcatcgctcactttgcaccagaagatacctcatatcgcacctagtctcacatccaactcacgcccaatcgcctgacggcgcatcaccatcgcgtaatatactgctgcgtccccctccatctgtaaaagagcatcacataatccaagatggagggtctcaaagctctcttcgttaaaccagacccaaatgcccagatgcgaaaatgcaacgccctcatccgctccaacctacgtaaactcgaccgcgacataacagccgtgaaaggcgtcgagcaaaagaccaagaacctcatcctcgcagccgacaagcgaggcgcccgcgacgcatcaagacgcgtccaagcccagcgagaagcccgagaattcgccaaagagctcatccgcgcgcgcaagacctccgccagactcgtgacctcgaaagcccagttatcttccgtacagatgcaggtcaatgaggccttcgccgtgaggaaaatcgagggcagcatcagggctagtgtgggcatcatgaaggatgtgaatagtctgatgagattaccggagtttgcgggaaccatgagggagctcagtgtggagttgatgaaggcgggtgttattgaggagatggttgatgagacgctgcctggtggagaggagggactatttgaggatgaggagatggaggctgaaggcgaggttgataaggtgcttggtgagatactgaagggcaagatggagaaggcgggtccaatgcccagtacgcctgttgagtctgcgccgacacccgtgctggaggatgaggaggaagatgaggaggccatggaccagatgaggaatcggctcgaggctttgcggagctaagagtagtgaattttcggtattagtcttcagggtggtgcattcatcattacatcggcgtttcgggagagcgggttgcacttagcatgactaggtatcatgtcgtcatggttggattgtgatgttctctcttggttctgctcttactacggggtcaagaagatagagccaagaaacgctgcagcatacatacaggaagcaatattctgtcgggcatttcctccttcgctatttaagtctattcaaatcacctttggtgtgctgattggtcatttaaaagaccatctcggagttgtagagatgtggtcttgcggttggagatcagccgaccaatcccaaccacttgcagtgaaaacgtctcgagcgaatttatcggctcccatagcgttctcgaagcggagtctttgatccccggctagatttcgtgtgaaacgaaatactctctcatctccatcatgcacctttccgttggtctctaatttttcagcaggaatccaggcatgagtttgacgattgttcttccatgatgcccgattgattgggaccgagtttgccgagagcaggccctggatgaagtccaagatgggcaggattcgcgttcgtagcccgcaattggtgtgattcttgtcgatttgatagctaggacattggcgcaacgtcgcgaggaccgtttcgataggtagtaacgacgtgtcggcaatagagtcaaatgagcccggagagaagtccacgaggaatagcaaccccttgttcatgagaaatttgaagatctcgccgagttggtaggagtcgcaggctacacttgagtcgtaaccgagcttgcactggcgtgcactgcgagacgtgtaaagcgaaatgaagtgtcgctgtactgaggcgatggtgtttaggacgcaatttcgccgatattgtaattcctctaaaagggggaagaaatcaatatgaacgtatgtctagaggtaaagtaggcttgatcgattttatcaaatggcaaaagggtagtctcttacgttcaagtccatcttgtaaataccaccatgtggcactagtcgtctcgtcttcttccgcggcaaaagaactccattggcatgagccgttcatgatcaactccttagttgcggtttggaatctcaggggcatattcaaaagccatgagacaagaaccctttgacgcaaggtactctcacttgcacggctcataccaccatttccatttccatcatcctttactggcttgagtcggcttgcggcaggccatttgaacttcagtcctgttgtaacatactttgacacagcggtagtgcagtcgaaacggtcggccatcacggctaaagcggtcacgaacgacatggtaatttggggctgactggttctcgcatcatgcccatgcaaaattcgtagcagatcagcaaaaacattgtctctgtatgcgtacgaggtcgcctgatcatcatcatgtattcggatccaggggaggtcttgaacgtcggcgtctttgggcttgacattcttcagatccaacgaagcaaatgcattggcaatgtcatttgcttctttgaaatgcgtgtctccgagcagtttctcaaaatattttgactgcttctttagcacatcaaggtccactcgaaaggtgatacgcactcgagtcctaggactcggtaactgaggtggagggtcccgttgactagtaaatcttggctttgcctcgcgacgtgcagaccgaatagtctctttagagttctcaaacgttgcatctaggattatgttgccatgttccgcgatgatgaccacctcaggaagcgaggaagcctctgacgtagagtctccgtccggtgcgctgcccgagtcctccatttggtctgtcgctggtgtgaggcagtaccttgaggacgccagacggtgaggacctcatgagcttggagtttgacgtaaatttgaggattctaagccttcaagcaaatcacggtgttgtcttttccgtgagggtgaagcggcggtcgggcttaggtgcagctggttgggcacaagcggttcgagctcgtcttcacacgatgaagatattggaggcgatacaaaagaatcaatagactcggactagtattcaaatccaaaatcgggccatgttttgtgatgaat

SEQ ID NO: 14066 - DNA, 1494 bp, Muscodor strobelii
  misc_feature: SGI cDNA ID NO. 564628
  misc_feature: Encodes the peptide sequence at SEQ ID NO 14067
atggaggactcgggcagcgcaccggacggagactctacgtcagaggcttcctcgcttcctgaggtggtcatcatcgcggaacatggcaacataatcctagatgcaacgtttgagaactctaaagagactattcggtctgcacgtcgcgaggcaaagccaagatttactagtcaacgggaccctccacctcagttaccgagtcctaggactcgagtgcgtatcacctttcgagtggaccttgatgtgctaaagaagcagtcaaaatattttgagaaactgctcggagacacgcatttcaaagaagcaaatgacattgccaatgcatttgcttcgttggatctgaagaatgtcaagcccaaagacgccgacgttcaagacctcccctggatccgaatacatgatgatgatcaggcgacctcgtacgcatacagagacaatgtttttgctgatctgctacgaattttgcatgggcatgatgcgagaaccagtcagccccaaattaccatgtcgttcgtgaccgctttagccgtgatggccgaccgtttcgactgcactaccgctgtgtcaaagtatgttacaacaggactgaagttcaaatggcctgccgcaagccgactcaagccagtaaaggatgatggaaatggaaatggtggtatgagccgtgcaagtgagagtaccttgcgtcaaagggttcttgtctcatggcttttgaatatgcccctgagattccaaaccgcaactaaggagttgatcatgaacggctcatgccaatggagttcttttgccgcggaagaagacgagacgactagtgccacatggtggtatttacaagatggacttgaacaggaattacaatatcggcgaaattgcgtcctaaacaccatcgcctcagtacagcgacacttcatttcgctttacacgtctcgcagtgcacgccagtgcaagctcggttacgactcaagtgtagcctgcgactcctaccaactcggcgagatcttcaaatttctcatgaacaaggggttgctattcctcgtggacttctctccgggctcatttgactctattgccgacacgtcgttactacctatcgaaacggtcctcgcgacgttgcgccaatgtcctagctatcaaatcgacaagaatcacaccaattgcgggctacgaacgcgaatcctgcccatcttggacttcatccagggcctgctctcggcaaactcggtcccaatcaatcgggcatcatggaagaacaatcgtcaaactcatgcctggattcctgctgaaaaattagagaccaacggaaaggtgcatgatggagatgagagagtatttcgtttcacacgaaatctagccggggatcaaagactccgcttcgagaacgctatgggagccgataaattcgctcgagacgttttcactgcaagtggttgggattggtcggctgatctccaaccgcaagaccacatctctacaactccgagatggtcttttaaatga

SEQ ID NO: 14067 - protein, 497 aa, Muscodor strobelii
  misc_feature: SGI Peptide ID NO. 564628
  misc_feature (1)..(494): NCBI GI: 116200115 Blast Desc: CHGG_08213 [Chaetomium globosum CBS 148.51] gi|88179492|gb|EAQ86960.1| CHGG_08213 [Chaetomium globosum CBS 148.51]
  misc_feature (1)..(481): NCBI GI: 46121565 Blast Desc: FG05161.1 [Gibberella zeae PH-1]
  misc_feature (1)..(481): NCBI GI: 261356828 Blast Desc: conserved [Verticillium albo-atrum VaMs.102]
  misc_feature (22)..(480): NCBI GI: 171689954 Blast Desc: protein product [Podospora anserina] gi|170944939|emb|CAP71050.1| protein product [Podospora anserina]
  misc_feature (21)..(496): NCBI GI: 154322601 Blast Desc: BC1G_00643 [Botryotinia fuckeliana B05.10] gi|150847977|gb|EDN23170.1| BC1G_00643 [Botryotinia fuckeliana B05.10]
  misc_feature (167)..(481): NCBI GI: 85075863 Blast Desc: NCU03496 [Neurospora crassa OR74A] gi|18376331|emb|CAD21077.1| related to hydroxyproline-rich glycoprotein [Neurospora crassa] gi|28916854|gb|EAA26597.1|
  misc_feature (22)..(287): NCBI GI: 145607011 Blast Desc: MGG_12100 [Magnaporthe grisea 70-15] gi|145014624|gb|EDJ99192.1| MGG_12100 [Magnaporthe grisea 70-15]
  misc_feature (21)..(428): NCBI GI: 189208937 Blast Desc: conserved [Pyrenophora tritici-repentis Pt-1C-BFP] gi|187976894|gb|EDU43520.1| conserved [Pyrenophora tritici-repentis Pt-1C-BFP]
  misc_feature (23)..(336): NCBI GI: 169598382 Blast Desc: SNOG_01993 [Phaeosphaeria nodorum SN15] gi|111069085|gb|EAT90205.1| SNOG_01993 [Phaeosphaeria nodorum SN15]
  misc_feature (77)..(415): NCBI GI: 67517290 Blast Desc: AN0920.2 [Aspergillus nidulans FGSC A4] gi|40746793|gb|EAA65949.1| AN0920.2 [Aspergillus nidulans FGSC A4] gi|259488792|tpe|CBF88523.1| TPA: conserved [Aspergillus FGSC
MEDSGSAPDGDSTSEASSLPEVVIIAEHGNIILDATFENSKETIRSARREAKPRFTSQRDPPPQLPSPRTRVRITFRVDLDVLKKQSKYFEKLLGDTHFKEANDIANAFASLDLKNVKPKDADVQDLPWIRIHDDDQATSYAYRDNVFADLLRILHGHDARTSQPQITMSFVTALAVMADRFDCTTAVSKYVTTGLKFKWPAASRLKPVKDDGNGNGGMSRASESTLRQRVLVSWLLNMPLRFQTATKELIMNGSCQWSSFAAEEDETTSATWWYLQDGLEQELQYRRNCVLNTIASVQRHFISLYTSRSARQCKLGYDSSVACDSYQLGEIFKFLMNKGLLFLVDFSPGSFDSIADTSLLPIETVLATLRQCPSYQIDKNHTNCGLRTRILPILDFIQGLLSANSVPINRASWKNNRQTHAWIPAEKLETNGKVHDGDERVFRFTRNLAGDQRLRFENAMGADKFARDVFTASGWDWSADLQPQDHISTTPRWSFK

SEQ ID NO: 14068 - DNA, 2723 bp, Muscodor strobelii
  misc_feature: SGI EST ID NO. CUFF.33806.1
  misc_feature: Variant of the nucleotide sequence at SEQ ID NO 14066
attcatcacaaaacatggcccgattttggatttgaatactagtccgagtctattgattcttttgtatcgcctccaatatcttcatcgtgtgaagacgagctcgaaccgcttgtgcccaaccagctgcacctaagcccgaccgccgcttcaccctcacggaaaagacaacaccgtgatttgcttgaaggcttagaatcctcaaatttacgtcaaactccaagctcatgaggtcctcaccgtctggcgtcctcaaggtactgcctcacaccagcgacagaccaaatggaggactcgggcagcgcaccggacggagactctacgtcagaggcttcctcgcttcctgaggtggtcatcatcgcggaacatggcaacataatcctagatgcaacgtttgagaactctaaagagactattcggtctgcacgtcgcgaggcaaagccaagatttactagtcaacgggaccctccacctcagttaccgagtcctaggactcgagtgcgtatcacctttcgagtggaccttgatgtgctaaagaagcagtcaaaatattttgagaaactgctcggagacacgcatttcaaagaagcaaatgacattgccaatgcatttgcttcgttggatctgaagaatgtcaagcccaaagacgccgacgttcaagacctcccctggatccgaatacatgatgatgatcaggcgacctcgtacgcatacagagacaatgtttttgctgatctgctacgaattttgcatgggcatgatgcgagaaccagtcagccccaaattaccatgtcgttcgtgaccgctttagccgtgatggccgaccgtttcgactgcactaccgctgtgtcaaagtatgttacaacaggactgaagttcaaatggcctgccgcaagccgactcaagccagtaaaggatgatggaaatggaaatggtggtatgagccgtgcaagtgagagtaccttgcgtcaaagggttcttgtctcatggcttttgaatatgcccctgagattccaaaccgcaactaaggagttgatcatgaacggctcatgccaatggagttcttttgccgcggaagaagacgagacgactagtgccacatggtggtatttacaagatggacttgaacaggaattacaatatcggcgaaattgcgtcctaaacaccatcgcctcagtacagcgacacttcatttcgctttacacgtctcgcagtgcacgccagtgcaagctcggttacgactcaagtgtagcctgcgactcctaccaactcggcgagatcttcaaatttctcatgaacaaggggttgctattcctcgtggacttctctccgggctcatttgactctattgccgacacgtcgttactacctatcgaaacggtcctcgcgacgttgcgccaatgtcctagctatcaaatcgacaagaatcacaccaattgcgggctacgaacgcgaatcctgcccatcttggacttcatccagggcctgctctcggcaaactcggtcccaatcaatcgggcatcatggaagaacaatcgtcaaactcatgcctggattcctgctgaaaaattagagaccaacggaaaggtgcatgatggagatgagagagtatttcgtttcacacgaaatctagccggggatcaaagactccgcttcgagaacgctatgggagccgataaattcgctcgagacgttttcactgcaagtggttgggattggtcggctgatctccaaccgcaagaccacatctctacaactccgagatggtcttttaaatgaccaatcagcacaccaaaggtgatttgaatagacttaaatagcgaaggaggaaatgcccgacagaatattgcttcctgtatgtatgctgcagcgtttcttggctctatcttcttgaccccgtagtaagagcagaaccaagagagaacatcacaatccaaccatgacgacatgatacctagtcatgctaagtgcaacccgctctcccgaaacgccgatgtaatgatgaatgcaccaccctgaagactaataccgaaaattcactactcttagctccgcaaagcctcgagccgattcctcatctggtccatggcctcctcatcttcctcctcatcctccagcacgggtgtcggcgcagactcaacaggcgtactgggcattggacccgccttctccatcttgcccttcagtatctcaccaagcaccttatcaacctcgccttcagcctccatctcctcatcctcaaatagtccctcctctccaccaggcagcgtctcatcaaccatctcctcaataacacccgccttcatcaactccacactgagctccctcatggttcccgcaaactccggtaatctcatcagactattcacatccttcatgatgcccacactagccctgatgctgccctcgattttcctcacggcgaaggcctcattgacctgcatctgtacggaagataactgggctttcgaggtcacgagtctggcggaggtcttgcgcgcgcggatgagctctttggcgaattctcgggcttctcgctgggcttggacgcgtcttgatgcgtcgcgggcgcctcgcttgtcggctgcgaggatgaggttcttggtcttttgctcgacgcctttcacggctgttatgtcgcggtcgagtttacgtaggttggagcggatgagggcgttgcattttcgcatctggtggggtggttgttagtcagtttgagacttcgg

SEQ ID NO: 14069 - DNA, 720 bp, Muscodor strobelii
  misc_feature: SGI cDNA ID NO. 564629
  misc_feature: Encodes the peptide sequence at SEQ ID NO 14070
atggaacattttgtcactgaaacgaggaaattgcccgaagggcagttggaatacgacgtgacagcgtttcgctcaatagagtcattggaagaaaacaaagtctatctagccaggaaatcgagtggaaaccaaagcccgaacgatactgttgctaacaaggattgggcacagtgttatttctggtttattctcgtcacttcattcaaaaaccgggatcccggcgcatgggtgaagctatatcatatatctgcgacagatctcgaacacgtgccaccgttcgagacggcagtcgaattcaagcccattggcaatggctctttcggttcctgcaactacgatatcttcaaaggggaaagcaccattgataagctgggccttcacgaggtggatttactgatagagctcaagtcgtggccccagattaacaatgagtcatgggtcgataggatctcgaaagaattagagttcaaacaacataatgctgccaatgtgtacgcatgggtctgggattttgtggcccagtattattaccggggcacaagcaaatctggtaacgccatcctcaatgacatttggctccttgctaggcgtcggtctattgcacgacagaggatgctcttcctccaccgcgcaacgatggacccgtatcaggtgctcatagctccccagtatgtgatcccatccgagcctcccgttgatgccacactcttagttacttga

SEQ ID NO: 14070 - protein, 239 aa, Muscodor strobelii
  misc_feature: SGI Peptide ID NO. 564629
MEHFVTETRKLPEGQLEYDVTAFRSIESLEENKVYLARKSSGNQSPNDTVANKDWAQCYFWFILVTSFKNRDPGAWVKLYHISATDLEHVPPFETAVEFKPIGNGSFGSCNYDIFKGESTIDKLGLHEVDLLIELKSWPQINNESWVDRISKELEFKQHNAANVYAWVWDFVAQYYYRGTSKSGNAILNDIWLLARRRSIARQRMLFLHRATMDPYQVLIAPQYVIPSEPPVDATLLVT

SEQ ID NO: 14071 - DNA, 2766 bp, Muscodor strobelii
  misc_feature: SGI EST ID NO. CUFF.33501.0
  misc_feature: Variant of the nucleotide sequence at SEQ ID NO 14069
cttaggtataaatacgcaaacatggctcatctataaaattcaatgagctgaaacggatgccgtgctctaagttttcctccccatcatattccgtaagagaagtcacgttgactgagttagtccaaagagctgctagaatctcacgcgagcataatggaacattttgtcactgaaacgaggaaattgcccgaagggcagttggaatacgacgtgacagcgtttcgctcaatagagtcattggaagaaaacaaagtctatctagccaggaaatcgagtggaaaccaaagcccgaacgatactgttgctaacaaggattgggcacagtgttatgtacagctactagctttgattattttccttatagcaacataattgctgattcgtattagttctggtttattctcgtcacttcattcaaaaaccgggatcccggcgcatgggtgaagctatatcatatatctgcgacagatctcgaacacgtgccaccgttcgagacggcagtcgaattcaagcccattggcaatggctctttcggttcctgcaactacgatatcttcaaaggggaaagcaccattgataagctgggccttcacgaggtggatttactgatagagctcaagtcgtggccccagattaacaatgagtcatgggtcgataggatctcgaaagaattagagttcaaacaacataatgctgccaatgtgtacgcatgggtctgggattttgtggcccagtattattaccggggcacaagcaaatctggtaacgccatcctcaatgacatttggctccttgctaggcgtcggtctattgcacgacagaggatgctcttcctccaccgcgcaacgatggacccgtatcaggtgctcatagctccccagtatgtgatcccatccgagcctcccgttgatgccacactcttagttacttgaaggaaggatgcaggaaactcttgctgtttttaagaataatactgttcaattaaggtcatttctatcttcagatgtttaaatcacatcaaatagttgtattccaactgtccatattgtttgatctcgcagagaaattttcttgttagtgaaatatgttgacattcctactatctccattaagttgccatatcacatagtagtatgtccacatcagacgagactttaagcacgtaactaaaaaatggtctgcgagataggatcccatgggtcgatgcctctcacgcatggagggcctggtctttgggacctcgtttctgaaccattttcgaacccctaagcggccagtggcccttgacttcatggtatcgcatgaccatcaaggagattataatgacaatccagtagacattgtacgaaatgacagatccgtacgttgcagagttagtccacccgagaattgcactgaaaattccccagcctccaccaccattgaactcgggattacagctaaaatacaatcggagtcagttactactgtcttggggatattcaagggattgaagggccacttcagattgtccacttttgattgtctcgggagaggatcaaagcaaccgactcccaagactcatcccgtgggggaaaaacagactccgaatgcttaccactgtgaggaagtctatcagtctcttatcacagtatgcacttatatattttgaagtcgaggtacttacattcacgtgccagacactcttatcaatatcataagaaccaggtccggatcctagttctgctgcatcgccaccaatgacattattccagcgttgggattcgatcaaccatacgccgcgcgagaagaggccggcaccgaccaaatatagtagacacgtggaggcgacaaggaagtattggagatgagttgtgatgccgcccctgatgtgatcagcaaccataactcgagtaaaaacacggctaacgtacctatacaagagatatcctacaattgccccaaagattaaacccacgacaacaggcagcgggacagcggttgccggcgctgaaaatgacacaccagcgatgaagacgatagcctcgatgccttctcgcaagacagtgatgaagggaagtacaaacatagcgtatttctcagcaaaatgcttgaaccagttggcatcagacttgcgagctctcacaggcgcctcgatagcttttgccaatttgacgcgccatttctcctgtagcttgccaattcgtaagagggccacgccaacgatactgataatcacgcttgcgaccagggcaaaagctccttcgaagttattctcactagctgcccatgcatcatggcctagcgtataaaaggcgccgataataccagctgcgatgactagggagatcgagaatcctatgccaacaccgagccagacctggagtacgctgattaaaatctttcaataccagtttgaggccggggagttctttctcacttgtttcctcaaggccttgtacacagcgacattctctcctggcttatctatagtctgcttgagaaaagcaaggagtacagatacgatgatgactgtttccaatgcctcccgaaagaccaccaagaatacggggacagaaaaaacgtcaggcatagtggcgtggtctgctgtttcgagcaaggaaatttgtaaagacaacgattgagcacaagctaggccgaatatattaagaagaaagggaggtttgaccctagaaacctagatattcgcacagaacatcaagcgaggcttgtatgttggtcttggggaaatgatccacactgtgattatctataagatctgataaa

SEQ ID NO: 14072 - DNA, 1041 bp, Muscodor strobelii
  misc_feature: SGI cDNA ID NO. 564630
  misc_feature: Reduced expression when VOC is produced
  misc_feature: Encodes the peptide sequence at SEQ ID NO 14073
atgcctgacgttttttctgtccccgtattcttggtggtctttcgggaggcattggaaacagtcatcatcgtatctgtactccttgcttttctcaagcagactatagataagccaggagagaatgtcgctgtgtacaaggccttgaggaaacaagtctggctcggtgttggcataggattctcgatctccctagtcatcgcagctggtattatcggcgccttttatacgctaggccatgatgcatgggcagctagtgagaataacttcgaaggagcttttgccctggtcgcaagcgtgattatcagtatcgttggcgtggccctcttacgaattggcaagctacaggagaaatggcgcgtcaaattggcaaaagctatcgaggcgcctgtgagagctcgcaagtctgatgccaactggttcaagcattttgctgagaaatacgctatgtttgtacttcccttcatcactgtcttgcgagaaggcatcgaggctatcgtcttcatcgctggtgtgtcattttcagcgccggcaaccgctgtcccgctgcctgttgtcgtgggtttaatctttggggcaattgtaggatatctcttgtataggggcggcatcacaactcatctccaatacttccttgtcgcctccacgtgtctactatatttggtcggtgccggcctcttctcgcgcggcgtatggttgatcgaatcccaacgctggaataatgtcattggtggcgatgcagcagaactaggatccggacctggttcttatgatattgataagagtgtctggcacgtgaatacttcctcacagtgctgtaatcccgagttcaatggtggtggaggctggggaattttcagtgcaattctcgggtggactaactctgcaacgtacggatctgtcatttcgtacaatgtctactggattgtcattataatctccttgatggtcatgcgataccatgaagtcaagggccactggccgcttaggggttcgaaaatggttcagaaacgaggtcccaaagaccaggccctccatgcgtga

SEQ ID NO: 14073 - protein, 346 aa, Muscodor strobelii
  misc_feature: SGI Peptide ID NO. 564630
  misc_feature (6)..(326): Pfam Id: PF03239 Pfam Desc: Iron permease FTR1 family
  misc_feature (3)..(336): NCBI GI: 261354931 Blast Desc: plasma membrane iron permease [Verticillium albo-atrum VaMs.102]
  misc_feature (3)..(332): NCBI GI: 27525865 Blast Desc: iron transferase [Claviceps purpurea]
  misc_feature (1)..(328): NCBI GI: 256728803 Blast Desc: [Nectria haematococca mpVI 77-13-4]
  misc_feature (15)..(337): NCBI GI: 46110523 Blast Desc: FG02143.1 [Gibberella zeae PH-1]
  misc_feature (3)..(332): NCBI GI: 256732523 Blast Desc: [Nectria haematococca mpVI 77-13-4]
  misc_feature (3)..(341): NCBI GI: 119498795 Blast Desc: high-affinity iron ion transporter FtrA [Neosartorya fischeri NRRL 181] gi|119414319|gb|EAW24258.1| high-affinity iron ion transporter FtrA [Neosartorya fischeri NRRL 181]
  misc_feature (3)..(346): NCBI GI: 46121563 Blast Desc: FG05160.1 [Gibberella zeae PH-1]
  misc_feature (3)..(341): NCBI GI: 146324022 Blast Desc: high-affinity iron transporter FtrA [Aspergillus fumigatus Af293] gi|50845197|gb|AAT84596.1| high-affinity iron permease [Aspergillus fumigatus] gi|129556362|gb|EAL85926.2| iron
  misc_feature (3)..(342): NCBI GI: 121718250 Blast Desc: high-affinity iron ion transporter FtrA [Aspergillus clavatus NRRL 1] gi|119404346|gb|EAW14722.1| high-affinity iron ion transporter FtrA [Aspergillus clavatus NRRL 1]
  misc_feature (1)..(328): NCBI GI: 171689956 Blast Desc: protein product [Podospora anserina] gi|170944940|emb|CAP71051.1| protein product [Podospora anserina]
  misc_feature: Useful for introducing or modulating the production of volatile compounds
MPDVFSVPVFLVVFREALETVIIVSVLLAFLKQTIDKPGENVAVYKALRKQVWLGVGIGFSISLVIAAGIIGAFYTLGHDAWAASENNFEGAFALVASVIISIVGVALLRIGKLQEKWRVKLAKAIEAPVRARKSDANWFKHFAEKYAMFVLPFITVLREGIEAIVFIAGVSFSAPATAVPLPVVVGLIFGAIVGYLLYRGGITTHLQYFLVASTCLLYLVGAGLFSRGVWLIESQRWNNVIGGDAAELGSGPGSYDIDKSVWHVNTSSQCCNPEFNGGGGWGIFSAILGWTNSATYGSVISYNVYWIVIIISLMVMRYHEVKGHWPLRGSKMVQKRGPKDQALHA

SEQ ID NO: 14074 - DNA, 1813 bp, Muscodor strobelii
  misc_feature: SGI EST ID NO. CUFF.33502.1
  misc_feature: Variant of the nucleotide sequence at SEQ ID NO 14072
gaccaacatacaagcctcgcttgatgttctgtgcgaatatctaggtttctagggtcaaacctccctttcttcttaatatattcggcctagcttgtgctcaatcgttgtctttacaaatttccttgctcgaaacagcagaccacgccactatgcctgacgttttttctgtccccgtattcttggtggtctttcgggaggcattggaaacagtcatcatcgtatctgtactccttgcttttctcaagcagactatagataagccaggagagaatgtcgctgtgtacaaggccttgaggaaacaagtctggctcggtgttggcataggattctcgatctccctagtcatcgcagctggtattatcggcgccttttatacgctaggccatgatgcatgggcagctagtgagaataacttcgaaggagcttttgccctggtcgcaagcgtgattatcagtatcgttggcgtggccctcttacgaattggcaagctacaggagaaatggcgcgtcaaattggcaaaagctatcgaggcgcctgtgagagctcgcaagtctgatgccaactggttcaagcattttgctgagaaatacgctatgtttgtacttcccttcatcactgtcttgcgagaaggcatcgaggctatcgtcttcatcgctggtgtgtcattttcagcgccggcaaccgctgtcccgctgcctgttgtcgtgggtttaatctttggggcaattgtaggatatctcttgtataggggcggcatcacaactcatctccaatacttccttgtcgcctccacgtgtctactatatttggtcggtgccggcctcttctcgcgcggcgtatggttgatcgaatcccaacgctggaataatgtcattggtggcgatgcagcagaactaggatccggacctggttcttatgatattgataagagtgtctggcacgtgaatgtaagtacctcgacttcaaaatatataagtgcatactgtgataagagactgatagacttcctcacagtggtaagcattcggagtctgtttttcccccacgggatgagtcttgggagtcggttgctttgatcctctcccgagacaatcaaaagtggacaatctgaagtggcccttcaatcccttgaatatccccaagacagtagtaactgactccgattgtattttagctgtaatcccgagttcaatggtggtggaggctggggaattttcagtgcaattctcgggtggactaactctgcaacgtacggatctgtcatttcgtacaatgtctactggattgtcattataatctccttgatggtcatgcgataccatgaagtcaagggccactggccgcttaggggttcgaaaatggttcagaaacgaggtcccaaagaccaggccctccatgcgtgagaggcatcgacccatgggatcctatctcgcagaccattttttagttacgtgcttaaagtctcgtctgatgtggacatactactatgtgatatggcaacttaatggagatagtaggaatgtcaacatatttcactaacaagaaaatttctctgcgagatcaaacaatatggacagttggaatacaactatttgatgtgatttaaacatctgaagatagaaatgaccttaattgaacagtattattcttaaaaacagcaagagtttcctgcatccttccttcaagtaactaagagtgtggcatcaacgggaggctcggatgggatcacatactggggagctatgagcacctgatacgggtccatcgttgcgcggtggaggaagagcatcctctgtcgtgcaatagaccgacg

SEQ ID NO: 14075 - DNA, 1857 bp, Muscodor strobelii
  misc_feature: SGI cDNA ID NO. 564631
  misc_feature: Reduced expression when VOC is produced
  misc_feature: Encodes the peptide sequence at SEQ ID NO 14076
atgaattcagttgcgaattacaaaatgtacgcgctgattctactaagtctcgtacggctcgtagtagcagcgacggtcacatatgacttcaacataacctggacaacagcgaatcccgatggcgcattcgaaagacctacaatcggtatcaacgaccaatggcccattcctaggattgaggccgacgtgggcgacacaatcatagtccacgttcaaaatcaactaggaaatcaatcgacatcccttcatttccacggcttatacatgaacggtaccgcacatatggacggcccagcacaggtctcgcagtgcagtataccagcgggttcgagttttacttacaactttactatcaatcaacctggcacatactggtaccactcccacaccggtggtcaatatcccgatggtctacgaggccccctcataatccacgactccgagtcaccctttctagatctttacgacgaagaacttatcctcactgtatcagactggtatcatgagcagatggcagtattactaccagcattcaactcgaagaataatccatctggcgccgagcccgtgccccaagctgctctcttcaacgagacacaaaacctcacactctctgttcaacctggaaagacttatctggtgcgtttgatcaatataggagcttttgctggacagtatatctggttcgaaggtcacaatatgacgctcgtggaagtcgatggcgtttatcatcagctagccgaagcggagatgatatacgtctcggctgcgcagagatatagctttctgctgaccacgaagaacgagaccggaggcaactacgcttttgtcgcaagcatggacacgacactcttcgacacactaccagaagacctgaactacaacgtaacaggatggctcgtctacgacgacgacaagccccttcctcagcctgcgttactcgacgaactcgaccccttcgacgacataactttaatcccctgggacaaccagacactcttcggggagccagatcaaaccatagagcttgacgtgataatggacaacctcaacaccggcgcaaattacgcattcttcaacaacataacatacaccgcgcccaaagtcccctccctctacaccgccctctcagcaggagatctcgcaacagatccctccatctacggatcatacacaaactctttcgtcctagccaaaggcaaaataatccaaatcatcgtaaataatctcgataccggccgtcacccatttcatctccacgggcataatttccaagcactataccgctccgcagaagacgagggcacgttcgaagactctaacctcactgaagctgattacccgaagattcctatgaggagggacacttttgtattatatcctaccgggaatattgttttgaggttcagagcagataatcctggcgtatggctcttccactgccacatagaatggcacgtaacatccggcctcatggcaacattcgtcgaagcacctctctcgctccaagaatccctctccatcccacaaaaccacctcgacgtctgtgcttcccagggtatacaaaccactggtaacgcagcagcgaactcactaaatttcgctgatctaagcggtgagaataaggcgcctgatcgtttacctgctggcttcacgacccgcggaaaagtagccctagcattcagcatcctagcgggactcctcggtatcttaaccgtaacatggtacggtctagcaccagatcctcaagccaaatcactcgtcacagaacaagtagtagaaaacaacagcacaacatcagagcctaaagtagcactcgccaccacaggctcaggctcaggttccgagaagacgtga

SEQ ID NO: 14076 - protein, 618 aa, Muscodor strobelii
  misc_feature: SGI Peptide ID NO. 564631
  misc_feature (157)..(305): Pfam Id: PF00394 Pfam Desc: Multicopper oxidase
  misc_feature (364)..(501): Pfam Id: PF07731 Pfam Desc: Multicopper oxidase
  misc_feature (31)..(149): Pfam Id: PF07732 Pfam Desc: Multicopper oxidase
  misc_feature (11)..(597): NCBI GI: 46121561 Blast Desc: FG05159.1 [Gibberella zeae PH-1]
  misc_feature (25)..(583): NCBI GI: 256732971 Blast Desc: [Nectria haematococca mpVI 77-13-4]
  misc_feature (25)..(598): NCBI GI: 152013650 Blast Desc: Lcc3 [Fusarium oxysporum]
  misc_feature (23)..(609): NCBI GI: 154318979 Blast Desc: BC1G_02441 [Botryotinia fuckeliana B05.10] gi|150856872|gb|EDN32064.1| BC1G_02441 [Botryotinia fuckeliana B05.10]
  misc_feature (21)..(594): NCBI GI: 46110521 Blast Desc: FG02142.1 [Gibberella zeae PH-1]
  misc_feature (7)..(606): NCBI GI: 156063022 Blast Desc: SS1G_01627 [Sclerotinia sclerotiorum 1980] gi|154696963|gb|EDN96701.1| SS1G_01627 [Sclerotinia sclerotiorum 1980]
  misc_feature (22)..(618): NCBI GI: 256728635 Blast Desc: [Nectria haematococca mpVI 77-13-4]
  misc_feature (18)..(616): NCBI GI: 27525867 Blast Desc: multicopperoxidase [Claviceps purpurea]
  misc_feature (25)..(551): NCBI GI: 152013648 Blast Desc: Lcc9 [Fusarium oxysporum]
  misc_feature (23)..(580): NCBI GI: 189208736 Blast Desc: iron transport multicopper oxidase FET3 precursor [Pyrenophora tritici-repentis Pt-1C-BFP] gi|187976794|gb|EDU43420.1| iron transport multicopper oxidase
  misc_feature (12)..(516): SWISSPROT Homolog: EC 1.10.3.2 Laccase
  misc_feature: Useful for introducing or modulating the production of volatile compounds
MNSVANYKMYALILLSLVRLVVAATVTYDFNITWTTANPDGAFERPTIGINDQWPIPRIEADVGDTIIVHVQNQLGNQSTSLHFHGLYMNGTAHMDGPAQVSQCSIPAGSSFTYNFTINQPGTYWYHSHTGGQYPDGLRGPLIIHDSESPFLDLYDEELILTVSDWYHEQMAVLLPAFNSKNNPSGAEPVPQAALFNETQNLTLSVQPGKTYLVRLINIGAFAGQYIWFEGHNMTLVEVDGVYHQLAEAEMIYVSAAQRYSFLLTTKNETGGNYAFVASMDTTLFDTLPEDLNYNVTGWLVYDDDKPLPQPALLDELDPFDDITLIPWDNQTLFGEPDQTIELDVIMDNLNTGANYAFFNNITYTAPKVPSLYTALSAGDLATDPSIYGSYTNSFVLAKGKIIQIIVNNLDTGRHPFHLHGHNFQALYRSAEDEGTFEDSNLTEADYPKIPMRRDTFVLYPTGNIVLRFRADNPGVWLFHCHIEWHVTSGLMATFVEAPLSLQESLSIPQNHLDVCASQGIQTTGNAAANSLNFADLSGENKAPDRLPAGFTTRGKVALAFSILAGLLGILTVTWYGLAPDPQAKSLVTEQVVENNSTTSEPKVALATTGSGSGSEKT

SEQ ID NO: 14077 - DNA, 4206 bp, Muscodor strobelii
  misc_feature: SGI EST ID NO. CUFF.34464.0
  misc_feature: Variant of the nucleotide sequence at SEQ ID NO 14075
ctcggtgacactctcaggttcttctcatagttccggtcactggaagacggctgggacacccaagatatgatcccagccacaagactctctatcgctctagcatacattgttctttcacgtgcatcgtcgtgtcttgtgtccccgtgtactacagcgcatcgtcaaactagacacatttcacgactccacagagatcatctcatgaggaccgaattctcgccatgaattcagttgcgaattacaaaatgtacgcgctgattctactaagtctcgtacggctcgtagtagcagcgacggtcacatatgacttcaacataacctggacaacagcgaatcccgatggcgcattcgaaagacctacaatcggtatcaacgaccaatggcccattcctaggattgaggccgacgtgggcgacacaatcatagtccacgttcaaaatcaactaggaaatcaatcgacatcccttcatttccacggcttatacatgaacggtaccgcacatatggacggcccagcacaggtctcgcagtgcagtataccagcgggttcgagttttacttacaactttactatcaatcaacctggcacatactggtaccactcccacaccggtggtcaatatcccgatggtctacgaggccccctcataatccacgactccgagtcaccctttctagatctttacgacgaagaacttatcctcactgtatcagactggtatcatgagcagatggcagtattactaccagcattcaactcgaagaataatccatctggcgccgagcccgtgccccaagctgctctcttcaacgagacacaaaacctcacactctctgttcaacctggaaagacttatctggtgcgtttgatcaatataggagcttttgctggacagtatatctggttcgaaggtcacaatatgacgctcgtggaagtcgatggcgtttatcatcagctagccgaagcggagatgatatacgtctcggctgcgcagagatatagctttctgctgaccacgaagaacgagaccggaggcaactacgcttttgtcgcaagcatggacacgacactcttcgacacactaccagaagacctgaactacaacgtaacaggatggctcgtctacgacgacgacaagccccttcctcagcctgcgttactcgacgaactcgaccccttcgacgacataactttaatcccctgggacaaccagacactcttcggggagccagatcaaaccatagagcttgacgtgataatggacaacctcaacaccggcgcaaattacgcattcttcaacaacataacatacaccgcgcccaaagtcccctccctctacaccgccctctcagcaggagatctcgcaacagatccctccatctacggatcatacacaaactctttcgtcctagccaaaggcaaaataatccaaatcatcgtaaataatctcgataccggccgtcacccatttcatctccacgggcataatttccaagcactataccgctccgcagaagacgagggcacgttcgaagactctaacctcactgaagctgattacccgaagattcctatgaggagggacacttttgtattatatcctaccgggaatattgttttgaggttcagagcagataatcctggcgtatggctcttccactgccacatagaatggcacgtaacatccggcctcatggcaacattcgtcgaagcacctctctcgctccaagaatccctctccatcccacaaaaccacctcgacgtctgtgcttcccagggtatacaaaccactggtaacgcagcagcgaactcactaaatttcgctgatctaagcggtgagaataaggcgcctgatcgtttacctgctggcttcacgacccgcggaaaagtagccctagcattcagcatcctagcgggactcctcggtatcttaaccgtaacatggtacggtctagcaccagatcctcaagccaaatcactcgtcacagaacaagtagtagaaaacaacagcacaacatcagagcctaaagtagcactcgccaccacaggctcaggctcaggttccgagaagacgtgataccagacgtaatataccaagtatcgatattagtatcgatatcaagtccgctatataatgtgctttagtttccgtcgacatctacccacactgctgttcaaagttatgtccgcattgctgttagtgtgcagatcatgtagttgatgataatgctctcatacgttcatagtcggccgatttcacaacttaagcagagtcagccatgtcaatcatctgcctgatgatactagatcttcgaatgaaattaaccttatcaagtcataaacggaactcgggatctcatcaagaagccaaagcggagtccattcgctgtgatatagtacaggcggcatatacacatgacgtcggaacaagtagagtaatttttaaggaattagcatttcttggtatacagctcaaaacaaagggaagtgattgagctaaccgctcctgaccacagtgcttgctctctccttttctagatatacacaggcttttttatctaacaaggcctactcctctatgacttctccagctccgccaagatcttctcacccttctcccgagccgatgcaaagtcaccgaccatgtagaaagcaccctcgggcatatcgtcaccctcaccagccaagatggccttgaaggaggcaatggtgtccttcaggtcaacgagcttaccctcgataccagtgaaaacctgggcgacggtgaaaggctgggacaggaaacgctggatcttacgggcacgctcgacggtaagcttgtcagcttccgacaactcgtccatacccagaatagcaatgatatcttggagagacttgtactcctggaggatctgctggacgcgggtggcggtgttgtagtgctcatcaccgacgatacgggggtccaacatacgggacttggagtcaagagggtcgacagcggggtagatacccaactcggagataccacgggacaagacagtggtggcgtccaaatgggcgaaggtggtggcgggggcaggatcagtcaaatcatcagcagggacgtagacagcctggacggaggtaatggaacccttcttggtggtggtgatacgctcttgcatgccacccatgtcaatggcgagggtgggctggtaaccgacggcagaggggatacgaccaagcagagcagacacctcggaaccggcctgggtgaagcggaaaatgttgtcgatgaagagaagcacatcctgtccctcagcatcacggaagtctggattgtctcacgtcagtaaaagtattcacactactgcagctcagaagcccgagatctgaaacataactgatcagtgacttacactcagcaatagtgagaccggtaagagcgacacgggcacgggctcccgggggctcgttcatctgaccgaacaccagggcgaccttggactcgccatcgagctgaatgacggaggtctcctgcatttcgtggtacagatcgttaccctcacgggtacgctcaccgacaccagtgaagacggagtaaccaccgtgggccttggcgatgttgttgatcagctcctgaatgaagacggtcttgccgacaccggcaccaccgaagagaccaatctttccaccacgggcgtagggggcgagcagatcgacgaccttgataccagtgatgagaatctcggcagtggtggactggtcgacaaactctgggggctcggtgtggatgggcaggaacttgtccgtcttgatggggccacgctcgtcgatcgggtcaccggtgacgttgatgatacgaccgagggtggcagcgccaacggggattgtgatgggagcaccagtatcggtagccttggcgccacgggtaagaccctcggtacctggcaaaacatgagcttgggaattacacgtatcccgaattttgcagaccaacttaccgtccatggcaatgcagcggacgacattctcacccaaatgttgctttgtcaagtgtcagtagctatataacccgcatagcgctcgatgggatgaaagctagcttacagcgacctcgaggacgagcttgttgccctggttgtcgagcgtcaaagcgttcaaaatcgggggcagcttggctccgtcgaacttgactgcgaagagtgttagtggagcgtcgtggaaaggttttcaaagctatt

SEQ ID NO: 14078 - DNA, 1542 bp, Muscodor strobelii
  misc_feature: SGI cDNA ID NO. 564632
  misc_feature: Reduced expression when VOC is produced
  misc_feature: Encodes the peptide sequence at SEQ ID NO 14079
atgtataagggccgcatctcctctctcgcccgcccggccttccaggccgcaaccaggcgcgttgcgaagccctcccccttcagattccccggtgccgccagattggccagcacgcaaggcgttggtgatggcaagattcatcaggtcatcggtgccgtcgtcgatgtcaagttcgacggagccaagctgcccccgattttgaacgctttgacgctcgacaaccagggcaacaagctcgtcctcgaggtcgctcaacatttgggtgagaatgtcgtccgctgcattgccatggacggtaccgagggtcttacccgtggcgccaaggctaccgatactggtgctcccatcacaatccccgttggcgctgccaccctcggtcgtatcatcaacgtcaccggtgacccgatcgacgagcgtggccccatcaagacggacaagttcctgcccatccacaccgagcccccagagtttgtcgaccagtccaccactgccgagattctcatcactggtatcaaggtcgtcgatctgctcgccccctacgcccgtggtggaaagattggtctcttcggtggtgccggtgtcggcaagaccgtcttcattcaggagctgatcaacaacatcgccaaggcccacggtggttactccgtcttcactggtgtcggtgagcgtacccgtgagggtaacgatctgtaccacgaaatgcaggagacctccgtcattcagctcgatggcgagtccaaggtcgccctggtgttcggtcagatgaacgagcccccgggagcccgtgcccgtgtcgctcttaccggtctcactattgctgagtacttccgtgatgctgagggacaggatgtgcttctcttcatcgacaacattttccgcttcacccaggccggttccgaggtgtctgctctgcttggtcgtatcccctctgccgtcggttaccagcccaccctcgccattgacatgggtggcatgcaagagcgtatcaccaccaccaagaagggttccattacctccgtccaggctgtctacgtccctgctgatgatttgactgatcctgcccccgccaccaccttcgcccatttggacgccaccactgtcttgtcccgtggtatctccgagttgggtatctaccccgctgtcgaccctcttgactccaagtcccgtatgttggacccccgtatcgtcggtgatgagcactacaacaccgccacccgcgtccagcagatcctccaggagtacaagtctctccaagatatcattgctattctgggtatggacgagttgtcggaagctgacaagcttaccgtcgagcgtgcccgtaagatccagcgtttcctgtcccagcctttcaccgtcgcccaggttttcactggtatcgagggtaagctcgttgacctgaaggacaccattgcctccttcaaggccatcttggctggtgagggtgacgatatgcccgagggtgctttctacatggtcggtgactttgcatcggctcgggagaagggtgagaagatcttggcggagctggagaagtcatag

SEQ ID NO: 14079 - protein, 513 aa, Muscodor strobelii
  misc_feature: SGI Peptide ID NO. 564632
  misc_feature (169)..(388): Pfam Id: PF00006 Pfam Desc: ATP synthase alpha/beta family, nucleotide-binding domain
  misc_feature (401)..(512): Pfam Id: PF00306 Pfam Desc: ATP synthase alpha/beta chain, C terminal domain
  misc_feature (46)..(113): Pfam Id: PF02874 Pfam Desc: ATP synthase alpha/beta family, beta-barrel domain
  misc_feature (1)..(513): NCBI GI: 116204743 Blast Desc: ATP synthase beta chain, mitochondrial precursor [Chaetomium globosum CBS 148.51] gi|88176383|gb|EAQ83851.1| ATP synthase beta chain, mitochondrial precursor [Chaetomium globosum
  misc_feature (1)..(513): NCBI GI: 171690264 Blast Desc: protein product [Podospora anserina] gi|170945080|emb|CAP71191.1| protein product [Podospora anserina]
  misc_feature (1)..(511): NCBI GI: 164424839 Blast Desc: ATP synthase beta chain, mitochondrial precursor [Neurospora crassa OR74A] gi|114555|sp|P23704.1|ATPB_NEUCR RecName: Full=ATP synthase subunit beta, mitochondrial; Flags:
  misc_feature (1)..(512): NCBI GI: 145608354 Blast Desc: ATP synthase beta chain, mitochondrial [Magnaporthe grisea 70-15] gi|145015832|gb|EDK00322.1| ATP synthase beta chain, mitochondrial [Magnaporthe grisea 70-15]
  misc_feature (1)..(511): NCBI GI: 46116940 Blast Desc: ATPB_NEUCR ATP synthase beta chain, mitochondrial precursor [Gibberella zeae PH-1]
  misc_feature (1)..(513): NCBI GI: 256729413 Blast Desc: [Nectria haematococca mpVI 77-13-4]
  misc_feature (7)..(513): NCBI GI: 67523719 Blast Desc: ATPB_NEUCR ATP synthase beta chain, mitochondrial precursor [Aspergillus nidulans FGSC A4] gi|40745270|gb|EAA64426.1| ATPB_NEUCR ATP synthase beta chain,
  misc_feature (7)..(513): NCBI GI: 259487710 Blast Desc: TPA: ATP synthase beta chain, mitochondrial (Eurofung) [Aspergillus nidulans FGSC A4]
  misc_feature (7)..(511): NCBI GI: 121713468 Blast Desc: ATP synthase F1, beta subunit, [Aspergillus clavatus NRRL 1] gi|119402498|gb|EAW12919.1| ATP synthase F1, beta subunit, [Aspergillus clavatus NRRL 1]
  misc_feature (5)..(513): NCBI GI: 261187936 Blast Desc: ATP synthase F1 beta subunit [Ajellomyces dermatitidis SLH14081] gi|239593396|gb|EEQ75977.1| ATP synthase F1 beta subunit [Ajellomyces dermatitidis SLH14081] ATP synthase F1 beta
  misc_feature (1)..(511): SWISSPROT Homolog: EC 3.6.3.14 H(+)-transporting two-sector ATPase
  misc_feature: Useful for introducing or modulating the production of volatile compounds
MYKGRISSLARPAFQAATRRVAKPSPFRFPGAARLASTQGVGDGKIHQVIGAVVDVKFDGAKLPPILNALTLDNQGNKLVLEVAQHLGENVVRCIAMDGTEGLTRGAKATDTGAPITIPVGAATLGRIINVTGDPIDERGPIKTDKFLPIHTEPPEFVDQSTTAEILITGIKVVDLLAPYARGGKIGLFGGAGVGKTVFIQELINNIAKAHGGYSVFTGVGERTREGNDLYHEMQETSVIQLDGESKVALVFGQMNEPPGARARVALTGLTIAEYFRDAEGQDVLLFIDNIFRFTQAGSEVSALLGRIPSAVGYQPTLAIDMGGMQERITTTKKGSITSVQAVYVPADDLTDPAPATTFAHLDATTVLSRGISELGIYPAVDPLDSKSRMLDPRIVGDEHYNTATRVQQILQEYKSLQDIIAILGMDELSEADKLTVERARKIQRFLSQPFTVAQVFTGIEGKLVDLKDTIASFKAILAGEGDDMPEGAFYMVGDFASAREKGEKILAELEKS

SEQ ID NO: 14080 - DNA, 2325 bp, Muscodor strobelii
  misc_feature: SGI EST ID NO. CUFF.34465.1
  misc_feature: Variant of the nucleotide sequence at SEQ ID NO 14078
catttcctcaatctctcctgctctagcagaacctcatcaccacatcctccccttcccatcccatacgcagctcttcatctctcaagatgtataagggccgcatctcctctctcgcccgcccggccttccaggccgcaaccaggcgcgttgcgaagccctcccccttcagattccccggtgccgccagattggccagcacgcaaggcgttggtgatggcaagattcatcaggtcatcggtgccgtcgtcgatgtcaagttcgacggagccaagctgcccccgattttgaacgctttgacgctcgacaaccagggcaacaagctcgtcctcgaggtcgctcaacatttgggtgagaatgtcgtccgctgcattgccatggacggtaccgagggtcttacccgtggcgccaaggctaccgatactggtgctcccatcacaatccccgttggcgctgccaccctcggtcgtatcatcaacgtcaccggtgacccgatcgacgagcgtggccccatcaagacggacaagttcctgcccatccacaccgagcccccagagtttgtcgaccagtccaccactgccgagattctcatcactggtatcaaggtcgtcgatctgctcgccccctacgcccgtggtggaaagattggtctcttcggtggtgccggtgtcggcaagaccgtcttcattcaggagctgatcaacaacatcgccaaggcccacggtggttactccgtcttcactggtgtcggtgagcgtacccgtgagggtaacgatctgtaccacgaaatgcaggagacctccgtcattcagctcgatggcgagtccaaggtcgccctggtgttcggtcagatgaacgagcccccgggagcccgtgcccgtgtcgctcttaccggtctcactattgctgagtacttccgtgatgctgagggacaggatgtgcttctcttcatcgacaacattttccgcttcacccaggccggttccgaggtgtctgctctgcttggtcgtatcccctctgccgtcggttaccagcccaccctcgccattgacatgggtggcatgcaagagcgtatcaccaccaccaagaagggttccattacctccgtccaggctgtctacgtccctgctgatgatttgactgatcctgcccccgccaccaccttcgcccatttggacgccaccactgtcttgtcccgtggtatctccgagttgggtatctaccccgctgtcgaccctcttgactccaagtcccgtatgttggacccccgtatcgtcggtgatgagcactacaacaccgccacccgcgtccagcagatcctccaggagtacaagtctctccaagatatcattgctattctgggtatggacgagttgtcggaagctgacaagcttaccgtcgagcgtgcccgtaagatccagcgtttcctgtcccagcctttcaccgtcgcccaggttttcactggtatcgagggtaagctcgttgacctgaaggacaccattgcctccttcaaggccatcttggctggtgagggtgacgatatgcccgagggtgctttctacatggtcggtgactttgcatcggctcgggagaagggtgagaagatcttggcggagctggagaagtcatagaggagtaggccttgttagataaaaaagcctgtgtatatctagaaaaggagagagcaagcactgtggtcaggagcggttagctcaatcacttccctttgttttgagctgtataccaagaaatgctaattccttaaaaattactctacttgttccgacgtcatgtgtatatgccgcctgtactatatcacagcgaatggactccgctttggcttcttgatgagatcccgagttccgtttatgacttgataaggttaatttcattcgaagatctagtatcatcaggcagatgattgacatggctgactctgcttaagttgtgaaatcggccgactatgaacgtatgagagcattatcatcaactacatgatctgcacactaacagcaatgcggacataactttgaacagcagtgtgggtagatgtcgacggaaactaaagcacattatatagcggacttgatatcgatactaatatcgatacttggtatattacgtctggtatcacgtcttctcggaacctgagcctgagcctgtggtggcgagtgctactttaggctctgatgttgtgctgttgttttctactacttgttctgtgacgagtgatttggcttgaggatctggtgctagaccgtaccatgttacggttaagataccgaggagtcccgctaggatgctgaatgctagggctacttttccgcg

SEQ ID NO: 14081 - DNA, 1740 bp, Muscodor strobelii
  misc_feature: SGI cDNA ID NO. 564633
  misc_feature: Reduced expression when VOC is produced
  misc_feature: Encodes the peptide sequence at SEQ ID NO 14082
atgccgcactctacgaattctggctcctactcgagggagtcgtccgtctcgcgacccaaccttaaagctgaaggacacggtgatggcgaaaacgactcgggccttgagaagttccccgaccatatcgactccccatccatgcgcggtctcgccatgggctcgttgagccctgttggtttgaatggctacggtttgggactgaatggcgcgagtaatcaccttgcttcggatcgctggatgcccaagaaggatcagtccacccgaggtgtgagatggggtcacctcggctcgccggccgctcctaatcgtggccatggtcgccagaagagtatctcggaagctattcgcaccattaagggtcggagcggtagcgtcagtcagaatgcccacgagatcgctgatgctctgaaggcccccgtctctcccatgctcatcggattatgtatcatgtggtacatgtcatccgccctgaccaatacctcttcgaaagcgatcctaataacctttgacaaacccgcgaccctgaccatgattcaattcttcttggttgctttctactgcatcactctgtcatggctggctactgtcttcccctcgctgcgcaagaggatacccgccctcaagcactcgatacgtgctccctctcgagatgtcattcgcaccacgctccccatggctgctttccaaatcggtggtcatctgcttagctctaccgctacctccaagatacccgtcgccatggtgcacactgtcaaggggctgtcgcccctgtttaccgttcttgcttaccgatttgtttataatattccttactcgagagcgacctacctttcactgatacctcttaccttcggtgtgacactcgcctgctcgtccggccacagcttccgaggagagattgtaggggtgctctatgcgcttggtgccacgatcatattcgtgtcccagaacatctactcaaaaactcttttcaatgaggctcgcctggctgagaccgaagggcaagcgactaagtctcgcgtcctcgacaaattcaatcttctttgctactcctcaggaatggcattcgttcttacttcgcccatctggttctggaccgaaggggtcggactgatccgcgattttgctcatgacggctcgctagatctgacgacgaagcccaatagcctcgatcatggtcgcttagctctcgagtttctcttcaacggcacttttcactttgggcagaatattctcgcctttgtattattgtccatggtatctcctgtcacatactcggtggcgtctttgatcaaacgtgtgtggatcatcggggtggctatcatctggtttggcaactctacgacgcctagccaagcggtgggcattggtctcaccatctttgggttgtacctgtatgaccgaaccaaggaaagcaacaaggcggatcgtcgggcccgcctcatgagccagagctcacgggatgctccgctactgcctttgaacacgagggatgtggcttcagcgtcgaataccggaggaccgatcttcgatagtcccatggccatgacgaacggagcgacgcctcatgcctacacgaacggtcttgcgtcggcggccagcatcagcgaagaccttaagaagaacgacgatacgggccggacgaggcagcggggaagcagtaacgctgcttggttgccaccggggacgagacaggagcgcacgtggaggcaaggagatagtatacgcgccgcctcgtaa

SEQ ID NO: 14082 - protein, 579 aa, Muscodor strobelii
  misc_feature: SGI Peptide ID NO. 564633
  misc_feature (302)..(468): Pfam Id: PF03151 Pfam Desc: Triose-phosphate Transporter family
  misc_feature (145)..(474): Pfam Id: PF08449 Pfam Desc: UAA transporter family
  misc_feature (1)..(579): NCBI GI: 116204737 Blast Desc: CHGG_10252 [Chaetomium globosum CBS 148.51] gi|88176380|gb|EAQ83848.1| CHGG_10252 [Chaetomium globosum CBS 148.51]
  misc_feature (1)..(575): NCBI GI: 156050405 Blast Desc: SS1G_07789 [Sclerotinia sclerotiorum 1980] gi|154692190|gb|EDN91928.1| SS1G_07789 [Sclerotinia sclerotiorum 1980]
  misc_feature (35)..(575): NCBI GI: 46116954 Blast Desc: FG04319.1 [Gibberella zeae PH-1]
  misc_feature (3)..(573): NCBI GI: 85110407 Blast Desc: NCU05453 [Neurospora crassa OR74A] gi|16416070|emb|CAB91454.2| related to SLY41 protein [Neurospora crassa] gi|28925125|gb|EAA34208.1| NCU05453 [Neurospora crassa
  misc_feature (35)..(579): NCBI GI: 256729417 Blast Desc: [Nectria haematococca mpVI 77-13-4]
  misc_feature (35)..(533): NCBI GI: 145608362 Blast Desc: MGG_03181 [Magnaporthe grisea 70-15] gi|145015837|gb|EDK00327.1| MGG_03181 [Magnaporthe grisea 70-15]
  misc_feature (1)..(570): NCBI GI: 171690246 Blast Desc: protein product [Podospora anserina] gi|170945071|emb|CAP71182.1| protein product [Podospora anserina]
  misc_feature (19)..(574): NCBI GI: 225554660 Blast Desc: DUF250 domain-containing protein [Ajellomyces capsulatus G186AR]
  misc_feature (19)..(574): NCBI GI: 240277011 Blast Desc: DUF250 domain-containing protein [Ajellomyces capsulatus H143]
  misc_feature (12)..(574): NCBI GI: 145242852 Blast Desc: An09g06840 [Aspergillus niger] gi|134078556|emb|CAK40477.1| protein product [Aspergillus niger]
  misc_feature: Useful for introducing or modulating the production of volatile compounds
MPHSTNSGSYSRESSVSRPNLKAEGHGDGENDSGLEKFPDHIDSPSMRGLAMGSLSPVGLNGYGLGLNGASNHLASDRWMPKKDQSTRGVRWGHLGSPAAPNRGHGRQKSISEAIRTIKGRSGSVSQNAHEIADALKAPVSPMLIGLCIMWYMSSALTNTSSKAILITFDKPATLTMIQFFLVAFYCITLSWLATVFPSLRKRIPALKHSIRAPSRDVIRTTLPMAAFQIGGHLLSSTATSKIPVAMVHTVKGLSPLFTVLAYRFVYNIPYSRATYLSLIPLTFGVTLACSSGHSFRGEIVGVLYALGATIIFVSQNIYSKTLFNEARLAETEGQATKSRVLDKFNLLCYSSGMAFVLTSPIWFWTEGVGLIRDFAHDGSLDLTTKPNSLDHGRLALEFLFNGTFHFGQNILAFVLLSMVSPVTYSVASLIKRVWIIGVAIIWFGNSTTPSQAVGIGLTIFGLYLYDRTKESNKADRRARLMSQSSRDAPLLPLNTRDVASASNTGGPIFDSPMAMTNGATPHAYTNGLASAASISEDLKKNDDTGRTRQRGSSNAAWLPPGTRQERTWRQGDSIRAAS

SEQ ID NO: 14083 - DNA, 2813 bp, Muscodor strobelii
  misc_feature: SGI EST ID NO. CUFF.33506.0
  misc_feature: Variant of the nucleotide sequence at SEQ ID NO 14081
cgccagctccccagctctgagcctccctccgctgccaagccctgctgcgaagaccactaaaccaccaccatccgtcccatcacccaagaaagttattgccatcggcgactagttcgatcgaacccatccccccgacaagtcaatcacaaatttggcccttattcacgcattcccatcacgctgtgcgacgtcttgacattcgcattctgtgcctgggccccatgatattcaatcaagtccatcttgggacataacacaatctatagtctcctttccgcctcgaaatcttgtcccgactatacctaacataaataccactgcgctctatcctacaaaccacgcccacccatctcctcacctacaaatagagcaatgactctatactagacagtcgtgccagtcccaagactcgcgtttgtctatcgacactcgtcgctccgtcgctcgttacctccaaactgatattcgtcatgccgcactctacgaattctggctcctactcgagggagtcgtccgtctcgcgacccaaccttaaagctgaaggacacggtgatggcgaaaacgactcgggccttgagaagttccccgaccatatcgactccccatccatgcgcggtctcgccatgggctcgttgagccctgttggtttgaatggctacggtttgggactgaatggcgcgagtaatcaccttgcttcggatcgctggatgcccaagaaggatcagtccacccgaggtgtgagatggggtcacctcggctcgccggccgctcctaatcgtggccatggtcgccagaagagtatctcggaagctattcgcaccattaagggtcggagcggtagcgtcagtcagaatgcccacgagatcgctgatgctctgaaggcccccgtctctcccatgctcatcggattatgtatcatgtggtacatgtcatccgccctgaccaatacctcttcgaaagcgatcctaataacctttgacaaacccgcgaccctgaccatgattcaattcttcttggttgctttctactgcatcactctgtcatggctggctactgtcttcccctcgctgcgcaagaggatacccgccctcaagcactcgatacgtgctccctctcgagatgtcattcgcaccacgctccccatggctgctttccaaatcggtggtcatctgcttagctctaccgctacctccaagatacccgtcgccatggtgcacactgtcaaggggctgtcgcccctgtttaccgttcttgcttaccgatttgtttataatattccttactcgagagcgacctacctttcactgatacctcttaccttcggtgtgacactcgcctgctcgtccggccacagcttccgaggagagattgtaggggtgctctatgcgcttggtgccacgatcatattcgtgtcccagaacatctactcaaaaactcttttcaatgaggctcgcctggctgagaccgaagggcaagcgactaagtctcgcgtcctcgacaaattcaatcttctttgctactcctcaggaatggcattcgttcttacttcgcccatctggttctggaccgaaggggtcggactgatccgcgattttgctcatgacggctcgctagatctgacgacgaagcccaatagcctcgatcatggtcgcttagctctcgagtttctcttcaacggcacttttcactttgggcagaatattctcgcctttgtattattgtccatggtatctcctgtcacatactcggtggcgtctttgatcaaacgtgtgtggatcatcggggtggctatcatctggtttggcaactctacgacgcctagccaagcggtgggcattggtctcaccatctttgggttgtacctgtatgaccgaaccaaggaaagcaacaaggcggatcgtcgggcccgcctcatgagccagagctcacgggatgctccgctactgcctttgaacacgagggatgtggcttcagcgtcgaataccggaggaccgatcttcgatagtcccatggccatgacgaacggagcgacgcctcatgcctacacgaacggtcttgcgtcggcggccagcatcagcgaagaccttaagaagaacgacgatacgggccggacgaggcagcggggaagcagtaacgctgcttggttgccaccggggacgagacaggagcgcacgtggaggcaaggagatagtatacgcgccgcctcgtaatgctttctgccgagtcgcaagcccggggctgaaaacaggtcttttaagccccttatgtataatgcatgaaacgatagacacatagatggaggaacatgaaccatgggaactagacaccgagctcgatacgggtggcttggcaatgaagttggcagtgtaaatactataaagcgaacaaaggcatgggcagccgtgactaggcattgaatactggagttggatgggttcatactttggctgccattattagcttctggacggagttcacttcgctgtacaatgattatggagtgcttagacagtattcgcatggttgtttgggaaatacaccatttgtatacatagcatttgagtgttgcattcgaaatacactgcacttcttattcgacttgatatttcggccgcagccgaattgcgtgcatatgggtagctacgattgctgaaaactcactgaagctcataaaaagctgttatgagaatgtgtatgaagcatcgaaatgagactaggccgaaaaagctggagtggatgcggcgcgcgggtgagatagggaacaggttctcaaattgttctcttcaattgaggacagatgaggttgaacattg

SEQ ID NO: 14084 - DNA, 1797 bp, Muscodor strobelii
  misc_feature: SGI cDNA ID NO. 564634
  misc_feature: Reduced expression when VOC is produced
  misc_feature: Encodes the peptide sequence at SEQ ID NO 14085
atggctgccccaaaaatgaccaagaatcagaagcgtcgcgccaagaagaaggccgacaagctggtcaaggcagatgaagcaccagagaccaataacgcgacggaagccgagccaagcgagcaggatccccagcctgagtcgacggaggcaggcgcaaacggcactgctgatctcgaggtcaagaagaacgccgcatcagaagacaagatccccgccgacggccccatcgctgaatacgacttcgatgccgaagatcccacctataccatcttcaaggacatcttcacaaagtttggcgcatccgacgccagcgacgacgccatcgccaaagaggccaatgctgggaaccagggcgagcttcttctcaacgatgacgacgacatccccgacgaagacgatgaaaatcagtccggcgccaacaaactctccaagaagaagcgcaagatgctcaacaagctctccattgccgagctcaaggctcttgtcaagaagcccgaggtcgtcgagtggcacgacacttcgtcctccgacccccgcatgctcgtacagatcaaggcccagcgcaacgtcgtccccgtcccttcacattggtccctcaagcgcgagtacctctcctcaaagaggggtatcgagaaggccgccttcaaactgcctaaatttattgccgacacgggcatttctgagatgcgcgatgccgttttagagaaggaagcggaacaatctctcaagcagaagcagcgtgcacgcgttgcgcccaagatgggcaagctggacattgactaccagaaattgtacgatgcgttcttccgctttcaggataagccgacactcacaagattcggcgaggtgtattacgaaggcaaagaatacgaaacggatttgcgacacctccgacccggcgagctgagcgacactctcaaggaagctctcagtatacctcctggtgcgcctccaccgtggctgattaatcaacagcgctttggcccaccaccctcctatccctctcttcgcatccccgggcttaacgcccccatacctcccggagcacagtgggggtttaacccaggctgctacggaaagcctcccgtggacgactataatcggccgttgtttggtggtgacattttcggtattatgcaaccgaaccaagccgctcccccgtcaggcgagcccatagagcgcaacctttggggagagctacaagaacctgaagaagaatccgaagaagaggaagaggacgatgacgaggaggaagatgaagatgaggatgtcgggacgggattacagacaccgtccggcctcgagactcctggtggctttgctagtagtgtaccgactgagtacggcacgcagacagaagcaattgccggagaaatggatctccgaaagacccgtcgtggatttgacacggaagagagttcacatcctcgacaagcatatacagtcttgcaagagcggcagacgagggccgagggcttcttcggaagcgatcgtgcctacgatatcaagaatgctggggatggcatgcgagtcctcggacaagatgacgagagcagccgcaagcgcaagaagcctggtgatgtcgatgtctcgttcgacccagatgcgctgggcgatggtatcagcaaggaggagatgcagagacgatatgaggagagcagacgtcaggagggccccggtgcgcagtggggtagggaagagggtcttgatgagatgattgcgaatgaaagtcgtaaacgcatcaaaagagacgaggagaagagggaagagaagaagaagagtaaatataggttttag

SEQ ID NO: 14085 - protein, 598 aa, Muscodor strobelii
  misc_feature: SGI Peptide ID NO. 564634
  misc_feature (162)..(290): Pfam Id: PF04037 Pfam Desc: Domain of function (DUF382)
  misc_feature (298)..(345): Pfam Id: PF04046 Pfam Desc: PSP
  misc_feature (1)..(595): NCBI GI: 256729217 Blast Desc: NECHADRAFT_47891 [Nectria haematococca mpVI 77-13-4]
  misc_feature (1)..(598): NCBI GI: 46116956 Blast Desc: FG04320.1 [Gibberella zeae PH-1]
  misc_feature (3)..(598): NCBI GI: 156050403 Blast Desc: SS1G_07788 [Sclerotinia sclerotiorum 1980] gi|154692189|gb|EDN91927.1| SS1G_07788 [Sclerotinia sclerotiorum 1980]
  misc_feature (6)..(598): NCBI GI: 145608360 Blast Desc: MGG_03182 [Magnaporthe grisea 70-15] gi|145015836|gb|EDK00326.1| MGG_03182 [Magnaporthe grisea 70-15]
  misc_feature (6)..(577): NCBI GI: 116204735 Blast Desc: CHGG_10251 [Chaetomium globosum CBS 148.51] gi|88176379|gb|EAQ83847.1| CHGG_10251 [Chaetomium globosum CBS 148.51]
  misc_feature (33)..(588): NCBI GI: 226284543 Blast Desc: splicing factor 3b [Paracoccidioides brasiliensis Pb01]
  misc_feature (2)..(591): NCBI GI: 119182642 Blast Desc: CIMG_06339 [Coccidioides immitis RS] gi|240109345|gb|EER27514.1| PSP family protein [Coccidioides posadasii C735 delta SOWgp]
  misc_feature (33)..(588): NCBI GI: 225678616 Blast Desc: spliceosome associated protein [Paracoccidioides brasiliensis Pb03]
  misc_feature (33)..(588): NCBI GI: 226295029 Blast Desc: splicing factor 3b [Paracoccidioides brasiliensis Pb18]
  misc_feature (29)..(591): NCBI GI: 239614957 Blast Desc: splicing factor 3b [Ajellomyces dermatitidis ER-3]
  misc_feature: Useful for introducing or modulating the production of volatile compounds
MAAPKMTKNQKRRAKKKADKLVKADEAPETNNATEAEPSEQDPQPESTEAGANGTADLEVKKNAASEDKIPADGPIAEYDFDAEDPTYTIFKDIFTKFGASDASDDAIAKEANAGNQGELLLNDDDDIPDEDDENQSGANKLSKKKRKMLNKLSIAELKALVKKPEVVEWHDTSSSDPRMLVQIKAQRNVVPVPSHWSLKREYLSSKRGIEKAAFKLPKFIADTGISEMRDAVLEKEAEQSLKQKQRARVAPKMGKLDIDYQKLYDAFFRFQDKPTLTRFGEVYYEGKEYETDLRHLRPGELSDTLKEALSIPPGAPPPWLINQQRFGPPPSYPSLRIPGLNAPIPPGAQWGFNPGCYGKPPVDDYNRPLFGGDIFGIMQPNQAAPPSGEPIERNLWGELQEPEEESEEEEEDDDEEEDEDEDVGTGLQTPSGLETPGGFASSVPTEYGTQTEAIAGEMDLRKTRRGFDTEESSHPRQAYTVLQERQTRAEGFFGSDRAYDIKNAGDGMRVLGQDDESSRKRKKPGDVDVSFDPDALGDGISKEEMQRRYEESRRQEGPGAQWGREEGLDEMIANESRKRIKRDEEKREEKKKSKYRF

SEQ ID NO: 14086 - DNA, 2865 bp, Muscodor strobelii
  misc_feature: SGI EST ID NO. CUFF.33535.1
  misc_feature: Variant of the nucleotide sequence at SEQ ID NO 14084
cggagctagaggcgcgacatcttagatctaataaacttcacttcgacactaacgcaggcaaggctgccatcgctatcacacacgaccagtcacaacacacctccgcattattgaacaccttacttctacatatttcccgcctcacattctttaccatcatcaccttcagtcacagctcatcttcccctacatcccgtcccgcaagggcgcaatcttgccaacatggctgccccaaaaatgaccaagaatcagaagcgtcgcgccaagaagaaggccgacaagctggtcaaggcagatgaagcaccagagaccaataacgcgacggaagccgagccaagcgagcaggatccccagcctgagtcgacggaggcaggcgcaaacggcactgctgatctcgaggtcaagaagaacgccgcatcagaagacaagatccccgccgacggccccatcgctgaatacgacttcgatgccgaagatcccacctataccatcttcaaggacatcttcacaaagtttggcgcatccgacgccagcgacgacgccatcgccaaagaggccaatgctgggaaccagggcgagcttcttctcaacgatgacgacgacatccccgacgaagacgatgaaaatcagtccggcgccaacaaactctccaagaagaagcgcaagatgctcaacaagctctccattgccgagctcaaggctcttgtcaagaagcccgaggtcgtcgagtggcacgacacttcgtcctccgacccccgcatgctcgtacagatcaaggcccagcgcaacgtcgtccccgtcccttcacattggtccctcaagcgcgagtacctctcctcaaagaggggtatcgagaaggccgccttcaaactgcctaaatttattgccgacacgggcatttctgagatgcgcgatgccgttttagagaaggaagcggaacaatctctcaagcagaagcagcgtgcacgcgttgcgcccaagatgggcaagctggacattgactaccagaaattgtacgatgcgttcttccgctttcaggataagccgacactcacaagattcggcgaggtgtattacgaaggcaaagaatacgaaacggatttgcgacacctccgacccggcgagctgagcgacactctcaaggaagctctcagtatacctcctggtgcgcctccaccgtggctgattaatcaacagcgctttggcccaccaccctcctatccctctcttcgcatccccgggcttaacgcccccatacctcccggagcacagtgggggtttaacccaggctgctacggaaagcctcccgtggacgactataatcggccgttgtttggtggtgacattttcggtattatgcaaccgaaccaagccgctcccccgtcaggcgagcccatagagcgcaacctttggggagagctacaagaacctgaagaagaatccgaagaagaggaagaggacgatgacgaggaggaagatgaagatgaggatgtcgggacgggattacagacaccgtccggcctcgagactcctggtggctttgctagtagtgtaccgactgagtacggcacgcagacagaagcaattgccggagaaatggatctccgaaagacccgtcgtggatttgacacggaagagagttcacatcctcgacaagcatatacagtcttgcaagagcggcagacgagggccgagggcttcttcggaagcgatcgtgcctacgatatcaagaatgctggggatggcatgcgagtcctcggacaagatgacgagagcagccgcaagcgcaagaagcctggtgatgtcgatgtctcgttcgacccagatgcgctgggcgatggtatcagcaaggaggagatgcagagacgatatgaggagagcagacgtcaggagggccccggtgcgcagtggggtagggaagagggtcttgatgagatgattgcgaatgaaagtcgtaaacgcatcaaaagagacgaggagaagagggaagagaagaagaagagtaaatataggttttagggtgtatatgatatgggtggtgtaaattgatacgcagtggttgaaatttaatagtgaagggtgaaatacagatagcagagcgttttgcgcaacttggcttgttgtctcaatttgcaagtgacatggatgacgaacgacttgtcattcagattgattttcgttggctgcaagttcactgagctccatgtgtagttgtgtcacggtccacgatgcagttcgatttatagataaccctaatttacacaatataagttgatctcgccggactatcaaattccaaacaatttactatcacttatatacctagagtcgggttgagtcgaaagggcacgtgaagttggcaggtacgaggacgacgcgggcaaagaggaagcccaaaggggatagatagggtgacagcgaagtagcaagacattcaatctacccccggagacgcgacgacctcaaatattcaaaatggaagtcaccttacacccaacagcataagctggctcagtggtctcatcatctagccgtatctaggagactctgggttcgaatccgcggtaaaccaacttctcgttcttcctaattcttttttgttttctcttttctatccttcgtctttttagtccacacggtcagctacctattgtccctctagacatgacatggttttatagctatgtatgggagctcatcgtaccactgagtaattacgacagaattccttctgcctgttgtttctgtgcactctccgtaccctcgataagcgtgtcgatcttcgtcttcgcgaactttcgcgcgggaatgcgattctcgaacaagatgtccagctcggcatatgttcgtccttttgtctcggct

SEQ ID NO: 14087 - DNA, 1761 bp, Muscodor strobelii
  misc_feature: SGI cDNA ID NO. 564635
  misc_feature: Elevated expression when VOC is produced
  misc_feature: Encodes the peptide sequence at SEQ ID NO 14088
atgagtcaatctaaacagcaagacgatggcggagatctcaaacttgagtccacggtgactcgccaagataccggagcgagcattgacaaggaaaaagatctcgaaaccgctggaacaggccatccttcgcactctgcgcatatcgacgaggcgcttgcggcgaaaatcgccgccaatgtggatgactttatgactttggtcaacgaggccaatgaagccaataatcgggagcgtgacatgacgctcatgcaggccttcagagtctaccccaaagcaattggctggtcaatagtgctatcctcatgtcttatcatggagggatacgacacagcagtcgtaggatcatacctagcattcccagcgttcaaagacagattcggtatcccgaccaaaaacggcgacaaacaaatcccatcaagttggcagaatggtatatcaggcgcaacaaacgtcggtgagattatcgggctccagctcgcaggtgttttctccgagaaattcggctaccgaatgacgatcctcgctgccttgatagcagtaactggatttatcttcttccccttcttcgcggactcgctcagcgttttcctggtcggtgaattattccagggaatttcctggggcgtgttccaaactatgaccactgcgtacgctgcagaagtttgtcccgtgccgttgcgccattatttaacggcttatgtgaatctgtgttggattattggacagtttatctcgggtggtgttctttacgctttggagccgaggaaagacgtttggggatataaaatcccgttcgcgttgcagtggatctggccaatccctctagctatcggaacatatttggcgcctgaaagcccctggtggtgtatcagatatggtcataaagagagagcgatggagagcctgaaaagactggccaggagctccggctttacacagagggatgcagaccgggctctcgccttgatgatatacaccgaccaaatggaaaagcaatccgagactggcacaaaatacaaagactgcttccggggcatagacctgcgtcgaacagaaatcgtgacgatgacatggctcgctcaaacgctatcgggaaccgcactcggtggactcgccacgtttttctaccaaaatgccggaatctcggatagcgactctttcaaattgggctggggaaccaccgccatcggagccgttggtacgatcacgagttggttcgtcctaaacaaaatcggacgaaggacattgatgctaagcggcatgataaccatcttcatattcctgatcataatcggcttcctagggatccccgcccatccaacgacagcgcacgcctgggccgcaggaacactcgtcctcctcctctcagcaacagcgaatttctccatcggtcccgtggtttacaccatcgtctctgaagtgccctctactagattaagggcaaagagtattatcctcgcgagaaatttctataacgcgattaacatcgcctttgtgaatattgttgcatatcgacagctcagcgccttggattggaattggggggccaagagtgggtttttctgggcgggcattaatgctgctgttactacttatctgttttttagacttcccgagacaaaaggacgaacatatgccgagctggacatcttgttcgagaatcgcattcccgcgcgaaagttcgcgaagacgaagatcgacacgcttatcgagggtacggagagtgcacagaaacaacaggcagaaggaattctgtcgtaa

SEQ ID NO: 14088 - protein, 586 aa, Muscodor strobelii
  misc_feature: SGI Peptide ID NO. 564635
  misc_feature (99)..(499): Pfam Id: PF07690 Pfam Desc: Major Facilitator Superfamily
  misc_feature (95)..(552): Pfam Id: PF00083 Pfam Desc: Sugar (and other) transporter
  misc_feature (151)..(246): Pfam Id: PF07690 Pfam Desc: Major Facilitator Superfamily
  misc_feature (46)..(584): NCBI GI: 71023779 Blast Desc: UM05972.1 [Ustilago maydis 521] gi|46101469|gb|EAK86702.1| UM05972.1 [Ustilago maydis 521]
  misc_feature (43)..(580): NCBI GI: 212544862 Blast Desc: MFS maltose permease MalP [Penicillium marneffei ATCC 18224] gi|210065554|gb|EEA19648.1| MFS maltose permease MalP [Penicillium marneffei ATCC 18224]
  misc_feature (40)..(586): NCBI GI: 242789692 Blast Desc: MFS maltose permease MalP [Talaromyces stipitatus ATCC 10500] gi|218718003|gb|EED17423.1| MFS maltose permease MalP [Talaromyces stipitatus ATCC 10500]
  misc_feature (23)..(572): NCBI GI: 70986765 Blast Desc: MFS maltose permease MalP [Aspergillus fumigatus Af293] gi|66846501|gb|EAL86833.1| MFS maltose permease MalP [Aspergillus fumigatus Af293]
  misc_feature (43)..(567): NCBI GI: 189205391 Blast Desc: maltose permease MAL61 [Pyrenophora tritici-repentis Pt-1C-BFP] gi|187975123|gb|EDU41749.1| maltose permease MAL61 [Pyrenophora tritici-repentis Pt-1C-BFP]
  misc_feature (26)..(565): NCBI GI: 119483124 Blast Desc: MFS alpha-glucoside transporter, [Neosartorya fischeri NRRL 181] gi|119409745|gb|EAW19693.1| MFS alpha-glucoside transporter, [Neosartorya fischeri NRRL 181]
  misc_feature (66)..(578): NCBI GI: 242806034 Blast Desc: sugar transporter, [Talaromyces stipitatus ATCC 10500] gi|218715283|gb|EED14705.1| sugar transporter, [Talaromyces stipitatus ATCC 10500]
  misc_feature (59)..(580): NCBI GI: 242127784 Blast Desc: MRT [Metarhizium anisopliae]
  misc_feature (73)..(574): NCBI GI: 256727798 Blast Desc: [Nectria haematococca mpVI 77-13-4]
  misc_feature (44)..(565): NCBI GI: 169781440 Blast Desc: [Aspergillus oryzae RIB40] gi|238501296|ref|XP_002381882.1| MFS maltose permease MalP [Aspergillus flavus NRRL3357] gi|14278920|dbj|BAB59002.1| maltose
  misc_feature: Useful for introducing or modulating the production of volatile compounds
MSQSKQQDDGGDLKLESTVTRQDTGASIDKEKDLETAGTGHPSHSAHIDEALAAKIAANVDDFMTLVNEANEANNRERDMTLMQAFRVYPKAIGWSIVLSSCLIMEGYDTAVVGSYLAFPAFKDRFGIPTKNGDKQIPSSWQNGISGATNVGEIIGLQLAGVFSEKFGYRMTILAALIAVTGFIFFPFFADSLSVFLVGELFQGISWGVFQTMTTAYAAEVCPVPLRHYLTAYVNLCWIIGQFISGGVLYALEPRKDVWGYKIPFALQWIWPIPLAIGTYLAPESPWWCIRYGHKERAMESLKRLARSSGFTQRDADRALALMIYTDQMEKQSETGTKYKDCFRGIDLRRTEIVTMTWLAQTLSGTALGGLATFFYQNAGISDSDSFKLGWGTTAIGAVGTITSWFVLNKIGRRTLMLSGMITIFIFLIIIGFLGIPAHPTTAHAWAAGTLVLLLSATANFSIGPVVYTIVSEVPSTRLRAKSIILARNFYNAINIAFVNIVAYRQLSALDWNWGAKSGFFWAGINAAVTTYLFFRLPETKGRTYAELDILFENRIPARKFAKTKIDTLIEGTESAQKQQAEGILS

SEQ ID NO: 14089 - DNA, 5028 bp, Muscodor strobelii
  misc_feature: SGI EST ID NO. CUFF.33536.2
  misc_feature: Variant of the nucleotide sequence at SEQ ID NO 14087
taagaaattcggatgtgactggccggattggttggtaccaagcgttcggttacagcaggtgagctagcaaaattaaaaagatctgacgggtcaatgctttgggcagatagatggaaagcgagtcttacatcttacatgtgtatgtgtgcccctagccatcaaccccgcacccgagtcaacaagggcagatagacttacatatgtatgaataaattgtgccaatcggacgagtctagatgctctaccgttgcactggttgatagaatggggtaaattagacagccacggaaggggacattttctggggtataagatctagtgtgtagctcttttggctacatgatctacctctccgcattggcttattctcacgacaacattgttgtcgtttctgtctttactttcatcagtcgatattttatcgcaaacgggcgtggctagccctccttcacttatggttcattgacttctctgataagtctgagatacagctggaatcatgagtcaatctaaacagcaagacgatggcggagatctcaaacttgagtccacggtgactcgccaagataccggagcgagcattgacaaggaaaaagatctcgaaaccgctggaacaggccatccttcgcactctgcgcatatcgacgaggcgcttgcggcgaaaatcgccgccaatgtggatgactttatgactttggtcaacgaggccaatgaagccaataatcgggagcgtgacatgacgctcatgcaggccttcagagtctaccccaaagcaattggctggtcaatagtgctatcctcatgtcttatcatggagggatacgacacagcagtcgtaggatcatacctagcattcccagcgttcaaagacagattcggtatcccgaccaaaaacggcgacaaacaaatcccatcaagttggcagaatggtatatcaggcgcaacaaacgtcggtgagattatcgggctccagctcgcaggtgttttctccgagaaattcggctaccgaatgacgatcctcgctgccttgatagcagtaactggatttatcttcttccccttcttcgcggactcgctcagcgttttcctggtcggtgaattattccagggaatttcctggggcgtgttccaaactatgaccactgcgtacgctgcagaagtttgtcccgtgccgttgcgccattatttaacggcttatgtgaatctgtgttggattattggacagtttatctcgggtggtgttctttacgctttggagccgaggaaagacgtttggggatataaaatcccgttcgcgttgcagtggatctggccaatccctctagctatcggaacatatttggcgcctgaaagcccctggtggtgtatcagatatggtcataaagagagagcgatggagagcctgaaaagactggccaggagctccggctttacacagagggatgcagaccgggctctcgccttgatgatatacaccgaccaaatggaaaagcaatccgagactggcacaaaatacaaagactgcttccggggcatagacctgcgtcgaacagaaatcgtgacgatgacatggctcgctcaaacgctatcgggaaccgcactcggtggactcgccacgtttttctaccaaaatgccggaatctcggatagcgactctttcaaattgggctggggaaccaccgccatcggagccgttggtacgatcacgagttggttcgtcctaaacaaaatcggacgaaggacattgatgctaagcggcatgataaccatcttcatattcctgatcataatcggcttcctagggatccccgcccatccaacgacagcgcacgcctgggccgcaggaacactcgtcctcctcctctcagcaacagcgaatttctccatcggtcccgtggtttacaccatcgtctctgaagtgccctctactagattaagggcaaagagtattatcctcgcgagaaatttctataacgcgattaacatcgcctttgtgaatattgttgcatatcgacagctcagcgccttggattggaattggggggccaagagtgggtttttctgggcgggcattaatgctgctgttactacttatctgttttttagacttcccgagacaaaaggacgaacatatgccgagctggacatcttgttcgagaatcgcattcccgcgcgaaagttcgcgaagacgaagatcgacacgcttatcgagggtacggagagtgcacagaaacaacaggcagaaggaattctgtcgtaattactcagtggtacgatgagctcccatacatagctataaaaccatgtcatgtctagagggacaataggtagctgaccgtgtggactaaaaagacgaaggatagaaaagagaaaacaaaaaagaattaggaagaacgagaagttggtttaccgcggattcgaacccagagtctcctagatacggctagatgatgagaccactgagccagcttatgctgttgggtgtaaggtgacttccattttgaatatttgaggtcgtcgcgtctccgggggtagattgaatgtcttgctacttcgctgtcaccctatctatcccctttgggcttcctctttgcccgcgtcgtcctcgtacctgccaacttcacgtgccctttcgactcaacccgactctaggtatataagtgatagtaaattgtttggaatttgatagtccggcgagatcaacttatattgtgtaaattagggttatctataaatcgaactgcatcgtggaccgtgacacaactacacatggagctcagtgaacttgcagccaacgaaaatcaatctgaatgacaagtcgttcgtcatccatgtcacttgcaaattgagacaacaagccaagttgcgcaaaacgctctgctatctgtatttcacccttcactattaaatttcaaccactgcgtatcaatttacaccacccatatcatatacaccctaaaacctatatttactcttcttcttctcttccctcttctcctcgtctcttttgatgcgtttacgactttcattcgcaatcatctcatcaagaccctcttccctaccccactgcgcaccggggccctcctgacgtctgctctcctcatatcgtctctgcatctcctccttgctgataccatcgcccagcgcatctgggtcgaacgagacatcgacatcaccaggcttcttgcgcttgcggctgctctcgtcatcttgtccgaggactcgcatgccatccccagcattcttgatatcgtaggcacgatcgcttccgaagaagccctcggccctcgtctgccgctcttgcaagactgtatatgcttgtcgaggatgtgaactctcttccgtgtcaaatccacgacgggtctttcggagatccatttctccggcaattgcttctgtctgcgtgccgtactcagtcggtacactactagcaaagccaccaggagtctcgaggccggacggtgtctgtaatcccgtcccgacatcctcatcttcatcttcctcctcgtcatcgtcctcttcctcttcttcggattcttcttcaggttcttgtagctctccccaaaggttgcgctctatgggctcgcctgacgggggagcggcttggttcggttgcataataccgaaaatgtcaccaccaaacaacggccgattatagtcgtccacgggaggctttccgtagcagcctgggttaaacccccactgtgctccgggaggtatgggggcgttaagcccggggatgcgaagagagggataggagggtggtgggccaaagcgctgttgattaatcagccacggtggaggcgcaccaggaggtatactgagagcttccttgagagtgtcgctcagctcgccgggtcggaggtgtcgcaaatccgtttcgtattctttgccttcgtaatacacctcgccgaatcttgtgagtgtcggcttatcctgaaagcggaagaacgcatcgtacaatttctggtagtcaatgtccagcttgcccatcttgggcgcaacgcgtgcacgctgcttctgcttgagagattgttccgcttccttctctaaaacggcatcgcgcatctcagaaatgcccgtgtcggcaataaatttaggcagtttgaaggcggccttctcgatacccctctttgaggagaggtactcgcgcttgagggaccaatgtgaagggacggggacgacgttgcgctgggccttgatctgtacgagcatgcgggggtcggaggacgaagtgtcgtgccactcgacgacctcgggcttcttgacaagagccttgagctcggcaatggagagcttgttgagcatcttgcgcttcttcttggagagtttgttggcgccggactgattttcatcgtcttcgtcggggatgtcgtcgtcatcgttgagaagaagctcgccctggttcccagcattggcctctttggcgatggcgtcgtcgctggcgtcggatgcgccaaactttgtgaagatgtccttgaagatggtataggtgggatcttcggcatcgaagtcgtattcagcgatggggccgtcggcggggatcttgtcttctgatgcggcgttcttcttgacctcgagatcagcagtgccgtttgcgcctgcctccgtcgactcaggctggggatcctgctcgcttggctcggcttccgtcgcgttattggtctctggtgcttcctgtatatggttaatatcaagatggatatgaatgcggatgccgatgctgctcacatctgccttgaccagcttgtcggccttcttcttggcgcgacgcttctgattcttggtcatttttggggcagccatgttggcaagattgcgcccttgcgggacgggatgtaggggaagatgagctgtgactgaaggtgatgatggtaaagaatgtgaggcgggaaatatgtagaagtaaggtgttcaataatgcggaggtgtgttgtgactggtcgtgtgtgatagcgatggcagccttgcctgcgttagtgtcgaagtgaagtttattagatctaagatgtcgcgcctctagctccg

SEQ ID NO: 14090 - DNA, 1251 bp, Muscodor strobelii
  misc_feature: SGI cDNA ID NO. 564636
  misc_feature: Elevated expression when VOC is produced
  misc_feature: Encodes the peptide sequence at SEQ ID NO 14091
atggaagtggtcggcagtgtggctgccattatgcagctcactgtatggcttgttgacaccacgaccgacttgcgtcactacattaactcgatccgcaaagccccagaagaagtagagttcttcatgctcgagacgagcaactttgttggtcttctcaatttcttctctagaaccacaaagcactatctgcaaacagcagaccccgaacgtaagaaggagaccgaatcattggtatggaacattaagcgtcagtgttcttacgtcgcggatggcattgaaggccttacatctcgctttgaggatctagcccgcggagatatacaccctatacagaagcttttgaacagcattaaattcatatttgacaaacctgatgtgagcaagctgaagcttgatctccagtccgccctgctcctcgtgcaatccttgactgtacagttctcgctcgaactggcgctggttgaaaaggataaatctagtttggaaatacaaatgctcaggaagcagctcagcaacctcaagccgatgactcagagagtaacgcaaaaactcaggatcctccagcaaaaatatgacaatctctacgataaaaaaaccgtcaacgagacgattgaaatgtctcgtcaaatcaccaatcgcgcaaaaaaggtcgtccagtcaattcctcccccaacggctatcgcacgagaacaatctaccaatgcctctgtttctttgaaacgtaaggcatcggtagacacgcatgcgactcgacccctggactcgagatatggcaatatctcaagagacatcgacaccgaacggagaatgagcagttcagaagggataaatactaaaaacgctgtcaataatacagccaaccgaggacaacggtgcactctcccacaatatagtcccaacggacgtgcttgggctttagatctatcagatccacagcatccacgaatatatcctacaaaagacccaggagagagcgacaacgagacgaacgacgacaaggaattggaagaggtacaaccagaaacatctcaaagatacgccactgagattcatcgccctcaacgtgaagccgatatttctagctctgttcacgagcgaaatcgtcatccttggggtccttctcggccaggcagcatggttgacgcttcaacaatctcgaattccgagccgccaatggaagttaagcctcgtgctaatgctcagaatgcggctgtcaatcacaatgtggctgtcaatcagcgcttcatttga

SEQ ID NO: 14091 - protein, 416 aa, Muscodor strobelii
  misc_feature: SGI Peptide ID NO. 564636
  misc_feature: Useful for introducing or modulating the production of volatile compounds
MEVVGSVAAIMQLTVWLVDTTTDLRHYINSIRKAPEEVEFFMLETSNFVGLLNFFSRTTKHYLQTADPERKKETESLVWNIKRQCSYVADGIEGLTSRFEDLARGDIHPIQKLLNSIKFIFDKPDVSKLKLDLQSALLLVQSLTVQFSLELALVEKDKSSLEIQMLRKQLSNLKPMTQRVTQKLRILQQKYDNLYDKKTVNETIEMSRQITNRAKKVVQSIPPPTAIAREQSTNASVSLKRKASVDTHATRPLDSRYGNISRDIDTERRMSSSEGINTKNAVNNTANRGQRCTLPQYSPNGRAWALDLSDPQHPRIYPTKDPGESDNETNDDKELEEVQPETSQRYATEIHRPQREADISSSVHERNRHPWGPSRPGSMVDASTISNSEPPMEVKPRANAQNAAVNHNVAVNQRFI

SEQ ID NO: 14092 - DNA, 2541 bp, Muscodor strobelii
  misc_feature: SGI EST ID NO. CUFF.33515.0
  misc_feature: Variant of the nucleotide sequence at SEQ ID NO 14090
acaccacgaccgacttgcgtcactacattaactcgatccgcaaagccccagaagaagtagagttcttcatgctcgagacgagcaactttgttggtcttctcaatttcttctctagaaccacaaagcactatctgcaaacagcagaccccgaacgtaagaaggagaccgaatcattggtatggaacattaagcgtcagtgttcttacgtcgcggatggcattgaaggccttacatctcgctttgaggatctagcccgcggagatatacaccctatacagaagcttttgaacagcattaaattcatatttgacaaacctgatgtgagcaagctgaagcttgatctccagtccgccctgctcctcgtgcaatccttgactgtacagttctcgctcgaactggcgctggttgaaaaggataaatctagtttggaaatacaaatgctcaggaagcagctcagcaacctcaagccgatgactcagagagtaacgcaaaaactcaggatcctccagcaaaaatatgacaatctctacgataaaaaaaccgtcaacgagacgattgaaatgtctcgtcaaatcaccaatcgcgcaaaaaaggtcgtccagtcaattcctcccccaacggctatcgcacgagaacaatctaccaatgcctctgtttctttgaaacgtaaggcatcggtagacacgcatgcgactcgacccctggactcgagatatggcaatatctcaagagacatcgacaccgaacggagaatgagcagttcagaagggataaatactaaaaacgctgtcaataatacagccaaccgaggacaacggtgcactctcccacaatatagtcccaacggacgtgcttgggctttagatctatcagatccacagcatccacgaatatatcctacaaaagacccaggagagagcgacaacgagacgaacgacgacaaggaattggaagaggtacaaccagaaacatctcaaagatacgccactgagattcatcgccctcaacgtgaagccgatatttctagctctgttcacgagcgaaatcgtcatccttggggtccttctcggccaggcagcatggttgacgcttcaacaatctcgaattccgagccgccaatggaagttaagcctcgtgctgtaagcgagcgcggatatctaagcaaacctgatcaaagaggcactgatatcgaaactacacctggtcgtcccagaacaataccgtgcatatgtgtgacttctgacggaatgggacattgttctgcatcagaatgctcagaatgcggctgtcaatcacaatgtggctgtcaatcagcgcttcatttgaataattcaggttccgaagaagatcataacgcggcctcatactcggaagtggacgcctctagtccctatgtgcctacgccaccttttgatgggaacgacaagaaaaacttcgataagaagcgacgtcgtccccgccgaccaaggccaaaaaccaccgaatgaggaaacgttcgatattgagtaatagtaaaacgcgtaggtggttcatgacgtaaagggctgtaggattatcatgttgatgtatgcgtttagattgaataatttattagcaaatgtcttcgcacatgatgctgatatagtaccgtttcccgtgatgagatggctcggaggttagtgagtaagcaggtgaattttgctccaaactttggcaccgaaaagttgacatactcgatttgtcctcttcatcaacacgaaaccttcttaaatttccgataaaactaaatgagctttgtattggttccctttttcggtctttgaacttgctgacatctacgccatcgccaagtagatgcaatagtcatatatcgacttttctgtctaccaattaggcatataagaggtggaatagttacccccgcattcgcttcatgacgagtcctgtcaacaatacatcaattaccccaagctagacgagaggccgagttacgcccgtattatctgatgcatattatattcaacatgggttgaacatcagctatgataggatcgtgcagccgccctaccttttgcaccgttgccaatggtcgcgttatagcactacgcgtgtaggaaaccggtctcttcatcgagtaagaacgacaggtcacgcaaatttgcgaggataatcgcagatggcaccgggaatgtgcttttagctgaaaccgggttttggtaccgtactgcaactcaaggtcgtgaatgatacaccgcaacttgtgacctttcgatataggggacgtgcgcatattctcttgggataagtctagcaattactttgaggttgcctggttggacattatgcccgacaaactgtatgtcttagacgaaaatagcgacattgttgaacataatcccgacaatacggatgatacggctgttaaaacgggcgttgacaggtagtgctaattccgcgtaattgatcgcgcaactgtgccgtcgactcagtctgataataaactgggttgcgtgattgcgtcgtcataatcactccgaaaaaagcaacataagacgaccaagc

SEQ ID NO: 14093 - DNA, 1050 bp, Muscodor strobelii
  misc_feature: SGI cDNA ID NO. 564637
  misc_feature: Reduced expression when VOC is produced
  misc_feature: Encodes the peptide sequence at SEQ ID NO 14094
atggcaaccgacttaccgattgtcctatatcattacgacgtctccccttacgctcgtcggctggtctggtatttgaatctacggaagattcaatattcagaatgtatccaaccccggatcatgccacggcccgacgtggccctgctaggtgtctcttaccgacgtatccccctcatgagcatggggcgtgatgtctacgtcgacacacggctcatactacagaaactcgaagctctcttcccaccgagcgcagagcacccaggtatcagcagtgcacacgccggtctcggcgccgaaggcacagctctggagcagttgctctcatcacgcgtaaccgacggcggcatattcctatgcggcaccttatgtctaccgccagatattttcggagacccaacgtttcagaaggatcgcgccgcattgatgggtatcgatctagacaaacccggatctatctcgccatttgcgcccgagctgcgcgagaagcagcgacctgaggctttagctactatgcgggcgtggattctctggctcgaagagggtgtcttatctgatggaagaccgtggatctcaaatgcggggaatatgggtccgtcactagctgatatcgaagcggtatgggtgttgcattggattgctgctgccctacctcctgaagtccttggtcctgagtctgcgccaaaggtcaattcgtggcttaagaggtttagccgagcagtcaaggacgctggggagaagaaaccggaggtccaggcgctgaagggcgaggaggctgcaaccgtgatcttcaacgcgaagtttgctgagcccgagggcgatgtactgggaagcgattcgtttgttgctgccgagggcttacagaagggtgcggccgtcagattatggccggcggattacggttctgggcataaggacactggacgtcttgtttcggtcgataagtctgaatatgtgatcgagaagaccggaacgtcgggtaccatgaggttgcacgctccgaggcacggatataagctggcaaagggaagagacgcgactccgaaaatataa

SEQ ID NO: 14094 - protein, 349 aa, Muscodor strobelii
  misc_feature: SGI Peptide ID NO. 564637
  misc_feature (7)..(345): NCBI GI: 256731777 Blast Desc: NECHADRAFT_40488 [Nectria haematococca mpVI 77-13-4]
  misc_feature (2)..(339): NCBI GI: 145612285 Blast Desc: MGG_12319 [Magnaporthe grisea 70-15] gi|145019477|gb|EDK03705.1| MGG_12319 [Magnaporthe grisea 70-15]
  misc_feature (6)..(339): NCBI GI: 85102972 Blast Desc: NCU01347 [Neurospora crassa OR74A] gi|12718414|emb|CAC28792.1| conserved [Neurospora crassa] gi|28922978|gb|EAA32197.1| [Neurospora crassa OR74A]
  misc_feature (1)..(340): NCBI GI: 67526059 Blast Desc: AN3487.2 [Aspergillus nidulans FGSC A4] gi|40739858|gb|EAA59048.1| AN3487.2 [Aspergillus nidulans FGSC A4] gi|259482001|tpe|CBF76054.1| TPA: conserved [Aspergillus FGSC
  misc_feature (1)..(339): NCBI GI: 156055126 Blast Desc: SS1G_04914 [Sclerotinia sclerotiorum 1980] gi|154702699|gb|EDO02438.1| SS1G_04914 [Sclerotinia sclerotiorum 1980]
  misc_feature (1)..(341): NCBI GI: 240109654 Blast Desc: CPC735_031590 [Coccidioides posadasii C735 delta SOWgp]
  misc_feature (35)..(344): NCBI GI: 154285654 Blast Desc: [Ajellomyces capsulatus NAm1] gi|150407263|gb|EDN02804.1| [Ajellomyces capsulatus NAm1]
  misc_feature (7)..(339): NCBI GI: 169623323 Blast Desc: SNOG_14899 [Phaeosphaeria nodorum SN15] gi|111056631|gb|EAT77751.1| SNOG_14899 [Phaeosphaeria nodorum SN15]
  misc_feature (41)..(344): NCBI GI: 225554488 Blast Desc: conserved [Ajellomyces capsulatus G186AR] gi|240277794|gb|EER41302.1| conserved [Ajellomyces capsulatus H143]
  misc_feature (3)..(341): NCBI GI: 169594844 Blast Desc: SNOG_00151 [Phaeosphaeria nodorum SN15] gi|111070526|gb|EAT91646.1| SNOG_00151 [Phaeosphaeria nodorum SN15]
  misc_feature: Useful for introducing or modulating the production of volatile compounds
MATDLPIVLYHYDVSPYARRLVWYLNLRKIQYSECIQPRIMPRPDVALLGVSYRRIPLMSMGRDVYVDTRLILQKLEALFPPSAEHPGISSAHAGLGAEGTALEQLLSSRVTDGGIFLCGTLCLPPDIFGDPTFQKDRAALMGIDLDKPGSISPFAPELREKQRPEALATMRAWILWLEEGVLSDGRPWISNAGNMGPSLADIEAVWVLHWIAAALPPEVLGPESAPKVNSWLKRFSRAVKDAGEKKPEVQALKGEEAATVIFNAKFAEPEGDVLGSDSFVAAEGLQKGAAVRLWPADYGSGHKDTGRLVSVDKSEYVIEKTGTSGTMRLHAPRHGYKLAKGRDATPKI

SEQ ID NO: 14095 - DNA, 2933 bp, Muscodor strobelii
  misc_feature: SGI EST ID NO. CUFF.33520.0
  misc_feature: Variant of the nucleotide sequence at SEQ ID NO 14093
cgacgcgattacactgagccgaggccactgcatgatatattcagatgacaaacaatcaaacttcacattataataccattattttcattcacaagtattctcaacattgctcattccgaaactgtcgatctattcagaggctaaagagaggaattataattgaacacgatggcaaccgacttaccgattgtcctatatcattacgacgtctccccttacgctcgtcggctggtctggtatttgaatctacggaagattcaatattcagaatgtatccaaccccggatcatgccacggcccgacgtggccctgctaggtgtctcttaccgacgtatccccctcatgagcatggggcgtgatgtctacgtcgacacacggctcatactacagaaactcgaagctctcttcccaccgagcgcagagcacccaggtatcagcagtgcacacgccggtctcggcgccgaaggcacagctctggagcagttgctctcatcacgcgtaaccgacggcggcatattcctatgcggcaccttatgtctaccgccagatattttcggagacccaacgtttcagaaggatcgcgccgcattgatgggtatcgatctagacaaacccggatctatctcgccatttgcgcccgagctgcgcgagaagcagcgacctgaggctttagctactatgcgggcgtggattctctggctcgaagagggtgtcttatctgatggaagaccgtggatctcaaatgcggggaatatgggtccgtcactagctgatatcgaagcggtatgggtgttgcattggattgctgctgccctacctcctgaagtccttggtcctgagtctgcgccaaaggtcaattcgtggcttaagaggtttagccgagcagtcaaggacgctggggagaagaaaccggaggtccaggcgctgaagggcgaggaggctgcaaccgtgatcttcaacgcgaagtttgctgagcccgagggcgatgtactgggaagcgattcgtttgttgctgccgagggcttacagaagggtgcggccgtcagattatggccggcggattacggttctgggcataaggacactggacgtcttgtttcggtcgataagtctgaatatgtgatcgagaagaccggaacgtcgggtaccatgaggttgcacgctccgaggcacggatataagctggcaaagggaagagacgcgactccgaaaatataaagccttgtcaaagcagtgacatttggtataacattaagtttacgtgtttaaagagttaacaagtattatatttactcttgccgtttgtacatggagctttgcacttgcagtataccaaatttcccaatccattcgatataacatggaagatcacttcgtcctggtttgatgggccaattggtccactatcacttcgaaacttatcattattcagtcctgacggaaatgaagaaagattgtgaaattacaaagcctagatattgcatggtaatgattatagtgtataatactgaggtccttgtctttttttttttttttttttttttttgtatgctgagcataccattgcgcacgcgaggactgctatgaaatgttcgagcctaatgtctcgtgcactgcaggtcgagtgattatatcattcctatcctctcacgaaattacctcttcatattgactgggaccataattatacgtgaggatagctattgccaaatagtattctctcaagtactagttccctagtgtctttgtccttatccgagatgcatgcgtatttgaccctcctctcatatacagttgtggtttacacagttcatgcaatatgtgtgatacagtgacagaatctacatttctctcgagtactagttgcacacgaagctttgagatgcgtgtgtgatttcaattttataattcagccttactagtcttgtcgaagatcgattggtcaggttatttggcaagcgattacttgcctgccgccacttcctgaaccctcaaatgtccttcggttgcacgggtccaattttacagggcaagtcccgcgatgacgacaacggctgatattgactgcatgtagaaacaataggtaccgaaccatacttaccggccagcatattgccttcgtcttgagacgaaatactgcagaaggggcgagtgtggttagacgaaattgaacatactttttgcatgcatgaacatgactgtaatacgtgagaaagaaatgatctgtcaggatttctctgtcaacgtcgagccaccatttctcagaagccgtgggagaattctaattgggtttggtagctcggaggcactcagcggcggggcattagccaggacccgtgcgagattagatccgaatgggagaaaagtacaggcgcaggtttgagccgaggtggaatgaaaaacactaggagaaaagagagtctagacggcacaaattacttaacatttcgtgctcaaatgactttatttgatgactagaaaagaacttagggattgagaggagggcaaaagagttgcagagcaaaaattgtagagacacgacacccgacacgtaccttcgggtatgccgttaatttcgacgaggtcctcgcttgcggactcgaatgcaaggcatgcgtcatcatgaagcaatggcgtgttgtggcgcgccatggtacggaacgtggggatgcacgattgtagatattatcaacgtgtctgcagagtcgtcacattatggtcaacacggttgaggtgaccgcctttctcaacttcactgcttcgcaagagcccttttttgaaatcgaataatgaaacggcgaaagaaagtctgattataaatacgatgctctggaccgttgtcgaccagatgatcggctgtgggcatgtgaagcccggacgcctcaaacgagctgacaagatattcctacgaaaatagacctctcagaatccag

SEQ ID NO: 14096 - DNA, 1509 bp, Muscodor strobelii
  misc_feature: SGI cDNA ID NO. 564638
  misc_feature: Reduced expression when VOC is produced
  misc_feature: Encodes the peptide sequence at SEQ ID NO 14097
atggcacccgccgccgagtccaaaccgtcagacaccgcatcgtcagacaccaacggcgacagcaagattcccgaggtcaaagccgaaggcaactccaccaacgagcccgggagaccactagcaccaccgcccaaacctggcgaggcaggcgactacttcacgagccagttgagcctcgagcccaaccccttcgagcagtccttcggaacgggaagcggcacggtcgagacgccaggcggaaccaagctgcccagcgtggctgccttaacgtcaccttcgtcgttgctgccggggacgggcacgacaccattcaactggggaggcgggtctcttaggacgggaccgctgagtccagcaatgctttccggcccggccaccgactactttggcgacacttcacacaccttgcgctccggcttcacccccaatgagagctccctccgcacaggattgacacccggcggcagtggttctatgttcccggccccaagtcccaactcgcaggctatcttcgcatctctggctaataacggcggcgcgacccccagcactctcgacttccaccggacggctatgagcgccgcggctagcaaagcagcaggccgcgataagtctcagcccaacggatctgctacctcccaggcacaagaaaacggcgttgctatcaagagcgaagccaagccaacctctggtgcctttgatccccacgacaacgacgctgcgaatggtctcttcatgctggctcagggcgcacagcaaaggaacggaccccagcagacacaatacccggttggtggcaaccagcccgtgcatgcacaccccgcacccgctcccgcgaatcagaccaacgcttctccgagaatgaatggtaacggtgcacatcccccacccaatgctcgcagtgttagtgaagctatgagccacggatcagaagagagtgaggcccccaagcctaacacaagggcaaagggcaaacgcggtggtgcggctgctactaatgggcggcggaaagctgatgaggctccggccaagcagcccgctaacaagaaggccaagactgcaccgtccacacacagtcaggaggaaggcacgtctgatgaggaagaggatgacgaccacaaggtcaaccctgacggtacgaagactaagatgactgatgaagagaagcggaagaacttcctcgagaggaatagagtggcggcactgaagtgtcgacagcgcaagaagcagtggctggcaaatctccagaacaaggtggagatgttcagcagcgagaacgatgccttgacggcacaaatctcgcagcttcgggaagaagtggtcaacctcaagaccctcctccttgcacacaaggactgccccgtaacacaacagcagggcatccacggtgcgtacatgcagcaggccatggagtcctacaaccccagcatcaacccttacggcatggctgcacccattcccaaccaaccggtcatggcaggacagggggtacagcgccgcttctcatag

SEQ ID NO: 14097 - protein, 502 aa, Muscodor strobelii
  misc_feature: SGI Peptide ID NO. 564638
  misc_feature (385)..(448): Pfam Id: PF00170 Pfam Desc: bZIP transcription factor
  misc_feature (385)..(439): Pfam Id: PF07716 Pfam Desc: Basic region leucine zipper
  misc_feature (394)..(448): Pfam Id: PF00170 Pfam Desc: bZIP transcription factor
  misc_feature (51)..(502): NCBI GI: 46137253 Blast Desc: FG10142.1 [Gibberella zeae PH-1]
  misc_feature (2)..(502): NCBI GI: 27525869 Blast Desc: bZip transcription factor [Claviceps purpurea]
  misc_feature (35)..(502): NCBI GI: 171691899 Blast Desc: protein product [Podospora anserina] gi|170945898|emb|CAP72699.1| protein product [Podospora anserina]
  misc_feature (51)..(502): NCBI GI: 16944343 Blast Desc: related to transcription factor atf1+ [Neurospora crassa]
  misc_feature (51)..(502): NCBI GI: 164426296 Blast Desc: NCU01345 [Neurospora crassa OR74A] gi|157071277|gb|EAA32195.2| NCU01345 [Neurospora crassa OR74A]
  misc_feature (51)..(502): NCBI GI: 116180008 Blast Desc: CHGG_00632 [Chaetomium globosum CBS 148.51] gi|88184929|gb|EAQ92397.1| CHGG_00632 [Chaetomium globosum CBS 148.51]
  misc_feature (51)..(502): NCBI GI: 39946184 Blast Desc: MGG_08212 [Magnaporthe grisea 70-15] gi|145019475|gb|EDK03703.1| MGG_08212 [Magnaporthe grisea 70-15]
  misc_feature (51)..(494): NCBI GI: 261351845 Blast Desc: AtfA [Verticillium albo-atrum VaMs.102]
  misc_feature (35)..(489): NCBI GI: 146323428 Blast Desc: bZIP transcription factor (AtfA) [Aspergillus fumigatus Af293] gi|129558295|gb|EAL92448.2| bZIP transcription factor (AtfA), [Aspergillus fumigatus Af293]
  misc_feature (19)..(489): NCBI GI: 119491671 Blast Desc: bZIP transcription factor (AtfA), [Neosartorya fischeri NRRL 181] gi|119411490|gb|EAW21433.1| bZIP transcription factor (AtfA), [Neosartorya fischeri NRRL 181]
  misc_feature: Useful for introducing or modulating the production of volatile compounds
MAPAAESKPSDTASSDTNGDSKIPEVKAEGNSTNEPGRPLAPPPKPGEAGDYFTSQLSLEPNPFEQSFGTGSGTVETPGGTKLPSVAALTSPSSLLPGTGTTPFNWGGGSLRTGPLSPAMLSGPATDYFGDTSHTLRSGFTPNESSLRTGLTPGGSGSMFPAPSPNSQAIFASLANNGGATPSTLDFHRTAMSAAASKAAGRDKSQPNGSATSQAQENGVAIKSEAKPTSGAFDPHDNDAANGLFMLAQGAQQRNGPQQTQYPVGGNQPVHAHPAPAPANQTNASPRMNGNGAHPPPNARSVSEAMSHGSEESEAPKPNTRAKGKRGGAAATNGRRKADEAPAKQPANKKAKTAPSTHSQEEGTSDEEEDDDHKVNPDGTKTKMTDEEKRKNFLERNRVAALKCRQRKKQWLANLQNKVEMFSSENDALTAQISQLREEVVNLKTLLLAHKDCPVTQQQGIHGAYMQQAMESYNPSINPYGMAAPIPNQPVMAGQGVQRRFS

SEQ ID NO: 14098 - DNA, 2969 bp, Muscodor strobelii
  misc_feature: SGI EST ID NO. CUFF.34103.0
  misc_feature: Variant of the nucleotide sequence at SEQ ID NO 14096
gcctgacacgcctctgggccgctgactagattcggggggcttttatgtctgctgtgcctggctcttcccaaaaaaccagcccttatgtcacttcttccctcatgacctcatcgcgacaaactctcgcattctcatcatcgctgcaactggcaccgcaaccccaagcctgcacgactcgggatcgccacacgccatcccatacctgtttttgctgagatctgagagctgagcatcgctgtcgactgagattgacggctcgacagtcgccgtcttcccagcgtctgtcagttgcggctagctgtccgtcgccgcgctgcagccggcccagaggtggtttgctgtggctcttttttctgcagactgcctcccacgactgtgcgtcagcccgtcgttacatcataactcttctcccctcccaaccacaaccacaacaaaaccgacttcgtcatcgtcgtcaccatggcacccgccgccgagtccaaaccgtcagacaccgcatcgtcaggtaagccctacatcttctctcacacccaccttctttgtcgccagccccgtcgccgcctgctgcaattgccttgtgcctgtgtgcattgtcgcccattgtcgcccacacacatacttgtcacttgtgaccgtgtgtagccatctgcctcttgtcattactctctacaatctatactacaaagtctatgtcgctgcatgtaccttacagactgcccatgctgttgttgtgttgtcgcaattactcgaatcaaccccttaatgcatcaccgcatctcgcgccactgagtactgacgcatcactccgtcgcatatagacaccaacggcgacagcaagattcccgaggtcaaagccgaaggcaactccaccaacgagcccgggagaccactagcaccaccgcccaaacctggcgaggcaggcgactacttcacgagccagttgagcctcgagcccaaccccttcgagcagtccttcggaacgggaagcggcacggtcgagacgccaggcggaaccaagctgcccagcgtggctgccttaacgtcaccttcgtcgttgctgccggggacgggcacgacaccattcaactggggaggcgggtctcttaggacgggaccgctgagtccagcaatgctttccggcccggccaccgactactttggcgacacttcacacaccttgcgctccggcttcacccccaatgagagctccctccgcacaggattgacacccggcggcagtggttctatgttcccggccccaagtcccaactcgcaggctatcttcgcatctctggctaataacggcggcgcgacccccagcactctcgacttccaccggacggctatgagcgccgcggctagcaaagcagcaggccgcgataagtctcagcccaacggatctgctacctcccaggcacaagaaaacggcgttgctatcaagagcgaagccaagccaacctctggtgcctttgatccccacgacaacgacgctgcgaatggtctcttcatgctggctcagggcgcacagcaaaggaacggaccccagcagacacaatacccggttggtggcaaccagcccgtgcatgcacaccccgcacccgctcccgcgaatcagaccaacgcttctccgagaatgaatggtaacggtgcacatcccccacccaatgctcgcagtgttagtgaagctatgagccacggatcagaagagagtgaggcccccaagcctaacacaagggcaaagggcaaacgcggtggtgcggctgctactaatgggcggcggaaagctgatgaggctccggccaagcagcccgctaacaagaaggccaagactgcaccgtccacacacagtcaggaggaaggcacgtctgatgaggaagaggatgacgaccacaaggtcaaccctgacggtacgaagactaagatgactgatgaagagaagcggaagaacttcctcgagaggaatagagtggcggcactgaagtgtcgacagcgcaagaagcagtggctggcaaatctccagaacaaggtggagatgttcagcagcgagaacgatgccttgacggcacaaatctcgcagcttcgggaagaagtggtcaacctcaagaccctcctccttgcacacaaggactgccccgtaacacaacagcagggcatccacggtgcgtacatgcagcaggccatggagtcctacaaccccagcatcaacccttacggcatggctgcacccattcccaaccaaccggtcatggcaggacagggggtacagcgccgcttctcataggatgaaagcggtgcggcgacccaggactatcctgaactgagtgacaagtgattgcttgggaaggataagctggagtgtctgggacgactttcattatctatgacctaggagatgacggattctgacgagttcgcggcataatggaactgcgttacgtatatgctactaattaatattgggccttctcctcgcggcacgggggggctgtgaggcaccggcggtgacagcctgggactcacggccttttatatgctcccgtgtttgtaacaccatttagctcatgaagagacgatgaggcgttccggcttttatgggctgcagcatggtcattgtcatgggcatttgcgcgaccgagggagcatgagatgcgggaggagagtgggtcgagaggacttccatgtgggatagcatctctctattatctgtatttacacgcaggatgggcatacatcaaaaagtggcgttcaggcggtgggttgtctgaacgctccttaggcgttccggaaggagctgggctgggaagaagtttgaaccacacgagacatcacttcttcccggacggcacgcgatagtactgatatgaaagccgtatacgatagcttgctgatttacgagtggagaaatgagatgaatgatttcccctaaattctgacctacttgctctttatacttgacgttgtattacgat

SEQ ID NO: 14099 - DNA, 1449 bp, Muscodor strobelii
  misc_feature: SGI cDNA ID NO. 564639
  misc_feature: Reduced expression when VOC is produced
  misc_feature: Encodes the peptide sequence at SEQ ID NO 14100
atgagtaacacgtccaaacggacgcggagcgagcgcaatgccgcatacgacgaggacgatgatggattccagttcaactacaagaggagcagcaagcgagtcaaggcgtcgcaaccagatcccatacccgaagatgagccagcccaagcacccgcgccagcacccagaagaggcagaccgcccaaacagaaggcgaccgcgcaagcaccacctccacctcctccacagcctgcgcctaagaggacatccaaacggaggcccagccagatttcagatcctttagaagatgagacgccgccgccgccaccaccacagcccttgcccagagccacaaggcaaaaagcgcgcacttcactggaaaaatctgcagttgcgcctaagaaagctacgaatggcgtacccaagtcccgcaaagtcgtccaggagcgcacggaggaggtgacggaacaagatgcagaggacgacgaatcaagagagatggaggtcgacggcacgcccagagtggaccaagtatcgagctccaagaccatcgccttaccattcagtgacacgcccgtcatcaaccgaaataaggaaatgcggaaaaagacaggcaatcgacggagtagcttgggactgcgagggcggagggcgagttcgttgatcagtgccggtcataccgctataccacataaggaggtgaatgccgccgaattctacaagcacatagaggccgatgggcttacggagccccggcggatgaagcaactcctgacctggtgtggggagaggtctttatcggagaaaccaccgctcggttcactgaattctaatgcgattctgggagctcgagcgattcaggaccagcttctcaaagacttctctgcgcgatctgagttctcggattggtttggtcgcgaagataatgaggaggacgaggtagtgccaagaccaccggctatcgtgaaaccaaatcctcggaatattgagcacgatgagaagattgctgaattagaggagaggataaaacgattaaaagccgagaagaaaaaatggcaatctctgaaacagcagccgccggaaataccagcacttttcaactctggggagacacccgctgctctatcttctactactatggatccgttactgctcgatccagacgaagcgaacatgctcgcgagtttaaatgactcttctaattcttcacttcttcccaagacgaaatcgcgattacaaaacatccagtccagcctcgaagcgaagctcgatcgtttagtggataatgtgcataaggtcgaacagcgcatggatgcgggtaggagacaggcagatcagatactggcaaagactgcgacgaggttgaaggagagagaggaacgggagaagaagagtgccgggacgaaggagatgcctgttatggaggttttgagaagtttgagcaggatattgcctgagggtgggggatga

SEQ ID NO: 14100 - protein, 482 aa, Muscodor strobelii
  misc_feature: SGI Peptide ID NO. 564639
  misc_feature (179)..(481): Pfam Id: PF08202 Pfam Desc: Mis12-Mtw1 protein family
  misc_feature (13)..(482): NCBI GI: 256731779 Blast Desc: NECHADRAFT_61231 [Nectria haematococca mpVI 77-13-4]
  misc_feature (163)..(482): NCBI GI: 46137251 Blast Desc: FG10141.1 [Gibberella zeae PH-1]
  misc_feature (172)..(482): NCBI GI: 85102960 Blast Desc: NCU01344 [Neurospora crassa OR74A] gi|16944342|emb|CAC18234.2| conserved [Neurospora crassa] gi|28922975|gb|EAA32194.1| [Neurospora crassa OR74A]
  misc_feature (14)..(478): NCBI GI: 261351846 Blast Desc: kinetochore protein mis13 [Verticillium albo-atrum VaMs.102]
  misc_feature (14)..(481): NCBI GI: 116180006 Blast Desc: CHGG_00631 [Chaetomium globosum CBS 148.51] gi|88184928|gb|EAQ92396.1| CHGG_00631 [Chaetomium globosum CBS 148.51]
  misc_feature (14)..(482): NCBI GI: 39946182 Blast Desc: MGG_08211 [Magnaporthe grisea 70-15] gi|145019474|gb|EDK03702.1| MGG_08211 [Magnaporthe grisea 70-15]
  misc_feature (5)..(481): NCBI GI: 154301817 Blast Desc: BC1G_10060 [Botryotinia fuckeliana B05.10] gi|150855722|gb|EDN30914.1| BC1G_10060 [Botryotinia fuckeliana B05.10]
  misc_feature (13)..(482): NCBI GI: 256725213 Blast Desc: NECHADRAFT_88445 [Nectria haematococca mpVI 77-13-4]
  misc_feature (162)..(481): NCBI GI: 171691897 Blast Desc: protein product [Podospora anserina] gi|170945897|emb|CAP72698.1| protein product [Podospora anserina]
  misc_feature (200)..(480): NCBI GI: 156044368 Blast Desc: SS1G_10287 [Sclerotinia sclerotiorum 1980] gi|154694676|gb|EDN94414.1| SS1G_10287 [Sclerotinia sclerotiorum 1980]
  misc_feature: Useful for introducing or modulating the production of volatile compounds
MSNTSKRTRSERNAAYDEDDDGFQFNYKRSSKRVKASQPDPIPEDEPAQAPAPAPRRGRPPKQKATAQAPPPPPPQPAPKRTSKRRPSQISDPLEDETPPPPPPQPLPRATRQKARTSLEKSAVAPKKATNGVPKSRKVVQERTEEVTEQDAEDDESREMEVDGTPRVDQVSSSKTIALPFSDTPVINRNKEMRKKTGNRRSSLGLRGRRASSLISAGHTAIPHKEVNAAEFYKHIEADGLTEPRRMKQLLTWCGERSLSEKPPLGSLNSNAILGARAIQDQLLKDFSARSEFSDWFGREDNEEDEVVPRPPAIVKPNPRNIEHDEKIAELEERIKRLKAEKKKWQSLKQQPPEIPALFNSGETPAALSSTTMDPLLLDPDEANMLASLNDSSNSSLLPKTKSRLQNIQSSLEAKLDRLVDNVHKVEQRMDAGRRQADQILAKTATRLKEREEREKKSAGTKEMPVMEVLRSLSRILPEGGG

SEQ ID NO: 14101 - DNA, 2280 bp, Muscodor strobelii
  misc_feature: SGI EST ID NO. CUFF.33649.0
  misc_feature: Variant of the nucleotide sequence at SEQ ID NO 14099
caccatgctaaagttggcctgtgcgcgacacgcatgtaaacattggggagggagcgacgggacggggacgttttcgcgcctcacgcctcacgcctcacctcaaccaccggctccgaagcccacatccatcatcgcagcatcacgatccattgaccgacagccacccctctacccctacccagagaccactcgacatagtatagacaccatatcacctcttcctgttcgatgcgacccccgcgacacgagtttaattaacgacatcttacgtttgcgcctggcaggagcgagtacccgaccgaccaggtctcgtcccgcttctctctcaacctcgcgccgcccactgcgaccactaccgcccgaatctcaactctaatctacatcaatgcacgcccatgatccgcgtccatgactactctcgtgcagacacgccagccgctgcaagtacttagcatgagtaacacgtccaaacggacgcggagcgagcgcaatgccggtacgttgctgacaaacaaaacaaaacaatgcgggagcagggtcaaagaaagcgggcttgtgactaacacgtgcaccctgcgcatagcatacgacgaggacgatgatggattccagttcaactacaagaggagcagcaagcgagtcaaggcgtcgcaaccagatcccatacccgaagatgagccagcccaagcacccgcgccagcacccagaagaggcagaccgcccaaacagaaggcgaccgcgcaagcaccacctccacctcctccacagcctgcgcctaagaggacatccaaacggaggcccagccagatttcagatcctttagaagatgagacgccgccgccgccaccaccacagcccttgcccagagccacaaggcaaaaagcgcgcacttcactggaaaaatctgcagttgcgcctaagaaagctacgaatggcgtacccaagtcccgcaaagtcgtccaggagcgcacggaggaggtgacggaacaagatgcagaggacgacgaatcaagagagatggaggtcgacggcacgcccagagtggaccaagtatcgagctccaagaccatcgccttaccattcagtgacacgcccgtcatcaaccgaaataaggaaatgcggaaaaagacaggcaatcgacggagtagcttgggactgcgagggcggagggcgagttcgttgatcagtgccggtcataccgctataccacataaggaggtgaatgccgccgaattctacaagcacatagaggccgatgggcttacggagccccggcggatgaagcaactcctgacctggtgtggggagaggtctttatcggagaaaccaccgctcggttcactgaattctaatgcgattctgggagctcgagcgattcaggaccagcttctcaaagacttctctgcgcgatctgagttctcggattggtttggtcgcgaagataatgaggaggacgaggtagtgccaagaccaccggctatcgtgaaaccaaatcctcggaatattgagcacgatgagaagattgctgaattagaggagaggataaaacgattaaaagccgagaagaaaaaatggcaatctctgaaacagcagccgccggaaataccagcacttttcaactctggggagacacccgctgctctatcttctactactatggatccgttactgctcgatccagacgaagcgaacatgctcgcgagtttaaatgactcttctaattcttcacttcttcccaagacgaaatcgcgattacaaaacatccagtccagcctcgaagcgaagctcgatcgtttagtggataatgtgcataaggtcgaacagcgcatggatgcgggtaggagacaggcagatcagatactggcaaagactgcgacgaggttgaaggagagagaggaacgggagaagaagagtgccgggacgaaggagatgcctgttatggaggttttgagaagtttgagcaggatattgcctgagggtgggggatgaggagaggggtgagggtgagagtgggaacatgtgtgaatttgtcttgtctaatggcgtctgggtgcattatggaagataccagattggagttctgtggtctggatggctggcgcggcgttcactttaagtgcgagcgagaatggaatgcggtgatgacataggtgcatatatcatgaatgagatgatgcgaagtcccatggcgagatttgagatttattaagtgttgtgagagtggttgagatgaccggagtgattgggttgtaaggggattgaacttaagggatgcgcttg

SEQ ID NO: 14102 - DNA, 3114 bp, Muscodor strobelii
  misc_feature: SGI cDNA ID NO. 564640
  misc_feature: Reduced expression when VOC is produced
  misc_feature: Encodes the peptide sequence at SEQ ID NO 14103
atggatcttgtaggtatacatgtgcctactgaaatcattgaccaaattctggactattgtgtccctgaccccttcaactacgagagacaccggcgccgaaaggagccgagtggccttgagctgaggctcgtttgccgcagtgcttcaactaaaggcctattcgacagcgtgatctcgcgccaagcgctacgaaaatttgatgtcgataggacgccgttatttacgcctacgccaagtctgtccatgatagcatggctgctggcaacaagactcaaagctcgcccggatgctaaagcagggcttgctgcgcatgtctggaggttgtcaaacgcaatttggacctggaagcaatgtaattctgagcaaactctacacgattacatcactggagcgtgcaacttgttagttgctgtgaaggatgtccattgggtacgaggacaacttcaaggttctgctgaaagcccattttttccggttccacacaaagaccaatatgacttagatgatatagccaaaatgggcggcctacaagttgcgagttggtgtggggatgctccgatagtagagtcattgttgaaacacggtatcgattcaaacgctctcgatgcaaacctcggacgtccattgtttgctgcggcttataatggccagaagactatttcacgtcttctcgttgacgctggagctgctttgaacggtgaaccggatggcactgaattcaatatacaccatcggtggcctgctgcagtagctggacgttatggacacgttcaaactgagcgatacttattggagcaatgcttgagatccgactcgactgttcatgcgaattgggctcttctctacgcatacacgtttggaatggcatgggctgttcaactggctttggaacgatctgacatcgatgtcaacgctaaatcacaatcgacaaaggaaacaccgctccttctggccatcagatcccaatgcgaagaagccgtagcactgctcttaaaacggaaagatctcgacccgaatatccgcggcccgggcggtaagacgaccttgatgatcgcgattcagcgggatatcgtgtgcgaaaagatcgtgcaacgcctgcttgagcgagatgacttagctattgatttgcaagaaatcgacactaaccgcaaccctctggcttacgcaatctccaaaggaaatcataatgtcttcaaagctattctatggcggtcgtctaatctctcactggacaattgccgggtggatgatttctcattgctttgctatgcaatacatcatgagatggtggatactgtacgccttcttctggagcgagacgatgataagagaggcatgagggctttgagacaagcagtatggagggaagacgaagctacagttgcagcgcttttgtcggacgcgagattggatcctaatatcgatactccactagtcgatgcaatggatcggaaaggaaacacgatcatgaaccaattgcttgcacatagcgacattgacccaaacgtacttgggccttgtgtggctttcgagggctcctatacaccactgaccgtggcggtgataagaggaaacaaagccgctgtcatagagctgttgaagcatgccaacaccgaccccaatgctccagctgaagatggcgatacaccattagtgtatgcggtgaatttcgaagagcaagaaatcattcaagagctactgaaacatggtagcatcgatcccaatgctccaggcgaagagtttacaccattgacattagcggccttcagaggagacgaagatattgttacacagctcttgaggcatcctaaaaccgatccaaatgctctagacaaagatggctggacacccattgcgacagcggtgttcgcaagaggtgaagcaattgtcaaagagttgttgaaacatgctaacatcaacccgaacataccaaacgagagtagcagtttaccattaataatagcggtgcgcgacggagacaaagcgattgttgaagagctgttgaagcatcctgttgtggaccccgaggctctgagcaaagatggcttcacaccattgacgctagctcgggatagagaactacatgatatagtcgctctcttggaggagaaattgagcattacgcaactaacggagcagaacggaatccatcagctgccggccggactcggtggcggaacacctcggcctgccaaatcagaaattccgggtcttcaaggcttcggtccccattttcttttcgccgcactcaactctgctaaaggcaaccactacgtcaacgactttagtaacagtcattgcgctctgacggttgcccaatttactcacgacactccaccgccaacatactcttttacgaattcaccaaatccgccgaaccagaagtggattacagaagataaccacacaacaatggcgtccctccgcactctcatgcgcccagcgcgccgggcgctctcccgatatcacgccgcccccaaaatctctccgatgataatccgcagcatggcaacagtcggaaacgcaccaccgattgagccgcaaaaacaagcaggcgagctatcagtcggcgagctcgagggcgcaagtttcaagatcgagcccctgcgtcgcgtgggcgaggacgagaagacgatgcgggctagactcgtctaccaatcccgcaagcgaggaaccctagaatccgatctcctcctcagcacattcgcagacacatacctgcccaccatgtctctacaggaaataagttcgtacgatttatttctcgatgaaaatgactgggatatatactactgggctacccaagacgagccttcgtccactccctctacatcatctacttcccccaccagcacctcctccccttcttacgggagcggtgccgagacagcggccgctactgatagtacggtgagccctgctccggctgaagacgtcaagacgcagagctacgcgggggagtgggcacagactgtgggcacgtttaagccggcttatagaccggtgccggcgaggtggagggatagtgcggtgttgagattgttgagggatcatgttaagagcagggcgaaagaggagggggggatggcttttatgcctgctttgaagagctag

SEQ ID NO: 14103 - protein, 1037 aa, Muscodor strobelii
  misc_feature: SGI Peptide ID NO. 564640
  misc_feature (579)..(612): Pfam Id: PF00023 Pfam Desc: Ankyrin repeat
  misc_feature (613)..(646): Pfam Id: PF00023 Pfam Desc: Ankyrin repeat
  misc_feature (875)..(951): Pfam Id: PF03937 Pfam Desc: Domain of function (DUF339)
  misc_feature (875)..(943): Pfam Id: PF03937 Pfam Desc: Domain of function (DUF339)
  misc_feature (812)..(1036): NCBI GI: 116180004 Blast Desc: CHGG_00630 [Chaetomium globosum CBS 148.51] gi|88184927|gb|EAQ92395.1| CHGG_00630 [Chaetomium globosum CBS 148.51]
  misc_feature (849)..(1036): NCBI GI: 85102955 Blast Desc: NCU01343 [Neurospora crassa OR74A] gi|11595613|emb|CAC18233.1| conserved [Neurospora crassa] gi|28922974|gb|EAA32193.1| conserved [Neurospora crassa OR74A]
  misc_feature (852)..(1035): NCBI GI: 39971437 Blast Desc: MGG_07034 [Magnaporthe grisea 70-15] gi|145019495|gb|EDK03723.1| MGG_07034 [Magnaporthe grisea 70-15]
  misc_feature (790)..(1036): NCBI GI: 258567462 Blast Desc: early meiotic induction protein 5 [Uncinocarpus reesii 1704] gi|237905921|gb|EEP80322.1| early meiotic induction protein 5 [Uncinocarpus reesii 1704]
  misc_feature (827)..(1035): NCBI GI: 239611252 Blast Desc: TPR repeat protein [Ajellomyces dermatitidis ER-3]
  misc_feature (853)..(1035): NCBI GI: 46137249 Blast Desc: FG10140.1 [Gibberella zeae PH-1]
  misc_feature (827)..(1035): NCBI GI: 261205602 Blast Desc: TPR repeat protein [Ajellomyces dermatitidis SLH14081] gi|239592597|gb|EEQ75178.1| TPR repeat protein [Ajellomyces dermatitidis SLH14081]
  misc_feature (850)..(1036): NCBI GI: 145229999 Blast Desc: An01g08860 [Aspergillus niger] gi|134055422|emb|CAK37131.1| protein product [Aspergillus niger]
  misc_feature (853)..(1035): NCBI GI: 226289895 Blast Desc: TPR repeat protein [Paracoccidioides brasiliensis Pb18]
  misc_feature (850)..(1036): NCBI GI: 67527801 Blast Desc: AN4164.2 [Aspergillus nidulans FGSC A4] gi|40740235|gb|EAA59425.1| AN4164.2 [Aspergillus nidulans FGSC A4] gi|259481239|tpe|CBF74574.1| TPA: TPR repeat protein nidulans
  misc_feature: Useful for introducing or modulating the production of volatile compounds
MDLVGIHVPTEIIDQILDYCVPDPFNYERHRRRKEPSGLELRLVCRSASTKGLFDSVISRQALRKFDVDRTPLFTPTPSLSMIAWLLATRLKARPDAKAGLAAHVWRLSNAIWTWKQCNSEQTLHDYITGACNLLVAVKDVHWVRGQLQGSAESPFFPVPHKDQYDLDDIAKMGGLQVASWCGDAPIVESLLKHGIDSNALDANLGRPLFAAAYNGQKTISRLLVDAGAALNGEPDGTEFNIHHRWPAAVAGRYGHVQTERYLLEQCLRSDSTVHANWALLYAYTFGMAWAVQLALERSDIDVNAKSQSTKETPLLLAIRSQCEEAVALLLKRKDLDPNIRGPGGKTTLMIAIQRDIVCEKIVQRLLERDDLAIDLQEIDTNRNPLAYAISKGNHNVFKAILWRSSNLSLDNCRVDDFSLLCYAIHHEMVDTVRLLLERDDDKRGMRALRQAVWREDEATVAALLSDARLDPNIDTPLVDAMDRKGNTIMNQLLAHSDIDPNVLGPCVAFEGSYTPLTVAVIRGNKAAVIELLKHANTDPNAPAEDGDTPLVYAVNFEEQEIIQELLKHGSIDPNAPGEEFTPLTLAAFRGDEDIVTQLLRHPKTDPNALDKDGWTPIATAVFARGEAIVKELLKHANINPNIPNESSSLPLIIAVRDGDKAIVEELLKHPVVDPEALSKDGFTPLTLARDRELHDIVALLEEKLSITQLTEQNGIHQLPAGLGGGTPRPAKSEIPGLQGFGPHFLFAALNSAKGNHYVNDFSNSHCALTVAQFTHDTPPPTYSFTNSPNPPNQKWITEDNHTTMASLRTLMRPARRALSRYHAAPKISPMIIRSMATVGNAPPIEPQKQAGELSVGELEGASFKIEPLRRVGEDEKTMRARLVYQSRKRGTLESDLLLSTFADTYLPTMSLQEISSYDLFLDENDWDIYYWATQDEPSSTPSTSSTSPTSTSSPSYGSGAETAAATDSTVSPAPAEDVKTQSYAGEWAQTVGTFKPAYRPVPARWRDSAVLRLLRDHVKSRAKEEGGMAFMPALKS

SEQ ID NO: 14104 - DNA, 2344 bp, Muscodor strobelii
  misc_feature: SGI EST ID NO. CUFF.33551.0
  misc_feature: Variant of the nucleotide sequence at SEQ ID NO 14102
ccgcactcaactctgctaaaggcaaccactacgtcaacgactttagtaacagtcattgcgctctgacggttgcccaatttactcacgacactccaccgccaacatactcttttacgaattcaccaaatccgccgaaccagaagtggattacagaagataaccacacaacaatggcgtccctccgcactctcatgcgcccagcgcgccgggcgctctcccgatatcacgccgcccccaaaatctctccgatgataatccgcagcatggcaacagtcggaaacgcaccaccgattgagccgcaaaaacaagcaggcgagctatcagtcggcgagctcgagggcgcaagtttcaagatcgagcccctgcgtcgcgtgggcgaggacgagaagacgatgcgggctagactcgtctaccaatcccgcaagcgaggaaccctagaatccgatctcctcctcagcacattcgcagacacatacctgcccaccatgtctctacaggaaataagttcgtacgatttatttctcgatgaaaatgactgggatatatactactgggctacccaagacgagccttcgtccactccctctacatcatctacttcccccaccagcacctcctccccttcttacgggagcggtgccgagacagcggccgctactgatagtacggtgagccctgctccggctgaagacgtcaagacgcagagctacgcgggggagtgggcacagactgtgggcacgtttaagccggcttatagaccggtgccggcgaggtggagggatagtgcggtgttgagattgttgagggatcatgttaagagcagggcgaaagaggagggggggatggcttttatgcctgctttgaagagctaggttacccactacccacttcccagggattttgatgtggtgggggatgaatgtatggaaagggagtagtctgacggtgtattgtgttgatgcattgtcggtgttttcaagatagagatagacatgcggtacatattagtgtacgataagctcctacattggaagtcgagttcaagcggtgtgtaccatcatgtataaacgttccgtatgaggtagtgatcaagatgtgtagtagttggaggatggttcattgtcctgaatacaaaccaagtacggtttgaaaaccgtatcattcaagtactaggtagtgagatacgatattcgactggtcatgttgaaaaccccattttatattccttttgtgagaccgttataccgcatctttcttcctgagatggctatacagactatgcgtacaagcaagcaccagaccttctttcggccctccatgcattgatctagagagctataggtccaaaccgccagaccttcctttccccgggctacgtatctacattcccgagacgccgtgcccgtgacccttgtcctcctctgctctaaatcatatcggaattcagaatgccatgccatgccattttaagataggtaggtaggtaggttggcgtaggtagttgcggtccgtccgtgacccgtcatcgatgtgagaacaagacgatagttcgttcaaatcaagtgcttggagcggaagtaggcgcgcaggtacatgatctgccagccccagagggcgacgagcagggtggtggtgccgatgccgaaccatttcacgcgggtgttggtgctctcgttggtgtcgcgcagcttgacctcgcgggcgcgcaggtagtccatctcgccgacgatctcctggatcatctcctcgatgcggcgcaggtcggtctcggcggggcgcagcttctcggtggcctggatggcggaccagtccttggcgtcggcgccgatgtcgatgtcgagctcgacgtggcggatggggcggttcacccggccgccctggtggatgttctcgaagcagacgtcgaaggcggcgtcggcgtgggaggtgaagacggtgcgcttctcgccgacaatgtccttggggcggccgtactcgttgcccagggtgtccttgatgcgcatgttgacgaccatgccgtcgccctggctgccgtcgacgatggccgtgacgacgacgagcgtgtccttggcgacgaagttgcggatgcacctctccttcttgcccgcgtagttcttctccaccgccgacaggtcgaatttcagcgcgttgaccgacgccatcagcagcactaggccgcagacgtagtgcagcaatgctctcggcagagccatggcgggcagattgtaatgttggcgacaggagacgggaggtgttgtacagagttatgacagcgatcagtggcaattgtactgtaatagcggctgtcgtcgatttccaatggcaagtgtccccttcgctgttg

SEQ ID NO: 14105 - DNA, 660 bp, Muscodor strobelii
  misc_feature: SGI cDNA ID NO. 564641
  misc_feature: Reduced expression when VOC is produced
  misc_feature: Encodes the peptide sequence at SEQ ID NO 14106
atggctctgccgagagcattgctgcactacgtctgcggcctagtgctgctgatggcgtcggtcaacgcgctgaaattcgacctgtcggcggtggagaagaactacgcgggcaagaaggagaggtgcatccgcaacttcgtcgccaaggacacgctcgtcgtcgtcacggccatcgtcgacggcagccagggcgacggcatggtcgtcaacatgcgcatcaaggacaccctgggcaacgagtacggccgccccaaggacattgtcggcgagaagcgcaccgtcttcacctcccacgccgacgccgccttcgacgtctgcttcgagaacatccaccagggcggccgggtgaaccgccccatccgccacgtcgagctcgacatcgacatcggcgccgacgccaaggactggtccgccatccaggccaccgagaagctgcgccccgccgagaccgacctgcgccgcatcgaggagatgatccaggagatcgtcggcgagatggactacctgcgcgcccgcgaggtcaagctgcgcgacaccaacgagagcaccaacacccgcgtgaaatggttcggcatcggcaccaccaccctgctcgtcgccctctggggctggcagatcatgtacctgcgcgcctacttccgctccaagcacttgatttga

SEQ ID NO: 14106 - protein, 219 aa, Muscodor strobelii
  misc_feature: SGI Peptide ID NO. 564641
  misc_feature (1)..(219): NCBI GI: 261351847 Blast Desc: endoplasmic reticulum vesicle protein [Verticillium albo-atrum VaMs.102]
  misc_feature (1)..(219): NCBI GI: 256732167 Blast Desc: [Nectria haematococca mpVI 77-13-4]
  misc_feature (1)..(219): NCBI GI: 46137245 Blast Desc: FG10138.1 [Gibberella zeae PH-1] gi|108864724|sp|Q4HY20.1|ERV25_GIBZE RecName: Full=Endoplasmic reticulum vesicle protein 25; Flags: Precursor
  misc_feature (1)..(219): NCBI GI: 116180002 Blast Desc: CHGG_00629 [Chaetomium globosum CBS 148.51] gi|88184926|gb|EAQ92394.1| CHGG_00629 [Chaetomium globosum CBS 148.51]
  misc_feature (1)..(219): NCBI GI: 154298098 Blast Desc: ERV25 protein [Botryotinia fuckeliana B05.10] gi|150858200|gb|EDN33392.1| ERV25 protein [Botryotinia fuckeliana B05.10]
  misc_feature (1)..(219): NCBI GI: 156044632 Blast Desc: SS1G_10420 [Sclerotinia sclerotiorum 1980] gi|154694808|gb|EDN94546.1| SS1G_10420 [Sclerotinia sclerotiorum 1980]
  misc_feature (1)..(219): NCBI GI: 145612281 Blast Desc: MGG_08210 [Magnaporthe grisea 70-15] gi|145019473|gb|EDK03701.1| MGG_08210 [Magnaporthe grisea 70-15]
  misc_feature (1)..(219): NCBI GI: 171691893 Blast Desc: protein product [Podospora anserina] gi|170945895|emb|CAP72696.1| protein product [Podospora anserina]
  misc_feature (1)..(219): NCBI GI: 166203486 Blast Desc: protein product [Podospora anserina] gi|170945895|emb|CAP72696.1| protein product [Podospora anserina]
  misc_feature (1)..(214): NCBI GI: 11595612 Blast Desc: ERV25 protein (component of the COPII-coated vesicles) [Neurospora crassa]
  misc_feature: Useful for introducing or modulating the production of volatile compounds
MALPRALLHYVCGLVLLMASVNALKFDLSAVEKNYAGKKERCIRNFVAKDTLVVVTAIVDGSQGDGMVVNMRIKDTLGNEYGRPKDIVGEKRTVFTSHADAAFDVCFENIHQGGRVNRPIRHVELDIDIGADAKDWSAIQATEKLRPAETDLRRIEEMIQEIVGEMDYLRAREVKLRDTNESTNTRVKWFGIGTTTLLVALWGWQIMYLRAYFRSKHLI

SEQ ID NO: 14107 - DNA, 429 bp, Muscodor strobelii
  misc_feature: SGI cDNA ID NO. 564642
  misc_feature: Reduced expression when VOC is produced
  misc_feature: Encodes the peptide sequence at SEQ ID NO 14108
atgccgaaattcttctgcgactactgcgacgtctacctcacgcacgactcgatgagcgtccgcaaggcgcacaactcgggccgcaaccacctgcgcaacgtcgtcgactactaccagcagatcggccacgagaaggcccagtccgtcatcgacagcatcacctcctcctacgccgccgagggccaggcccacgccaaccccatgctgccccagaaccagcccggcgcccacggccacggcccccccggcggtgcattcccgccgcccttcaacttcggagctggtctgcctccacccttccctggcatgcctggtgctcctcccatgaaaaatcccgcctggcggtgcctttccccagggaatgcctccgccaccaggccaagctggagcgggtcgaggaatgccaccacccttccccaatggccctaa

SEQ ID NO: 14108 - protein, 142 aa, Muscodor strobelii
  misc_feature: SGI Peptide ID NO. 564642
  misc_feature (1)..(38): Pfam Id: PF06220 Pfam Desc: U1 zinc finger
  misc_feature (1)..(78): NCBI GI: 171691891 Blast Desc: protein product [Podospora anserina] gi|170945894|emb|CAP72695.1| protein product [Podospora anserina]
  misc_feature (1)..(73): NCBI GI: 256731780 Blast Desc: NECHADRAFT_80502 [Nectria haematococca mpVI 77-13-4]
  misc_feature (1)..(73): NCBI GI: 85102947 Blast Desc: NCU01341 [Neurospora crassa OR74A] gi|11595611|emb|CAC18231.1| related to U1 SMALL NUCLEAR RIBONUCLEOPROTEIN C [Neurospora crassa] [Neurospora crassa OR74A]
  misc_feature (1)..(78): NCBI GI: 226289874 Blast Desc: PADG_01508 [Paracoccidioides brasiliensis Pb18]
  misc_feature (1)..(71): NCBI GI: 239606653 Blast Desc: conserved [Ajellomyces dermatitidis ER-3]
  misc_feature (1)..(71): NCBI GI: 261197263 Blast Desc: conserved [Ajellomyces dermatitidis SLH14081] gi|239595664|gb|EEQ78245.1| conserved [Ajellomyces dermatitidis SLH14081]
  misc_feature (1)..(69): NCBI GI: 154298100 Blast Desc: BC1G_12015 [Botryotinia fuckeliana B05.10] gi|150858201|gb|EDN33393.1| BC1G_12015 [Botryotinia fuckeliana B05.10]
  misc_feature (1)..(69): NCBI GI: 156044630 Blast Desc: SS1G_10419 [Sclerotinia sclerotiorum 1980] gi|154694807|gb|EDN94545.1| SS1G_10419 [Sclerotinia sclerotiorum 1980]
  misc_feature (4)..(71): NCBI GI: 240281974 Blast Desc: conserved [Ajellomyces capsulatus H143]
  misc_feature (4)..(71): NCBI GI: 225559050 Blast Desc: conserved [Ajellomyces capsulatus G186AR]
  misc_feature: Useful for introducing or modulating the production of volatile compounds
MPKFFCDYCDVYLTHDSMSVRKAHNSGRNHLRNVVDYYQQIGHEKAQSVIDSITSSYAAEGQAHANPMLPQNQPGAHGHGPPGGAFPPPFNFGAGLPPPFPGMPGAPPMKNPAWRCLSPGNASATRPSWSGSRNATTLPQWP

SEQ ID NO: 14109 - DNA, 540 bp, Muscodor strobelii
  misc_feature: SGI EST ID NO. CUFF.33554.0
  misc_feature: Variant of the nucleotide sequence at SEQ ID NO 14107
ttcaacataaaccaccacacaaacatcatctgccctcgacgcccatctttgctcacgagagccaccaactcgtcacgatgccgaaattcttctgcgactactgcgacgtctacctcacgcacgactcgatgagcgtccgcaaggcgcacaactcgggccgcaaccacctgcgcaacgtcgtcgactactaccagcagatcggccacgagaaggcccagtccgtcatcgacagcatcacctcctcctacgccgccgagggccaggcccacgccaaccccatgctgccccagaaccagcccggcgcccacggccacggcccccccggcggtgcattcccgccgcccttcaacttcggagctggtctgcctccacccttccctggcatgcctggtgctcctcccatgaaaaatcccgcctggcggtgcctttccccagggaatgcctccgccaccaggccaagctggagcgggtcgaggaatgccaccacccttccccaatggccctaacggtctgccgatgccaccgcccggtgggcctccc

SEQ ID NO: 14110 - DNA, 3408 bp, Muscodor strobelii
  misc_feature: SGI cDNA ID NO. 564643
  misc_feature: Reduced expression when VOC is produced
  misc_feature: Encodes the peptide sequence at SEQ ID NO 14111
atgctggcggcttccgagactgtcgcacctgctgcgacaggcagtctctacttcgatccgccctacgaccaccctccgctgctcaaaccgagtcaacaagcgtccttcaagaagcacaaagtcctgcctcacccttcagccaatcgccgcgcatccgccgcaacgtctacgagcagcagcacgaacacccgccctctttcctttgacttctctggcgacgatgtcataactgtagctccgcgatcatcccacgacactctttccaacactttgccgagactgacgaaggagagctcggacacgaaagtgatcggcccggatctgccacccacgccaccggctcattcacgaacatcttcgggcagcagcggctcgctcctgccttccacacctacaccggccgtgcgcccaaccgcccaggaagtcgtgactgccacaactgtcacaactgctgcgactgctgcgacacccgcgaccatttcgttaccaggcacaccaactcaccagaaaagcccacccacacccgaagtcactccacctcacgccggccgacggcccaaagctttcatccggcccgtcttgaccgaccgcaatccctctaaagtgacagccgattctcgcaccgagtcattcaaaacggcaagagaaagcccagggttctccgaggaagaggaaactacaacgccgagagcactacttccttccgcggccctctcgtcgcagatcgtggccaggcgacaactcgaggcaaagtcaaagaaaggccacgacttagggttgggccttggcctaggcttaggcatagaggacagcttaacaccgagaactcagcaggcattctttacgtttgacggagagtgggcttcgacaagcgacgtggagcaggaatgggatgacaatctgaacaggaacgtcatggtgcgaaagcgacggggtgaaccaaagcttgaaccaaaaatgaacggcatggcagaagtcattgaggacgtcacggtcacgcccacgaatgcgacaaaggctctgcgatctgtgtccctgcagcatgagcgcattcacgtccaaccctcacctcaatctcagcctcaacctcagcctcagcttgttgttcactatcttccaatggagtttccaattagagggaaatcgcactggggagcctcgacttccgagtcttcagtcagcacagacgtcaaacggtcctctgggatatcgaccaaatccaccgtttcaacggtcgtcgaggccatcctagtcgatgtccccccacaaaggcagaagactttgcgacatgtcagaaaacaaactgccctacgggactctagctcagaaatctcacccccgagctcttcctcagcctcggttcggcaggtcgagaggatcagacaatcacgacctcccgactcttaccatggcccccgaactgttagtatggcttccactggaacaacgcattcactagccagccgtaaaggacggcgcgaggtatggaagagtggcggcatcccggtggttgtcattcccgaccgcaaagaatccatgaagtctagatcatcagggcctccctcactgcgttctatgagtagcaatcatagcaagaggagcgtcagtcttggttctgctcagcgactcaatcaatctcggacctcagagctctcctcgcaccgtgcccaaccagcccaacgagggcgatccatgtcggaatcccttaactcacactcgcacggggtgattgcgactgatcagttaactatggattaccctcccattgtgcccagaaggacatcttctctttcagcccctacaagcagaaacacctcacgtgctggctcactgactgcagagagcttagaggcgcacaacacattgatggaactggatctgaagaaacttgatatgaagatgaagagacagccaccgcaggttctcgtggaacgtgcacctcctgtcgaggatgcaagtcacggatttaatcagagacaactgcacccggctgcctccatcgagtcgcacaagaatgacatttctaatcagaaatcactcgtggaccacaacggggacccattcttcggcaaacggctcacagtgcacaacacgccattctcacaggcctctgttgacacaaacggaacacactcggttgctgatattgctgaggcaatggcggtgaacatctacccccaccagaacaaatctgtcttgatggtgcaccacatgtcgagacccgtcaccattgcaaacggcatacaagaggagaggaactcccaggtcggcagttctacggcaacgaacggaatctcaggcaatcccgaaattacggctattggtcccgacggcggccctgtgacacctccccagccccagttctccatggatgatgtcgactcgcccctcagaaacccacgcgcacctcctgagccacccgcaatcaagttcattccggctacaccatctggtctaacgccgaatgctgagaaagaaaagatgctgggtaattacttcgaagagacacaaaagcggccgtcattggtccgtagagctttcagtcttcgcaaaggcttagagagtggaagctcgcgtgcttctggcttcctggctcgcaccttgtcgctatccaagaccatgcgtcgagataccgctgaaaatcccaatctagaaaaaggcagaaaagatacttcttctcaatatcccaccgccgacgatctgccccctgatgaggataagttgcaccccttctggcgccctgcaaatgaagtcgatctagataatgaagacgattgtgtctacgatgtgccagacgaacatggcgagcgcgattacagttactatccagaagaagatcgccctatgccagtgagaagaagaagcctcagtgaacggatgcgacgcacctttgcagttcttccaatcgaagatgacgatcactatgtcagggcagaccgacgcagtccagaacgccgcaccgtcaagcggacccctagcgggagattgcgggtcatgccccatcgggacagtcgtagttcgagcacccttcgctggagtagaggcttcagttcgcacgagtcaacagatgatcggccgtttacggctcctgaggataacaatcgccgaccttgggggatcgagaaacgagtggatgagcgtggccgacggatctttcctggttggcaagagaagcttgggcaatatcgacctcagaaccttcaacgccgcctcagtgagcaccgacgccagaaacgaactgaggcccttaggcagaaaatcagtgggcctcgtgaggttcgagacggcgttggggaggtcatcaagcgcaatagttacaagggtccttcataccaaaccggctcacacgttctttctccgaaccaccaccgtcaaactcagggctatcattcagggcttcgtgtctga

SEQ ID NO: 14111 - protein, 1135 aa, Muscodor strobelii
  misc_feature: SGI Peptide ID NO. 564643
  misc_feature (36)..(1107): NCBI GI: 116179998 Blast Desc: CHGG_00627 [Chaetomium globosum CBS 148.51] gi|88184924|gb|EAQ92392.1| CHGG_00627 [Chaetomium globosum CBS 148.51]
  misc_feature (36)..(1113): NCBI GI: 39946176 Blast Desc: MGG_08208 [Magnaporthe grisea 70-15] gi|145019471|gb|EDK03699.1| MGG_08208 [Magnaporthe grisea 70-15]
  misc_feature (31)..(1107): NCBI GI: 261351849 Blast Desc: conserved [Verticillium albo-atrum VaMs.102]
  misc_feature (36)..(1106): NCBI GI: 171691885 Blast Desc: protein product [Podospora anserina] gi|170945891|emb|CAP72692.1| protein product [Podospora anserina]
  misc_feature (31)..(1117): NCBI GI: 256732168 Blast Desc: NECHADRAFT_104498 [Nectria haematococca mpVI 77-13-4]
  misc_feature (8)..(1102): NCBI GI: 46137241 Blast Desc: FG10136.1 [Gibberella zeae PH-1]
  misc_feature (142)..(1105): NCBI GI: 156055710 Blast Desc: SS1G_05207 [Sclerotinia sclerotiorum 1980] gi|154702991|gb|EDO02730.1| SS1G_05207 [Sclerotinia sclerotiorum 1980]
  misc_feature (221)..(1105): NCBI GI: 154298003 Blast Desc: BC1G_12154 [Botryotinia fuckeliana B05.10] gi|150858281|gb|EDN33473.1| BC1G_12154 [Botryotinia fuckeliana B05.10]
  misc_feature (162)..(1035): NCBI GI: 85102981 Blast Desc: NCU01349 [Neurospora crassa OR74A] gi|12718418|emb|CAC28796.1| [Neurospora crassa] gi|28922980|gb|EAA32199.1| [Neurospora crassa OR74A]
  misc_feature (384)..(817): NCBI GI: 258576059 Blast Desc: [Uncinocarpus reesii 1704] gi|237902477|gb|EEP76878.1| [Uncinocarpus reesii 1704]
  misc_feature: Useful for introducing or modulating the production of volatile compounds
MLAASETVAPAATGSLYFDPPYDHPPLLKPSQQASFKKHKVLPHPSANRRASAATSTSSSTNTRPLSFDFSGDDVITVAPRSSHDTLSNTLPRLTKESSDTKVIGPDLPPTPPAHSRTSSGSSGSLLPSTPTPAVRPTAQEVVTATTVTTAATAATPATISLPGTPTHQKSPPTPEVTPPHAGRRPKAFIRPVLTDRNPSKVTADSRTESFKTARESPGFSEEEETTTPRALLPSAALSSQIVARRQLEAKSKKGHDLGLGLGLGLGIEDSLTPRTQQAFFTFDGEWASTSDVEQEWDDNLNRNVMVRKRRGEPKLEPKMNGMAEVIEDVTVTPTNATKALRSVSLQHERIHVQPSPQSQPQPQPQLVVHYLPMEFPIRGKSHWGASTSESSVSTDVKRSSGISTKSTVSTVVEAILVDVPPQRQKTLRHVRKQTALRDSSSEISPPSSSSASVRQVERIRQSRPPDSYHGPRTVSMASTGTTHSLASRKGRREVWKSGGIPVVVIPDRKESMKSRSSGPPSLRSMSSNHSKRSVSLGSAQRLNQSRTSELSSHRAQPAQRGRSMSESLNSHSHGVIATDQLTMDYPPIVPRRTSSLSAPTSRNTSRAGSLTAESLEAHNTLMELDLKKLDMKMKRQPPQVLVERAPPVEDASHGFNQRQLHPAASIESHKNDISNQKSLVDHNGDPFFGKRLTVHNTPFSQASVDTNGTHSVADIAEAMAVNIYPHQNKSVLMVHHMSRPVTIANGIQEERNSQVGSSTATNGISGNPEITAIGPDGGPVTPPQPQFSMDDVDSPLRNPRAPPEPPAIKFIPATPSGLTPNAEKEKMLGNYFEETQKRPSLVRRAFSLRKGLESGSSRASGFLARTLSLSKTMRRDTAENPNLEKGRKDTSSQYPTADDLPPDEDKLHPFWRPANEVDLDNEDDCVYDVPDEHGERDYSYYPEEDRPMPVRRRSLSERMRRTFAVLPIEDDDHYVRADRRSPERRTVKRTPSGRLRVMPHRDSRSSSTLRWSRGFSSHESTDDRPFTAPEDNNRRPWGIEKRVDERGRRIFPGWQEKLGQYRPQNLQRRLSEHRRQKRTEALRQKISGPREVRDGVGEVIKRNSYKGPSYQTGSHVLSPNHHRQTQGYHSGLRV

SEQ ID NO: 14112 - DNA, 5988 bp, Muscodor strobelii
  misc_feature: SGI EST ID NO. CUFF.33569.0
  misc_feature: Variant of the nucleotide sequence at SEQ ID NO 14110
ggaatggccatattcgggtagatgtagccaatccagcgtgcgcccgtctgtgtcttagtaggcgaggtacggaatacatgtagacgtctggtcagttgtcgatatgggacgtgggcgggcggtttccagtccccccaaccacttccatttctgctacatctcctgcaacgtcttggctttaggtacttcctcatagagacgcaggacgagggatgacgaaaattagaggtatcatcatccttcgcaatcccacgtgccaatgactcaactaccgtgttaaccttaaactcttaagagcctgacttataataagatcccgtggatgtacataggtagatgggcgttcccgaagccacatcgctagacgagggccggtcaaagtcaattagatgatctggtccctgtcagctctcgagtccaatggcgttgcgatggttgttgtaacttggtcgagcttgtccaaaaaccgcctgcatccacttcccgcccagccccttctatcgacgggtaaccggttggcgatctgctgctagctgttgtagcaattgacgatttgtccctcatcgtcgacccgcagatgctagagagaaagtgagagagtgtgatagagaagaacccactctcgttcggtcggtcgagacacatcttgttcaccttgtttttctcaccaatcccattccctgcaccagtctatctcgacgagtatttgcactttgcctcaatattgcgttagaagctatctcactacattaggtacatccttattctctgcattacatacagtagaatataccccgtgcatccccccatctccgcttcgtctggactctcgagtcttttacttggttccgacatcccggcttctaccaatggtcggtgctttagaaatagtcgcattatcccgtcataggccatcatagaagttattactagtccaccccaggatactgggagggatatacccaactccgagtctgatccaagaggcgtgcgaccaatcgacagctgctctgcgaatcaccaagcagccaggaaaaagcagaagaagcagaagaagaatgcgctttgcgccatgtgtttcgagcccatgaaaagcacccatcctgctgcgacgtggttttcgtgttagctgtgctagcgtccggtccgcagaaggaccgtcgtcgcctgccacctttcacgacaccattcggccatcctcactttcttctcgctgcgtgcctctcactgtcgcacagctccccttcgcctccaacgaggccacccacccatacgctccgtgtgctcctatcacccacgcacgctcggtgctgcatcgccggcgtgccttcctagacttacccatacttatctctgctcgaccactctctagatagccacccagatagccctatgacgacggccacgatgcatggtatggaccgctgtgactgcaactagactaggtagctattcagcatagtagcgtcccgtgcaggcgcgaacaaaggcagtgtgcagagatgctggcggcttccgagactgtcgcacctgctgcgacaggcagtctctacttcgatccgccctacgaccaccctccgctgctcaaaccgagtcaacaagcgtccttcaagaagcacaaagtcctgcctcacccttcagccaatcgccgcgcatccgccgcaacgtctacgagcagcagcacgaacacccgccctctttcctttgacttctctggcgacgatgtcataactgtagctccgcgatcatcccacgacactctttccaacactttgccgagactgacgaaggagagctcggacacgaaagtgatcggcccggatctgccacccacgccaccggctcattcacgaacatcttcgggcagcagcggctcgctcctgccttccacacctacaccggccgtgcgcccaaccgcccaggaagtcgtgactgccacaactgtcacaactgctgcgactgctgcgacacccgcgaccatttcgttaccaggcacaccaactcaccagaaaagcccacccacacccgaagtcactccacctcacgccggccgacggcccaaagctttcatccggcccgtcttgaccgaccgcaatccctctaaagtgacagccgattctcgcaccgagtcattcaaaacggcaagagaaagcccagggttctccgaggaagaggaaactacaacgccgagagcactacttccttccgcggccctctcgtcgcagatcgtggccaggcgacaactcgaggcaaagtcaaagaaaggccacgacttagggttgggccttggcctaggcttaggcatagaggacagcttaacaccgagaactcagcaggcattctttacgtttgacggagagtgggcttcgacaagcgacgtggagcaggaatgggatgacaatctgaacaggaacgtcatggtgcgaaagcgacggggtgaaccaaagcttgaaccaaaaatgaacggcatggcagaagtcattgaggacgtcacggtcacgcccacgaatgcgacaaaggctctgcgatctgtgtccctgcagcatgagcgcattcacgtccaaccctcacctcaatctcagcctcaacctcagcctcagcttgttgttcactatcttccaatggagtttccaattagagggaaatcgcactggggagcctcgacttccgagtcttcagtcagcacagacgtcaaacggtcctctgggatatcgaccaaatccaccgtttcaacggtcgtcgaggccatcctagtcgatgtccccccacaaaggcagaagactttgcgacatgtcagaaaacaaactgccctacgggactctagctcagaaatctcacccccgagctcttcctcagcctcggttcggcaggtcgagaggatcagacaatcacgacctcccgactcttaccatggcccccgaactgttagtatggcttccactggaacaacgcattcactagccagccgtaaaggacggcgcgaggtatggaagagtggcggcatcccggtggttgtcattcccgaccgcaaagaatccatgaagtctagatcatcagggcctccctcactgcgttctatgagtagcaatcatagcaagaggagcgtcagtcttggttctgctcagcgactcaatcaatctcggacctcagagctctcctcgcaccgtgcccaaccagcccaacgagggcgatccatgtcggaatcccttaactcacactcgcacggggtgattgcgactgatcagttaactatggattaccctcccattgtgcccagaaggacatcttctctttcagcccctacaagcagaaacacctcacgtgctggctcactgactgcagagagcttagaggcgcacaacacattgatggaactggatctgaagaaacttgatatgaagatgaagagacagccaccgcaggttctcgtggaacgtgcacctcctgtcgaggatgcaagtcacggatttaatcagagacaactgcacccggctgcctccatcgagtcgcacaagaatgacatttctaatcagaaatcactcgtggaccacaacggggacccattcttcggcaaacggctcacagtgcacaacacgccattctcacaggcctctgttgacacaaacggaacacactcggttgctgatattgctgaggcaatggcggtgaacatctacccccaccagaacaaatctgtcttgatggtgcaccacatgtcgagacccgtcaccattgcaaacggcatacaagaggagaggaactcccaggtcggcagttctacggcaacgaacggaatctcaggcaatcccgaaattacggctattggtcccgacggcggccctgtgacacctccccagccccagttctccatggatgatgtcgactcgcccctcagaaacccacgcgcacctcctgagccacccgcaatcaagttcattccggctacaccatctggtctaacgccgaatgctgagaaagaaaagatgctgggtaattacttcgaagagacacaaaagcggccgtcattggtccgtagagctttcagtcttcgcaaaggcttagagagtggaagctcgcgtgcttctggcttcctggctcgcaccttgtcgctatccaagaccatgcgtcgagataccgctgaaaatcccaatctagaaaaaggcagaaaagatacttcttctcaatatcccaccgccgacgatctgccccctgatgaggataagttgcaccccttctggcgccctgcaaatgaagtcgatctagataatgaagacgattgtgtctacgatgtgccagacgaacatggcgagcgcgattacagttactatccagaagaagatcgccctatgccagtgagaagaagaagcctcagtgaacggatgcgacgcacctttgcagttcttccaatcgaagatgacgatcactatgtcagggcagaccgacgcagtccagaacgccgcaccgtcaagcggacccctagcgggagattgcgggtcatgccccatcgggacagtcgtagttcgagcacccttcgctggagtagaggcttcagttcgcacgagtcaacagatgatcggccgtttacggctcctgaggataacaatcgccgaccttgggggatcgagaaacgagtggatgagcgtggccgacggatctttcctggttggcaagagaagcttgggcaatatcgacctcagaaccttcaacgccgcctcagtgagcaccgacgccagaaacgaactgaggcccttaggcagaaaatcagtgggcctcgtgaggttcgagacggcgttggggaggtcatcaagcgcaatagttacaagggtccttcataccaaaccggctcacacgttctttctccgaaccaccaccgtcaaactcagggctatcattcagggcttcgtgtctgaatggtctctctctatacattatacactagaactatgaagccaccaagagtccacacaacgctatcaatttttttattcagcagaacctactacattgcactaattaatcactggcaccaatttgatgatgaacatgagacacgaacacaccgtacacgacatacacaatcgccgaccaaccaaagggcagaattcttcctggtcccgaagactccctcacccttggcctctttctttcttgccttttcatgagccgtgacttcatgcttgtcaacaagtggataatttcacttaatcaatcgccgatcaccgcaaaaaaacacaaaagagaaccgcgtctcaaaaacttctgcatggtcggatcggaacaggtcacgcacaaaatcacaaaaaggggcaaagggctgcattcaggcaggcgacaacgaaaactttctgtcctctttcgaactttgcacttcttcttctccacctctaagggtgctgttgtcgttattcctccatctttatcttttcgacttccgcttatctctatttttatctcttacgaccactcatgaagatgacgacgttgacgttgacctcatgcatgaaacggagttcaggggcgtatgggaagaatccacactgagcatagggggtggtggatacctgaggaggggcgaggaaggatacgagagagtgagagagtgagcacatcaacgaaagcagacacgtgtgttctttggattcctggcagagccttgcatccaatcgtagctcctgagatcagctttcgcagactgactggatatggctatctcgtcacgtatcaatcagtcgatgccaccgctcacgaagtcgttgctcattttgcttagtcggggattcgtcacacatgtaaatcaatagattaggttcgggcggtgatgaaatgaatggatgatatttgctgtttttgcctgcatatcactgacttcccgatatatcttgtctgtctcttgtgcgtctaatgtagacatgatcttactctctcaccatacatcggtttacgtcaacatcagtcactctctccagagctagctgaattgcacgaaga

SEQ ID NO: 14113 - DNA, 1188 bp, Muscodor strobelii
  misc_feature: SGI cDNA ID NO. 564644
  misc_feature: Encodes the peptide sequence at SEQ ID NO 14114
atgcgagccactagtatctcattgagcttggtagctcatgcgttcgctcacagtccaggcatccagcagacagcgacaggaccacatcaatcgctatggtacaataccctaccaggtgatggtggaaaacaggcggattcggtgttcagtggaatttcgaccttcggtcgcctgccatactatccgtgcttgggctcgagtgagatatcatacgatcttgctttcatcggggccccttttgacactggtacgtcatataggccgggagcacgatttggaccttcgggaatccggcaaggatctcgacggcttaacctatatggcggatataatgtgcctttgcaaacgaatcctttcaattcctgggctacagttctcgactgtggagatatccccgtgacatcgtacgacaattcttgggccttaaagcagattgaagagggacactataacatcttatctcgggctccgagcacggatccggaaagaccaggtccttcgaagaagggcaagacgctcccaagagtgattacgcttggcggcgatcacacgatcacgcttccgctcttgagatccatcaatcgtgcatacggcccagtgtcggtcattcattttgatagtcatcttgatacttggcgacccaaagtgtttggtggctctccatccgaggtagcaagtatcaatcatggtacatacttctatcatgccgcgcaggagggtctgttgtctaacgacacgaatatacatgctggaattcgcacgactctcagtggacccagtgattacgagaatgacggatactgtggcttcgagatcgttgaggcacgtgaaatcgacacaattgggacagaaggcattatcaagaagatcgtagatcgagttggcaccactcagcctgtgtatctatccctcgatattgatacattagatccggcatttgcacctgccactggaacccctgagacgggcggatggagcactcgcgaactaaggaccatcttgagaggactcgaagacgtaaatctcattgcagcggatattgtggaagttgctcccgcgtatgacacaaacgctgagcatactactatggcagccgcggatgccctttatgagattatgagcatcatgctaaagaaaggtccgctaagccaaatggtgtctagtaaggaacttgataatgagctttga

SEQ ID NO: 14114 - protein, 395 aa, Muscodor strobelii
  misc_feature: SGI Peptide ID NO. 564644
  misc_feature (71)..(377): Pfam Id: PF00491 Pfam Desc: Arginase family
  misc_feature (269)..(377): Pfam Id: PF00491 Pfam Desc: Arginase family
  misc_feature (71)..(99): Pfam Id: PF00491 Pfam Desc: Arginase family
  misc_feature (174)..(214): Pfam Id: PF00491 Pfam Desc: Arginase family
  misc_feature (8)..(395): NCBI GI: 46110649 Blast Desc: FG02206.1 [Gibberella zeae PH-1]
  misc_feature (9)..(388): NCBI GI: 154298009 Blast Desc: conserved [Botryotinia fuckeliana B05.10] gi|150858284|gb|EDN33476.1| conserved [Botryotinia fuckeliana B05.10]
  misc_feature (9)..(389): NCBI GI: 156055716 Blast Desc: SS1G_05210 [Sclerotinia sclerotiorum 1980] gi|154702994|gb|EDO02733.1| SS1G_05210 [Sclerotinia sclerotiorum 1980]
  misc_feature (1)..(391): NCBI GI: 85102976 Blast Desc: NCU01348 [Neurospora crassa OR74A] gi|16944651|emb|CAD11410.1| conserved [Neurospora crassa] gi|28922979|gb|EAA32198.1| NCU01348 [Neurospora crassa OR74A]
  misc_feature (6)..(385): NCBI GI: 171691883 Blast Desc: protein product [Podospora anserina] gi|170945890|emb|CAP72691.1| protein product [Podospora anserina]
  misc_feature (17)..(391): NCBI GI: 39969847 Blast Desc: MGG_10533 [Magnaporthe grisea 70-15] gi|145010167|gb|EDJ94823.1| conserved [Magnaporthe grisea 70-15]
  misc_feature (1)..(395): NCBI GI: 169624790 Blast Desc: SNOG_15656 [Phaeosphaeria nodorum SN15] gi|111055911|gb|EAT77031.1| SNOG_15656 [Phaeosphaeria nodorum SN15]
  misc_feature (8)..(383): NCBI GI: 70997163 Blast Desc: agmatinase [Aspergillus fumigatus Af293] gi|66850972|gb|EAL91298.1| agmatinase, [Aspergillus fumigatus Af293] gi|159126939|gb|EDP52055.1| agmatinase, [Aspergillus
  misc_feature (8)..(383): NCBI GI: 212526972 Blast Desc: agmatinase, [Penicillium marneffei ATCC 18224] gi|210073041|gb|EEA27128.1| agmatinase, [Penicillium marneffei ATCC 18224]
  misc_feature (8)..(383): NCBI GI: 145249760 Blast Desc: An14g05960 [Aspergillus niger] gi|134081902|emb|CAK42157.1| protein product [Aspergillus niger]
  misc_feature (19)..(378): SWISSPROT Homolog: EC 3.5.3.11 Agmatinase
MRATSISLSLVAHAFAHSPGIQQTATGPHQSLWYNTLPGDGGKQADSVFSGISTFGRLPYYPCLGSSEISYDLAFIGAPFDTGTSYRPGARFGPSGIRQGSRRLNLYGGYNVPLQTNPFNSWATVLDCGDIPVTSYDNSWALKQIEEGHYNILSRAPSTDPERPGPSKKGKTLPRVITLGGDHTITLPLLRSINRAYGPVSVIHFDSHLDTWRPKVFGGSPSEVASINHGTYFYHAAQEGLLSNDTNIHAGIRTTLSGPSDYENDGYCGFEIVEAREIDTIGTEGIIKKIVDRVGTTQPVYLSLDIDTLDPAFAPATGTPETGGWSTRELRTILRGLEDVNLIAADIVEVAPAYDTNAEHTTMAAADALYEIMSIMLKKGPLSQMVSSKELDNEL

SEQ ID NO: 14115 - DNA, 796 bp, Muscodor strobelii
  misc_feature: SGI EST ID NO. CUFF.33584.0
  misc_feature: Variant of the nucleotide sequence at SEQ ID NO 14113
cggggtgtagcttttgtgcatttatagaaatgagactatatgacgtgcagacattcctgctcactgtttcgcaccattggtacatatgtccagcacttaacttgaatgaacttataagtttctgatcatgcgagccactagtatctcattgagcttggtagctcatgcgttcgctcacagtccaggcatccagcagacagcgacaggaccacatcaatcgctatggtacaataccctaccaggtgatggtggaaaacaggcggattcggtgttcagtggaatttcgaccttcggtcgcctgccatactatccgtgcttgggctcgagtgagatatcatacgatcttgctttcatcggggccccttttgacactggtacgtcatataggccgggagcacgatttggaccttcgggaatccggcaaggatctcgacggcttaacctatatggcggatataatgtgcctttgcaaacgaatcctttcaattcctgggctacagttctcgactgtggagatatccccgtgacatcgtacgacaattcttgggccttaaagcagattgaagagggacactataacatcttatctcgggctccgagcacggatccggaaagaccaggtccttcgaagaagggcaagacgctcccaagagtgattacgcttggcggcgatcacacgatcacgcttccgctcttgagatccatcaatcgtgcatacggcccagtgtcggtcattcattttgatagtcatcttgatacttggcgacccaaagtgtttggtggctctccatccgag

SEQ ID NO: 14116 - DNA, 606 bp, Muscodor strobelii
  misc_feature: SGI cDNA ID NO. 564645
  misc_feature: Encodes the peptide sequence at SEQ ID NO 14117
atgcagttcacgctcttggctctcgctgcgctctcggtggtacctgctcttgcagttccctcgattctgccgaatgaaaaccctaaatacttgaacaaagttcttggggcagttacatccgctaaatcaagttcgaaagaggaattgtccataatcgtcagtgccgagaacggcaccatcaatggccaggtcataccagccatccaggcttcattggccaacacggataatgttctcaccaatacgaccctcgtcgtaattccctcacttacagatatatttttgccacttgcgaaggatgaacttgtcacattgtcatcgatagtccaaaacgctcaaggagttgttggggacgctcgagactcgattagcctcgttcttgcaaacatgtctaacagctcgcttgtacttttgaagtccgagcttcttctgaccagcactcttatcgatccgttcgtcttgcctatcgtctcatgggctaatctcgccgtgctatatacttcaggccctacaaccactcagatcaggactactatcacggaaattcagaccatcgtggctgagatctcgggccctatttctgatgctatcaacaagattgattga

SEQ ID NO: 14117 - protein, 201 aa, Muscodor strobelii
  misc_feature: SGI Peptide ID NO. 564645
MQFTLLALAALSVVPALAVPSILPNENPKYLNKVLGAVTSAKSSSKEELSIIVSAENGTINGQVIPAIQASLANTDNVLTNTTLVVIPSLTDIFLPLAKDELVTLSSIVQNAQGVVGDARDSISLVLANMSNSSLVLLKSELLLTSTLIDPFVLPIVSWANLAVLYTSGPTTTQIRTTITEIQTIVAEISGPISDAINKID

SEQ ID NO: 14118 - DNA, 624 bp, Muscodor strobelii
  misc_feature: SGI cDNA ID NO. 564646
  misc_feature: Encodes the peptide sequence at SEQ ID NO 14119
atgtcgtccttaagaaacatgcagttcacgctcttggctctcgctgcgctctcggtggtacctgctcttgcagttccctcgattctgccgaatgaaaaccctaaatacttgaacaaagttcttggggcagttacatccgctaaatcaagttcgaaagaggaattgtccataatcgtcagtgccgagaacggcaccatcaatggccaggtcataccagccatccaggcttcattggccaacacggataatgttctcaccaatacgaccctcgtcgtaattccctcacttacagatatatttttgccacttgcgaaggatgaacttgtcacattgtcatcgatagtccaaaacgctcaaggagttgttggggacgctcgagactcgattagcctcgttcttgcaaacatgtctaacagctcgcttgtacttttgaagtccgagcttcttctgaccagcactcttatcgatccgttcgtcttgcctatcgtctcatgggctaatctcgccgtgctatatacttcaggccctacaaccactcagatcaggactactatcacggaaattcagaccatcgtggctgagatctcgggccctatttctgatgctatcaacaagattgattga

SEQ ID NO: 14119 - protein, 207 aa, Muscodor strobelii
  misc_feature: SGI Peptide ID NO. 564646
MSSLRNMQFTLLALAALSVVPALAVPSILPNENPKYLNKVLGAVTSAKSSSKEELSIIVSAENGTINGQVIPAIQASLANTDNVLTNTTLVVIPSLTDIFLPLAKDELVTLSSIVQNAQGVVGDARDSISLVLANMSNSSLVLLKSELLLTSTLIDPFVLPIVSWANLAVLYTSGPTTTQIRTTITEIQTIVAEISGPISDAINKID

SEQ ID NO: 14120 - DNA, 1770 bp, Muscodor strobelii
  misc_feature: SGI cDNA ID NO. 564647
  misc_feature: Elevated expression when VOC is produced
  misc_feature: Encodes the peptide sequence at SEQ ID NO 14121
atggttggaaccgccgctctgctgggtcgatccgaatcacccccggttgtcgtgttgtcagatctgcatttgatgtctcctttagatcattcccctgtgtcgccactaccagctcccagagtcgctgatctcctggagccccttgattcccaaattaaggaattgatgactataagtggctgtgctggcttatccttgggtgtatatcgcaatggcgaatgtcgatactacgccaattttggatatcgtgatattcaagcaaagcttccagtatcggaacaaacgatttttgctgcctgctctctaaccaagcttttcgcagctttgtctatggctcttgttattgacgacgaatcaaacaatctcagttgggatagtcgcgtcaaggacgtactaccagattttgcgccaagtgatcctattcttcgtgaacaaatgagcatcactgacgctctatcgcaccgcacgggtatgtcaacctctggtggtatctctcttggtagccagaacaacattattgttgcgcccgatgatggcatcaagttactcaacgatcaggttcccatcagaccctttcgagcccagatgcagtacaataatcttggttatatgatcggcgggctagtcattgacaaaattacggggtcttcatgggccaacattttccgcgagaagtttttcatcccgctagacatgaagcgtacccttactaaacaccctcctcaagaaactgaggacgttgccaaggcctacaacaccctcgataatgcgcaacctgtcgagatctctccagttcaacttggggagggaatttcaggaggctccagtggcggcattttttcgtgcgttgaagatcttttaaccgcatactcagcaatgatgaaggctatgaacgaccagttcgccacggggaagtcatcgtccgagaatctaccgttcaagagggttgctgacgtattttcggctaaagtaccactgaacctaccttcttttctcgaggcttcctacggactagggattgtgagaacacaactaccgggagttatgggtcaagtgggacagaatccagatctcatgcctgatggacaaatgcccatcgttgccaagggggcgacgtctcgtcttgcgttttatcatcagggcagtatgccgggggcactgtctgcaatcgccatgatacctgagctcaacacaactattgttgtcatgtcaaattctctctcgctgaacgactgtccagactgggtcatgcagctagtcatcgaacagcttcttgatgcgccagagcgaaacgactacatagcattagctagaacaagtgcagcctccactcttcggtggtaccctgataccttaagagctcttcaagaagagcacaagcgcggagcggcatcaagaaccctggaggcttatgtgggtacttattggaataagcaacgatacttcaagatcgaagtcactctcgagaatggaaaccttttctgggcagcacaaggtctagaaatggagaaattcgaactagatcattttgatggcgatacgtttgtttggctacgttcacgagactatctggccgcacgaggtcgctgggttgagtacccgccatcgtactggaagcttaagttttcgtccgataaggccactggaattgtcactactctcaattgggctcacgatcctaatgtcccctctggacagaacttctttcgcgatatgcagtcgcaaggctctcttgcttcaaagaatattttgactactgtgcaacactag

SEQ ID NO: 14121 - protein, 589 aa, Muscodor strobelii
  misc_feature: SGI Peptide ID NO. 564647
  misc_feature (48)..(423): Pfam Id: PF00144 Pfam Desc: Beta-lactamase
  misc_feature (39)..(581): NCBI GI: 256723497 Blast Desc: NECHADRAFT_42336 [Nectria haematococca mpVI 77-13-4]
  misc_feature (48)..(581): NCBI GI: 256723834 Blast Desc: NECHADRAFT_37243 [Nectria haematococca mpVI 77-13-4]
  misc_feature (41)..(564): NCBI GI: 46119888 Blast Desc: FG04813.1 [Gibberella zeae PH-1]
  misc_feature (45)..(559): NCBI GI: 242821692 Blast Desc: D-aminoacylase, [Talaromyces stipitatus ATCC 10500] gi|218712653|gb|EED12078.1| D-aminoacylase, [Talaromyces stipitatus ATCC 10500]
  misc_feature (45)..(563): NCBI GI: 258572668 Blast Desc: [Uncinocarpus reesii 1704] gi|237905366|gb|EEP79767.1| [Uncinocarpus reesii 1704]
  misc_feature (24)..(568): NCBI GI: 258570013 Blast Desc: [Uncinocarpus reesii 1704] gi|237904080|gb|EEP78481.1| [Uncinocarpus reesii 1704]
  misc_feature (44)..(568): NCBI GI: 46102717 Blast Desc: FG00057.1 [Gibberella zeae PH-1]
  misc_feature (28)..(568): NCBI GI: 255938135 Blast Desc: Pc13g14300 [Penicillium chrysogenum Wisconsin 54-1255] gi|211584458|emb|CAP92499.1| Pc13g14300 [Penicillium chrysogenum Wisconsin 54-1255]
  misc_feature (41)..(557): NCBI GI: 85090106 Blast Desc: NCU07766 [Neurospora crassa OR74A] gi|12718332|emb|CAC28567.1| conserved [Neurospora crassa] gi|28919602|gb|EAA29024.1| [Neurospora crassa OR74A]
  misc_feature (38)..(557): NCBI GI: 46119880 Blast Desc: FG04809.1 [Gibberella zeae PH-1]
  misc_feature: Useful for introducing or modulating the production of volatile compounds
MVGTAALLGRSESPPVVVLSDLHLMSPLDHSPVSPLPAPRVADLLEPLDSQIKELMTISGCAGLSLGVYRNGECRYYANFGYRDIQAKLPVSEQTIFAACSLTKLFAALSMALVIDDESNNLSWDSRVKDVLPDFAPSDPILREQMSITDALSHRTGMSTSGGISLGSQNNIIVAPDDGIKLLNDQVPIRPFRAQMQYNNLGYMIGGLVIDKITGSSWANIFREKFFIPLDMKRTLTKHPPQETEDVAKAYNTLDNAQPVEISPVQLGEGISGGSSGGIFSCVEDLLTAYSAMMKAMNDQFATGKSSSENLPFKRVADVFSAKVPLNLPSFLEASYGLGIVRTQLPGVMGQVGQNPDLMPDGQMPIVAKGATSRLAFYHQGSMPGALSAIAMIPELNTTIVVMSNSLSLNDCPDWVMQLVIEQLLDAPERNDYIALARTSAASTLRWYPDTLRALQEEHKRGAASRTLEAYVGTYWNKQRYFKIEVTLENGNLFWAAQGLEMEKFELDHFDGDTFVWLRSRDYLAARGRWVEYPPSYWKLKFSSDKATGIVTTLNWAHDPNVPSGQNFFRDMQSQGSLASKNILTTVQH

SEQ ID NO: 14122 - DNA, 1907 bp, Muscodor strobelii
  misc_feature: SGI EST ID NO. CUFF.33591.0
  misc_feature: Variant of the nucleotide sequence at SEQ ID NO 14120
cgccactaccagctcccagagtcgctgatctcctggagccccttgattcccaaattaaggaattgatgactataagtggctgtgctggcttatccttgggtgtatatcgcaatggcgaatgtcgatactacgccaattttggatatcgtgatattcaagcaaagcttccagtatcggaacaaacgatttttgctgcctgctctctaaccaagcttttcgcagctttgtctatggctcttgttattgacgacgaatcaaacaatctcagttgggatagtcgcgtcaaggacgtactaccagattttgcgccaagtgatcctattcttcgtgaacaaatgagcatcactgacgctctatcgcaccgcacgggtatgtcaacctctggtggtatctctcttggtagccagaacaacattattgttgcgcccgatgatggcatcaagttactcaacgatcaggttcccatcagaccctttcgagcccagatgcagtacaataatcttggttatatgatcggcgggctagtcattgacaaaattacggggtcttcatgggccaacattttccgcgagaagtttttcatcccgctagacatgaagcgtacccttactaaacaccctcctcaagaaactgaggacgttgccaaggcctacaacaccctcgataatgcgcaacctgtcgagatctctccagttcaacttggggagggaatttcaggaggctccagtggcggcattttttcgtgcgttgaagatcttttaaccgcatactcagcaatgatgaaggctatgaacgaccagttcgccacggggaagtcatcgtccgagaatctaccgttcaagagggttgctgacgtattttcggctaaagtaccactgaacctaccttcttttctcgaggcttcctacggactagggattgtgagaacacaactaccgggagttatgggtcaagtgggacagaatccagatctcatgcctgatggacaaatgcccatcgttgccaagggggcgacgtctcgtcttgcgttttatcatcagggcagtatgccgggggcactgtctgcaatcgccatgatacctgagctcaacacaactattgttgtcatgtcaaattctctctcgctgaacgactgtccagactgggtcatgcagctagtcatcgaacagcttcttgatgcgccagagcgaaacgactacatagcattagctagaacaagtgcagcctccactcttcggtggtaccctgataccttaagagctcttcaagaagagcacaagcgcggagcggcatcaagaaccctggaggcttatgtgggtacttattggaataagcaacgatacttcaagatcgaagtcactctcgagaatggaaaccttttctgggcagcacaaggtctagaaatggagaaattcgaactagatcattttgatggcgatacgtttgtttggctacgttcacgagactatctggccgcacgaggtcgctgggttgagtacccgccatcgtactggaagcttaagttttcgtccgataaggccactggaattgtcactactctcaattgggctcacgatcctaatgtcccctctggacagaacttctttcgcgatatgcagtcgcaaggctctcttgcttcaaagaatattttgactactgtgcaacactagaattatggacttcatcagatcgcccaagaatgttacataaggggggctagatggcaatcaatccatatgtctagttgtatagaaggtaacgcatatatcaaagagaagatcaataagattggagacatgagaaagccgtgtaagactctggttcttgacagccgaatgaagagcattcaagccacggtaacatattcccatttccaccctcatgtacttagtccagatcgacccgag

SEQ ID NO: 14123 - DNA, 1530 bp, Muscodor strobelii
  misc_feature: SGI cDNA ID NO. 564648
  misc_feature: Encodes the peptide sequence at SEQ ID NO 14124
atggtagaggctgttcccttgcctcttcgtctgcggcgtcttggaccgcgattggaaagaattctagaaattacagggacacccggctgctcggttggagttcatcaccagggcgaagaagtatggaaatgtggcatcgggcttcgagatgtcgaagaacgcctgccagtccagtctgatactgtttttctcttgcactcactatcaaagggtatcactactgccgcttttggctgccttgtcgatgaaggcaaggtgggatggacgacacccgtcaagtctatcatttctgagttgaacgatgggagcctcacgccgctagatctcctctctatgcgttcgggttaccacccagctgatgcgttttcctggcaagggcataatattgtgctactacgaaaagaagatactgttaggaactggaatggattgcaacagcttggagactttcgaagttcttacaaatacaacaactggggcgtaggtctggtcggcgttttaatcgaaaagcttactggccaggaactgtcactgttcttaaaacaaaagatttttgatccattgaagttgaaaaatacgaaaatgtacgactcaattcgtacagacaactgggccaactcctacgggactttgtcagataaaagcaacgtacgaattcctgaagggtcgattggagtgggcgtcttcaccgaaggagcatctggaatagtctcaactatcgacgatatgctgtgcttatatagcgcctacctaaacagcgctcagagatcatgcaaaacgatcttcaaaggccacaccttcttgtacccagatgcaaacgagctgctactggaacagtcatatgcttgtggatttgttcgttgccaacttccaggcccattaggtgcgattggaatgaatgcggctcagacgattatgcctcgggttttagaaggcaatacatcacgcctctgcatctatcaccagggcatgatgccaggatccgtctctaatattgctttaattcccgataccgagaccgtggttgccgtcgtttgtaattcctcgcatttgggtgatgctgcagactggatctcgcagatgataattgaggaaatcttcgacgcatcaaatcgaaacgactacgagcgattagctgaagaagttgcaacaaaaattcttgaccatctgccctcagtaggcagggaactgcaaaagaaacaacgccatgggacctctccaccctactcgctagatgactacgctgggatcttttggagcgatacgttcaaatttaagattgacgttcgcgtgaaggatgaccatctatctatcacattcaacaatgctgacctcgagtcctacgatttgcggcattatcacaacaatacctggatttggtggatgtcttacgatgaaagttgtagacgcggccggttcgtctatctaggtgatgctgattacttcttgatgcagtttgaaggggtaaatcgtcttctgtggcgaactggtcacaatggcgcggaaccctctatatttgtcagagaatag

SEQ ID NO: 14124 - protein, 509 aa, Muscodor strobelii
  misc_feature: SGI Peptide ID NO. 564648
  misc_feature (14)..(365): Pfam Id: PF00144 Pfam Desc: Beta-lactamase
  misc_feature (14)..(244): Pfam Id: PF00144 Pfam Desc: Beta-lactamase
  misc_feature (7)..(474): NCBI GI: 256723497 Blast Desc: NECHADRAFT_42336 [Nectria haematococca mpVI 77-13-4]
  misc_feature (14)..(509): NCBI GI: 46119888 Blast Desc: FG04813.1 [Gibberella zeae PH-1]
  misc_feature (10)..(490): NCBI GI: 242821692 Blast Desc: D-aminoacylase, [Talaromyces stipitatus ATCC 10500] gi|218712653|gb|EED12078.1| D-aminoacylase, [Talaromyces stipitatus ATCC 10500]
  misc_feature (10)..(503): NCBI GI: 255938135 Blast Desc: Pc13g14300 [Penicillium chrysogenum Wisconsin 54-1255] gi|211584458|emb|CAP92499.1| Pc13g14300 [Penicillium chrysogenum Wisconsin 54-1255]
  misc_feature (14)..(505): NCBI GI: 256723834 Blast Desc: NECHADRAFT_37243 [Nectria haematococca mpVI 77-13-4]
  misc_feature (10)..(487): NCBI GI: 258570013 Blast Desc: [Uncinocarpus reesii 1704] gi|237904080|gb|EEP78481.1| [Uncinocarpus reesii 1704]
  misc_feature (1)..(486): NCBI GI: 258572668 Blast Desc: [Uncinocarpus reesii 1704] gi|237905366|gb|EEP79767.1| [Uncinocarpus reesii 1704]
  misc_feature (16)..(473): NCBI GI: 46102717 Blast Desc: FG00057.1 [Gibberella zeae PH-1]
  misc_feature (10)..(486): NCBI GI: 85090106 Blast Desc: NCU07766 [Neurospora crassa OR74A] gi|12718332|emb|CAC28567.1| conserved [Neurospora crassa] gi|28919602|gb|EAA29024.1| [Neurospora crassa OR74A]
  misc_feature (18)..(453): NCBI GI: 46119880 Blast Desc: FG04809.1 [Gibberella zeae PH-1]
MVEAVPLPLRLRRLGPRLERILEITGTPGCSVGVHHQGEEVWKCGIGLRDVEERLPVQSDTVFLLHSLSKGITTAAFGCLVDEGKVGWTTPVKSIISELNDGSLTPLDLLSMRSGYHPADAFSWQGHNIVLLRKEDTVRNWNGLQQLGDFRSSYKYNNWGVGLVGVLIEKLTGQELSLFLKQKIFDPLKLKNTKMYDSIRTDNWANSYGTLSDKSNVRIPEGSIGVGVFTEGASGIVSTIDDMLCLYSAYLNSAQRSCKTIFKGHTFLYPDANELLLEQSYACGFVRCQLPGPLGAIGMNAAQTIMPRVLEGNTSRLCIYHQGMMPGSVSNIALIPDTETVVAVVCNSSHLGDAADWISQMIIEEIFDASNRNDYERLAEEVATKILDHLPSVGRELQKKQRHGTSPPYSLDDYAGIFWSDTFKFKIDVRVKDDHLSITFNNADLESYDLRHYHNNTWIWWMSYDESCRRGRFVYLGDADYFLMQFEGVNRLLWRTGHNGAEPSIFVRE

SEQ ID NO: 14125 - DNA, 2532 bp, Muscodor strobelii
  misc_feature: SGI cDNA ID NO. 564649
  misc_feature: Encodes the peptide sequence at SEQ ID NO 14126
atgacgcgtcctttggttataggtgcgctcgttgtcgggcttctatcaacgagcttcgctcagcaagccgtctacgcgcaatgcggtggcatcggatacactggttcggctacttgtgagtctggtaccgtgtgcacgtacatgaatgactactactctcagtgtcttccgtccacgacaacgttaacaaccacttctaaagcatccactactactgcaacgtctaagttatcaacatcgacgacgatagcaacaacatcgaaggcaacaattgctacaacttctgttgccgcctcaagcactggaataggagccgcagcaccttcgaccaatggtttcagagtccgcttaaacccgacgactctgcgtgtggtagatgatccagactggccagtatggacagtgcccggatcaacttcgtcgtcctatgttgtgaagggtgttactctcactttgtctgtgccaagtgatacgactctcaaaggcgctcgttacaagctggttcagcagcaattcgtgcccaatctgggcgagagaatgattggcgagggtatttcaaccgaatctacgacaggtgaagcaatcacactgtcaatcacaggtcttgcagcaggaaaacatacgctgctcgcgtatcataatgcttgggataatttagcctcagccgctagcctgacgatcactgttgatggaaccacggctatttcgggtcttgcgcaatctattcgtgttagcaatatttgggatgtagcacattcatacgtctcatttactgtcacttctacttcacaggttgtcaagattgtctacacaccttccggggccgacaagcgcgcattcttgaatgggtttgaggtcgattcacccaatatcgaccaacaagttcgacttccatatccgcatcataacgaccaacatatcgatattgctggtggctcaagtttgaccgcgacctggagtgctcctaagtctgttagcggggcgacgtacaacgtatatcttggaacaactaacacaagtctcactttatctggctctaccacctcaacatcttttgcctttactggactcaacactaatgactattattactggcgtgttgacgccgtttctggttcaaccacctacattggtcgccttttcttgttccgcttggcgcatcttgcctttcctggtgctgaaggctggggtcgctatgcgcgaggcggtcgaggaggcaaagtagtcaaggtcacaagcttagatgactcaactgccacagggacgcttcgatgggctttaacggtggcgacagggccacgcactgttgtgtttgatgttggtggtgtcatcactctgacttctcgtctcactgtcagtgatagctttattacacttgctggccagacagctccaggaaagggaattgctattcaaggctggccactaggtctaagcggggcatccgatgttatattccagcatatacgagttcgaccgggaaagaattacccggcgggaactgctcatgggttttcagcttccatcggcggcaatgttggctccttccaccataatcttctcgctcatgctgagggccgcagttggtctatggctggaggactcgacgatgctaccaactttgccggcaggctagatatccggaataacgttgtttataatttcggcagccgcgtcactgatggtggcgcgcaccaagtcaatttcgtcggtaactactataagccaggtcctgccagtgggcccaactacgatctccgtgctcaatacgaagacgaggctccgggcactcagacatactactgttccggaaactcgatgttgaacgtttttactcaggactcaacacaggtagtcggcgacggaacaggaaagacgtcttctgtcgcttgctacgccgatatcacggttccagatccagtcacctatcaaaaattctattcgagtcagttttttgagtcttacgttactacgcaaacatcaaccgaagcgttcaagattgtgatgggagataccggcgcccagcagccagtacaagacgaccacgacaagcgcatcattaaggagacggttactggcaccaccacatataaaggaagtgtaagtggcaaagcgggacttatcgatgatccagcggacgccggagggctcgagagttttcctactactacccgtccttcgacgtgggatgcgaacaatgatggtatcgcggattggtgggatggttcgaccagcggagcaggctacacagcattagagggatatttgaatttcatggcggagccgcacgtgttcgtgtcgccgtcaaaaaccgtggtcatcgatctctcggctatggctgccggccacgtgtcgccagcctacaccgtctctggatcaagcaagggaaccgtcaccgtttcttctgcaaaagctacttatactgctggatctactgcgggaatcgactcattcaaagtagctatcaaggattcgcaaggaagcacgctaacaagaacagtgggagtggctatctactctggtgcgaattag

SEQ ID NO: 14126 - protein, 843 aa, Muscodor strobelii
  misc_feature: SGI Peptide ID NO. 564649
  misc_feature (24)..(52): Pfam Id: PF00734 Pfam Desc: Fungal cellulose binding domain
  misc_feature (80)..(842): NCBI GI: 261352592 Blast Desc: pectate lyase [Verticillium albo-atrum VaMs.102]
  misc_feature (361)..(843): NCBI GI: 238492145 Blast Desc: conserved [Aspergillus flavus NRRL3357] gi|220695803|gb|EED52145.1| conserved [Aspergillus flavus NRRL3357]
  misc_feature (107)..(559): NCBI GI: 169782526 Blast Desc: [Aspergillus oryzae RIB40] gi|83774469|dbj|BAE64592.1| protein product [Aspergillus oryzae]
  misc_feature (122)..(838): NCBI GI: 146301834 Blast Desc: Fjoh_4098 [Flavobacterium johnsoniae UW101] gi|146156252|gb|ABQ07106.1| Pectin or pectate lyase-like protein; Polysaccharide lyase family 1 [Flavobacterium johnsoniae UW101]
  misc_feature (113)..(837): NCBI GI: 255532681 Blast Desc: Phep_2792 [Pedobacter heparinus DSM 2366] gi|255345665|gb|ACU04991.1| Phep_2792 [Pedobacter heparinus DSM 2366]
  misc_feature (125)..(836): NCBI GI: 146300211 Blast Desc: Fjoh_2456 [Flavobacterium johnsoniae UW101]
  misc_feature (125)..(836): NCBI GI: 222431104 Blast Desc: Pectin or pectate lyase-like protein; Polysaccharide lyase family 1 [Flavobacterium johnsoniae UW101]
  misc_feature (125)..(836): NCBI GI: 261416389 Blast Desc: Fisuc_2002 [Fibrobacter succinogenes subsp. succinogenes S85] gi|261372845|gb|ACX75590.1| Fisuc_2002 [Fibrobacter succinogenes subsp. succinogenes S85]
  misc_feature (133)..(764): NCBI GI: 268609452 Blast Desc: RflaF_08150 [Ruminococcus flavefaciens FD-1]
  misc_feature (107)..(343): NCBI GI: 238492143 Blast Desc: conserved [Aspergillus flavus NRRL3357] gi|220695802|gb|EED52144.1| conserved [Aspergillus flavus NRRL3357]
MTRPLVIGALVVGLLSTSFAQQAVYAQCGGIGYTGSATCESGTVCTYMNDYYSQCLPSTTTLTTTSKASTTTATSKLSTSTTIATTSKATIATTSVAASSTGIGAAAPSTNGFRVRLNPTTLRVVDDPDWPVWTVPGSTSSSYVVKGVTLTLSVPSDTTLKGARYKLVQQQFVPNLGERMIGEGISTESTTGEAITLSITGLAAGKHTLLAYHNAWDNLASAASLTITVDGTTAISGLAQSIRVSNIWDVAHSYVSFTVTSTSQVVKIVYTPSGADKRAFLNGFEVDSPNIDQQVRLPYPHHNDQHIDIAGGSSLTATWSAPKSVSGATYNVYLGTTNTSLTLSGSTTSTSFAFTGLNTNDYYYWRVDAVSGSTTYIGRLFLFRLAHLAFPGAEGWGRYARGGRGGKVVKVTSLDDSTATGTLRWALTVATGPRTVVFDVGGVITLTSRLTVSDSFITLAGQTAPGKGIAIQGWPLGLSGASDVIFQHIRVRPGKNYPAGTAHGFSASIGGNVGSFHHNLLAHAEGRSWSMAGGLDDATNFAGRLDIRNNVVYNFGSRVTDGGAHQVNFVGNYYKPGPASGPNYDLRAQYEDEAPGTQTYYCSGNSMLNVFTQDSTQVVGDGTGKTSSVACYADITVPDPVTYQKFYSSQFFESYVTTQTSTEAFKIVMGDTGAQQPVQDDHDKRIIKETVTGTTTYKGSVSGKAGLIDDPADAGGLESFPTTTRPSTWDANNDGIADWWDGSTSGAGYTALEGYLNFMAEPHVFVSPSKTVVIDLSAMAAGHVSPAYTVSGSSKGTVTVSSAKATYTAGSTAGIDSFKVAIKDSQGSTLTRTVGVAIYSGAN

SEQ ID NO: 14127 - DNA, 738 bp, Muscodor strobelii
  misc_feature: SGI EST ID NO. CUFF.33600.0
  misc_feature: Variant of the nucleotide sequence at SEQ ID NO 14125
ggactcaacacaggtagtcggcgacggaacaggaaagacgtcttctgtcgcttgctacgccgatatcacggttccagatccagtcacctatcaaaaattctattcgagtcagttttttgagtcttacgttactacgcaaacatcaaccgaagcgttcaagattgtgatgggagataccggcgcccagcagccagtacaagacgaccacgacaagcgcatcattaaggagacggttactggcaccaccacatataaaggaagtgtaagtggcaaagcgggacttatcgatgatccagcggacgccggagggctcgagagttttcctactactacccgtccttcgacgtgggatgcgaacaatgatggtatcgcggattggtgggatggttcgaccagcggagcaggctacacagcattagagggatatttgaatttcatggcggagccgcacgtgttcgtgtcgccgtcaaaaaccgtggtcatcgatctctcggctatggctgccggccacgtgtcgccagcctacaccgtctctggatcaagcaagggaaccgtcaccgtttcttctgcaaaagctacttatactgctggatctactgcgggaatcgactcattcaaagtagctatcaaggattcgcaaggaagcacgctaacaagaacagtgggagtggctatctactctggtgcgaattagtcttctaaatgcgtagtacaatattggtcaatgcatgccccgtg

SEQ ID NO: 14128 - DNA, 1347 bp, Muscodor strobelii
  misc_feature: SGI cDNA ID NO. 564650
  misc_feature: Encodes the peptide sequence at SEQ ID NO 14129
atgcgaatgccactaagacgtgctcttttctgcgtcgcagcagcagctatagtgtcctcgcctacggtcctcgcaactccgccagcggccaatacgatctggcaggtcaagccttcacttaactataccgacaaactatatgcgggatggagccaagtaccaataatgaaggagacggcggtctatgtcggcgtcactgaaaatcgcacatatgctcatcatccaattctcttcgaggcaaatgggacgacgtttctgtcattttcgtcagcactcatcgatgaagatagtatgggacaagacgtccggctaacaacatcttcagacggcggattgacatggtctgccaactctatcatcttgcctgcggctttgttgccaaatcagaccacagtacagaactttagttactattgcaatctgggcgtcacacagcgtgcgttacaggcgcatacgtttgttcctctacctaccggagagctttatcttgttggtctgtctgcaagtcgctattgtgtaggcggatctggtgggtttcaaagcgcgggtcgcatcgcccggcaaatcgacattcatggtacccctctcggcgatccctgctggaccgagatgaattcgtatgcgactacccagttgtttgacgacacggtgtacggaacgcaatacggaatgaagctttgtgctaagaaggaccggattaatgaagtgatgctccagccgaaaacagaaccatttgggtcaccatggctggccaataacgtattatactcggcggataatacgcactcggctggcgaactcacgcagagcgtgtggttcaacgataacacttcatcgacaggaggctattggcagcgtttctggcgggacacgtcaacctcttccatcaatacgcattctatttgggttgaatacaataacaataaaagcggcgcaggctggtatcctcaagtcctgcaacagaatggcaacaacatcttgcagacgaacattccggatgctggctctaagcaattcatgggcacgttctcccagacaggagatcggtacctcgtctcaaatcctcgatatgatgcgacagtcattgagcgccaaccattgaccattgcgctgtcacaaggtaaagatcaggcctatactcacatcggtgttcttcgaacaaacgcaagcgatgttatcgtacctgattccaggaacggagtgaagaaccatgctcatggattcagctaccctagtgcagtgcaggtcggctcaaacctgcttgttgcttacagcgaaaataaggaaaatattagagtgagcgtactaaactatgacagcctgacggaatttctcatatcacattga

SEQ ID NO: 14129 - protein, 448 aa, Muscodor strobelii
  misc_feature: SGI Peptide ID NO. 564650
  misc_feature (327)..(442): NCBI GI: 90021960 Blast Desc: Sde_2315 [Saccharophagus degradans 2-40] gi|89951560|gb|ABD81575.1| Sde_2315 [Saccharophagus degradans 2-40]
MRMPLRRALFCVAAAAIVSSPTVLATPPAANTIWQVKPSLNYTDKLYAGWSQVPIMKETAVYVGVTENRTYAHHPILFEANGTTFLSFSSALIDEDSMGQDVRLTTSSDGGLTWSANSIILPAALLPNQTTVQNFSYYCNLGVTQRALQAHTFVPLPTGELYLVGLSASRYCVGGSGGFQSAGRIARQIDIHGTPLGDPCWTEMNSYATTQLFDDTVYGTQYGMKLCAKKDRINEVMLQPKTEPFGSPWLANNVLYSADNTHSAGELTQSVWFNDNTSSTGGYWQRFWRDTSTSSINTHSIWVEYNNNKSGAGWYPQVLQQNGNNILQTNIPDAGSKQFMGTFSQTGDRYLVSNPRYDATVIERQPLTIALSQGKDQAYTHIGVLRTNASDVIVPDSRNGVKNHAHGFSYPSAVQVGSNLLVAYSENKENIRVSVLNYDSLTEFLISH

SEQ ID NO: 14130 - DNA, 1821 bp, Muscodor strobelii
  misc_feature: SGI EST ID NO. CUFF.33614.0
  misc_feature: Variant of the nucleotide sequence at SEQ ID NO 14128
cagaaatgcgaatgccactaagacgtgctcttttctgcgtcgcagcagcagctatagtgtcctcgcctacggtcctcgcaactccgccagcggccaatacgatctggcaggtcaagccttcacttaactataccgacaaactatatgcgggatggagccaagtaccaataatgaaggagacggcggtctatgtcggcgtcactgaaaatcgcacatatgctcatcatccaattctcttcgaggcaaatgggacgacgtttctgtcattttcgtcagcactcatcgatgaagatagtatgggacaagacgtccggctaacaacatcttcagacggcggattgacatggtctgccaactctatcatcttgcctgcggctttgttgccaaatcagaccacagtacagaactttagttactattgcaatctgggcgtcacacagcgtgcgttacaggcgcatacgtttgttcctctacctaccggagagctttatcttgttggtctgtctgcaagtcgctattgtgtaggcggatctggtgggtttcaaagcgcgggtcgcatcgcccggcaaatcgacattcatggtacccctctcggcgatccctgctggaccgagatgaattcgtatgcgactacccagttgtttgacgacacggtgtacggaacgcaatacggaatgaagctttgtgctaagaaggaccggattaatgaagtgatgctccagccgaaaacagaaccatttgggtcaccatggctggccaataacgtattatactcggcggataatacgcactcggctggcgaactcacgcagagcgtgtggttcaacgataacacttcatcgacaggaggctattggcagcgtttctggcgggacacgtcaacctcttccatcaatacgcattctatttgggttgaatacaataacaataaaagcggcgcaggctggtatcctcaagtcctgcaacagaatggcaacaacatcttgcagacgaacattccggatgctggctctaagcaattcatgggcacgttctcccagacaggagatcggtacctcgtctcaaatcctcgatatgatgcgacagtcattgagcgccaaccattgaccattgcgctgtcacaaggtaaagatcaggcctatactcacatcggtgttcttcgaacaaacgcaagcgatgttatcgtacctgattccaggaacggagtgaagaaccatgctcatggattcagctaccctagtgcagtgcaggtcggctcaaacctgcttgttgcttacagcgaaaataaggaaaatattagagtgagcgtactaaactatgacagcctgacggaatttctcatatcacattgatatagtactcaaatagagcaaatgggtaaatgggatactggaaatcccttgcgtttgagacatgacgcgaaggaaataccaggaaacaggaaaataaatcgatacgagcgctcttctgcgtcaaacatctagcctcagtgatctccaatgcttgaatcaaatccaggaacataattatgatagcattaaagcattagttgcttctctaaccatctcctatttcgtgttctttagtacctctagactattggaacgctcagagaaagaatcgcggatcgacgattgtgggactatgatggagataatttgaaaaatgaaacggcatagcttctggttttcgaaaatagcacatggtctcggtgggtacagtcataaaaatgacgataatcgagtgggggttctgaacgcagcccaatcagtaccaaaagttcgagactcaaattgatctatatgttcatgagaggacaga

SEQ ID NO: 14131 - DNA, 558 bp, Muscodor strobelii
  misc_feature: SGI cDNA ID NO. 564651
  misc_feature: Encodes the peptide sequence at SEQ ID NO 14132
atgaaggcttcttacgcactttctctcttcgccgccggtgccgccatggcccagagcaccggttccagctactcggcatccgcccaggcttcttcatcctctgaggctgctcaggcgtcggcctcttcttcctcttctgtggcagcccaggcatcttcctcatccgaatcagcagcctcgcaaagcgcaagcatttcttctgcagtttcttcagctactgccgccgtgtcttcagcagtcagcagtgcaacccaagctgtagcgtccggtgtctccagcgtcgccagcgccgccaacgctagctctaccttcacaggcggtactttcactgtcggctcttccaccgtgaccgtctccgggtctgctgctgccactggctacagcaactcgaccaccactagttctagcaccgccaactatcctaccggcccgtccagctcgagcagcgggagcggctcccctacctacagcgctgtccctggctctggggccaccaccattcaagctaccactggcctgctggctctcatcggtgttacagccttttacatgctgtaa

SEQ ID NO: 14132 - protein, 185 aa, Muscodor strobelii
  misc_feature: SGI Peptide ID NO. 564651
MKASYALSLFAAGAAMAQSTGSSYSASAQASSSSEAAQASASSSSSVAAQASSSSESAASQSASISSAVSSATAAVSSAVSSATQAVASGVSSVASAANASSTFTGGTFTVGSSTVTVSGSAAATGYSNSTTTSSSTANYPTGPSSSSSGSGSPTYSAVPGSGATTIQATTGLLALIGVTAFYML

SEQ ID NO: 14133 - DNA, 153 bp, Muscodor strobelii
  misc_feature: SGI EST ID NO. CUFF.33623.0
  misc_feature: Variant of the nucleotide sequence at SEQ ID NO 14131
atcagcagcctcgcaaagcgcaagcatttcttctgcagtttcttcagctactgccgccgtgtcttcagcagtcagcagtgcaacccaagctgtagcgtccggtgtctccagcgtcgccagcgccgccaacgctagctctaccttcacaggcgg

SEQ ID NO: 14134 - DNA, 1302 bp, Muscodor strobelii
  misc_feature: SGI cDNA ID NO. 564652
  misc_feature: Reduced expression when VOC is produced
  misc_feature: Encodes the peptide sequence at SEQ ID NO 14135
atgcacaccttcctcaagctccctccctccctcctgctccttctcgcagcgcaactcacaacgccaaccacggcgcaaaccgacaatggcctcccaacagccgtgcgcaagatgtctctcgacgaaggcgaaaagttcatgcccgaatactttgcattcgccgagccattcccactcccacaatccgggtacctctccgatcgatcattcttcctaacgcccgaagaagaagctctactcgcactcaacagctcggcatctcttgccttccggccgccattcccgcgacatcgcggtctccaatcggaagaaaattcggcagcagtttatcgccgcgcaagggatgcgttggctaggctccagggcagggatttcgtgtgtcccaccggatcacacgcatgcacgaatatcaaccagccagactactgctgcacagacgggacaacatgtttcgtcgttgaggatgcgccgaacgcgggaaatgtagggtgttgccccgatggccagacatgcggtggtagtgtcgccgactgtcgcgatgggagcacgtcttgtcccgcggaagacggaggaggttgttgtatcgaagggtttgtctgcgcgcaggtcggttgcatagcatcaacagtctccgtaatcacaacaacgacaacctcgacgacaatgataacatggcccactccaacaacatcaattaccaccgtaacagtaataataacgcccaccacctctccatccggcgcaacatcaacacgcacagtgaccagcactgcgtccaactccaacagcaataccaacacaggcggtggactcccaccagaccgcccaacatcttccggacctactacatcaacaaccgaaccccccacaacaacgaaaaccacgagcacttacaccccagattactgcccaacagggttctacgcctgcgtagcatccgcgggttcaggctgctgtcgcacgggccgagactgcagcaccacgtcttgtccgcccgtcgccagcaccacggtggtgaacggaaacggcatgacggtcgtcgtaccagtctcagacgcagacgccgtcactgcgaccgcgagttgcgcaagtgggtggttcaagtgcggagccgacgcgggagatgtgcccgggtgttgtcccagtgggtatgcgtgcgggactgcgagttgtacgctcagcgctgctacggctactgttaccgttcagaaggaacttcctggtaatatggctgagacttctagacccggtgcgatgatggtgttggggttgttgatggttgtagttggtttcgtttggtaa

SEQ ID NO: 14135 - protein, 433 aa, Muscodor strobelii
  misc_feature: SGI Peptide ID NO. 564652
  misc_feature (7)..(423): NCBI GI: 85098222 Blast Desc: NCU01403 [Neurospora crassa OR74A] gi|28922084|gb|EAA31347.1| [Neurospora crassa OR74A] gi|38566823|emb|CAE76130.1| [Neurospora crassa]
  misc_feature (10)..(428): NCBI GI: 46137321 Blast Desc: FG10176.1 [Gibberella zeae PH-1]
  misc_feature (32)..(407): NCBI GI: 154299337 Blast Desc: BC1G_11154 [Botryotinia fuckeliana B05.10] gi|150857419|gb|EDN32611.1| BC1G_11154 [Botryotinia fuckeliana B05.10]
  misc_feature (34)..(433): NCBI GI: 238489817 Blast Desc: GPI anchored protein, [Aspergillus flavus NRRL3357] gi|220698534|gb|EED54874.1| GPI anchored protein, [Aspergillus flavus NRRL3357]
  misc_feature (34)..(433): NCBI GI: 169763846 Blast Desc: [Aspergillus oryzae RIB40] gi|83770851|dbj|BAE60984.1| protein product [Aspergillus oryzae]
  misc_feature (7)..(433): NCBI GI: 255939868 Blast Desc: Pc16g03370 [Penicillium chrysogenum Wisconsin 54-1255] gi|211585326|emb|CAP93007.1| Pc16g03370 [Penicillium chrysogenum Wisconsin 54-1255]
  misc_feature (32)..(432): NCBI GI: 156044116 Blast Desc: SS1G_10161 [Sclerotinia sclerotiorum 1980] gi|154694550|gb|EDN94288.1| SS1G_10161 [Sclerotinia sclerotiorum 1980]
  misc_feature (1)..(407): NCBI GI: 256732150 Blast Desc: NECHADRAFT_69450 [Nectria haematococca mpVI 77-13-4]
  misc_feature (32)..(432): NCBI GI: 145610995 Blast Desc: MGG_11502 [Magnaporthe grisea 70-15] gi|145018335|gb|EDK02614.1| MGG_11502 [Magnaporthe grisea 70-15]
  misc_feature (38)..(429): NCBI GI: 238838954 Blast Desc: conserved [Microsporum canis CBS 113480]
  misc_feature: Useful for introducing or modulating the production of volatile compounds
MHTFLKLPPSLLLLLAAQLTTPTTAQTDNGLPTAVRKMSLDEGEKFMPEYFAFAEPFPLPQSGYLSDRSFFLTPEEEALLALNSSASLAFRPPFPRHRGLQSEENSAAVYRRARDALARLQGRDFVCPTGSHACTNINQPDYCCTDGTTCFVVEDAPNAGNVGCCPDGQTCGGSVADCRDGSTSCPAEDGGGCCIEGFVCAQVGCIASTVSVITTTTTSTTMITWPTPTTSITTVTVIITPTTSPSGATSTRTVTSTASNSNSNTNTGGGLPPDRPTSSGPTTSTTEPPTTTKTTSTYTPDYCPTGFYACVASAGSGCCRTGRDCSTTSCPPVASTTVVNGNGMTVVVPVSDADAVTATASCASGWFKCGADAGDVPGCCPSGYACGTASCTLSAATATVTVQKELPGNMAETSRPGAMMVLGLLMVVVGFVW

SEQ ID NO: 14136 - DNA, 1755 bp, Muscodor strobelii
  misc_feature: SGI EST ID NO. CUFF.33813.0
  misc_feature: Variant of the nucleotide sequence at SEQ ID NO 14134
gccaacaacaaccatcttattctgattcttcactttcacaagccatgctttccacttagtatgtttcaaacgtcacactcgttgaacagtaacttaaccttcaaattggagacaggaagcatcagctgaatatccgcatatacactcattaaccaacaataaccatcagatcgctgagcgcagaaacaaacagctgatgatgcacaccttcctcaagctccctccctccctcctgctccttctcgcagcgcaactcacaacgccaaccacggcgcaaaccgacaatggcctcccaacagccgtgcgcaagatgtctctcgacgaaggcgaaaagttcatgcccgaatactttgcattcgccgagccattcccactcccacaatccgggtacctctccgatcgatcattcttcctaacgcccgaagaagaagctctactcgcactcaacagctcggcatctcttgccttccggccgccattcccgcgacatcgcggtctccaatcggaagaaaattcggcagcagtttatcgccgcgcaagggatgcgttggctaggctccagggcagggatttcgtgtgtcccaccggatcacacgcatgcacgaatatcaaccagccagactactgctgcacagacgggacaacatgtttcgtcgttgaggatgcgccgaacgcgggaaatgtagggtgttgccccgatggccagacatgcggtggtagtgtcgccgactgtcgcgatgggagcacgtcttgtcccgcggaagacggaggaggttgttgtatcgaagggtttgtctgcgcgcaggtcggttgcatagcatcaacagtctccgtaatcacaacaacgacaacctcgacgacaatgataacatggcccactccaacaacatcaattaccaccgtaacagtaataataacgcccaccacctctccatccggcgcaacatcaacacgcacagtgaccagcactgcgtccaactccaacagcaataccaacacaggcggtggactcccaccagaccgcccaacatcttccggacctactacatcaacaaccgaaccccccacaacaacgaaaaccacgagcacttacaccccagattactgcccaacagggttctacgcctgcgtagcatccgcgggttcaggctgctgtcgcacgggccgagactgcagcaccacgtcttgtccgcccgtcgccagcaccacggtggtgaacggaaacggcatgacggtcgtcgtaccagtctcagacgcagacgccgtcactgcgaccgcgagttgcgcaagtgggtggttcaagtgcggagccgacgcgggagatgtgcccgggtgttgtcccagtgggtatgcgtgcgggactgcgagttgtacgctcagcgctgctacggctactgttaccgttcagaaggaacttcctggtaatatggctgagacttctagacccggtgcgatgatggtgttggggttgttgatggttgtagttggtttcgtttggtaaaagactgtgtggtatggtagtggacaggatataggggtggagatgctggttcgaagatcggatttacggacttacgttgcatgataagacgaggaatgaggagaattttagaatgggacatacccaggtcgctcgcgcgaggatttagatgttttttttgcattttaaagttcagggactatgcatgagggatgagttatggcggtatgtaggatgtgatagatcaagatattatggataaacttgattataac

SEQ ID NO: 14137 - DNA, 4668 bp, Muscodor strobelii
  misc_feature: SGI cDNA ID NO. 564653
  misc_feature: Encodes the peptide sequence at SEQ ID NO 14138
atggacgctctgctcgagtctctcatggctcatgggccctccgacgccatccctcccgacctcgatcctcccgccttcgacgacggcgatagcaccgagcaaaccgacttctctgtgtcggatgccgtagtcgatcagaagccggtcgatgacgaacctctcgacggcgtactcccagctgttcagggcttagacatcttcaatggacatgtctcggctgatgatgcagcctgggccgagcgatcgctagcagagaccccagaagagacccccagcatcgatctcgacatcgacataaatgcgcaacctcccgagccgaagcgagtacaccctattgaggtcgtcttcccacctgttgcggatccagagtcgtacattcccattgctaccagccatacgatcgagcgcatcctcaacatcgaagtggacgaagctaatacctactacaccgtcgagtatacagatggtcgcatagaagagatgtgtgcctgggacgacgtcattcactgcaagggcgcaagagctgccatagacaggtaccaggccccaaggtttggccctcagtcagccatggcaagtacccagaagcatgatcgctcagaggatgagtatgaggagtcagagtcggacgcaccccctgtgtccaaacggcctaagcgaggtgccaagtcagctcagcgaccaagcaggtatgcaactcgacaagcatctgctcccgcaaccaacgatgactccgactcggatcggggtcgagggaagccaatcattattggtgatgacgactccgagaatgatccagtggcatcgaacagtcagacatctcaacccacacgaagtaccaggtctcgtaacctcagaaatcgggtaccagtagccgcgatcgactcaggagacgagctcgcccaggactaccagaacgacgacgacgacgacggagatgcatttgttccgatagtatcggatctcgttcagtcgaaacggcctgccaggaagaaggttaccaaggtcagagccaagtcagctcgcaaggtcgtttatgatgatggcgactcggagatcgagttcgagaacaagcgccgctccgcccggggcaataggaacaccaagagcatgcgggatccagattttgatgagtttgacttgatcgaggagaaacagactactgctcccaaacacgcatcaatcaaagaaatatttcaagaattggacccagactctgctttcgtcagaatgcattcggacaaatgcgactcctgcggaagccagtcaagctcaaggggtcctctggttcactgtcaaggttgctcctactcgtaccataaggcttgcattggccttcgagccgtacgtgatcaccgagtcactaaagtcggccacgaagactttgtgctccaatgcaagttttgtatccagttctacaagaagaaagacaaggatggccgggctcctgaccatgccttgtgtcagtcacaattctgtcatgagcatggcgtgtcttgtttcgagttctcgaccaagaaaaccccgaaaatagaggagaatttgcgaatggacaatggcggcgaagatcccatcaccgaagttcaagcttctctcctcaacaatgccgacaacgttcttttcaggtgcgctagttgcaggcgtgcttatcactttgagcatctgccaagtcccacagttactctaggtggcggccgagatgtccgagatgttaaagaacagattctcgacgaatgcttgatctcagaatggcgttgcacggattgccttggtgcgaagcccatcaacgcgcttgttgcatggcgtccgcttccctcaaaggtattcccaggaggacaggctacgaatattgactatcccgaggatgacatcgaatatctggtccaatggagcaagcgatcccattaccatgatacctggatgcctggaccctgggtctatggaattgctcaaccgactatgcgaacttcatttctaaagcgtgaatcacagctatacccaaagatgaacacagaggatgcgattgaggaagagtggctcctagcagatgtgatcctcaacgtcaagtatcgtacacgaatcagtgcttctaccaaagaggaagaaaagagccacatcgacgacatagtttccgtgttcgtcaagtttcaaggtctgagttacgaagaagttgtttgggatgagcctccatccaaagcattggaaggcccatggacccaattcagcatcgcatatgacgagtacctcaacggcaaatactttaagaatatccctgagtacaagatgcttgatcggattgctgcttaccgagccttagactttggcgaggagtgcgaactgaaatcacagccatcgcaaatgaccaaaggccagctcatggaatatcaactagaaggtgtcaactttttgctatacaacttccaccaacggcacaatgtcatcctcgccgacgaaatggggctggggaagacagtccagatcgttgcattcatctccgccctcactcacacccagccatgctgctggccattcttagttgtcgtgccgaacgcaacatgtcccaattggcgacgcgaattgaaaaactgggcacccgatcttcgaattgtgacttatcacggtggcaaagcggcccaagatctcgcatataaacatgagctctttccagaggggaccaaggtcggaatgaaggctcacgttgtcatcatgtcctacgaggcggccgctaacgtaaggactgaatttcaaggagtgaactgggtcggacttattgttgacgaagggcaacgtctcaagaacgagaatactctgctctataaaaacctcgtgcaaatgaagattccctgtcgcattctcctgaccggtacgccattacagaacaacaagcgagagttgttcaacttgctgcagtttatcgatcctcagagaaatgcggaagtgctagacgcgcgctacgccgagttgaccaaggagaatcttcctgagctgcataaattgattcgaccttacttcttgcgtcgtactaaagcacaagtcctcaagtttttgcccggtatggcacagatcatattgccagtcacgatgacggtcattcaagagaaactgtccaaatcgatcatgtccaggaacccagaccttatcaaagccattatgtccagaaccaaagtaaaggctacagagaggaagtctctgaacaacatcctcgcagacctccgccagtgtctgtgtcacccgttctgcttcaacagtgaggtcgaagacaagagcgcaagtcccgagcagatgcatcgtaatctagtggaagcctccccgaagctcctattactcaatgttatgctacctcgtctaaagcaaaggggtaatcgtgtcttgatctttagccaattcctgcattgtctcactatcatcgaggacttcttgactggattaggtctcgagcacaacagaattgatggcagcctttctgcgcttgagaaacagaagcgtatcgatgcatacaatgcgcccaattccagtctcttcgctatgcttctctcaactcgagctggtggcgttggaatcaacctggccacagcagacactgtgatcatatttgatcctgatttcaatcctcatcaagacattcaagccctttcacgcgctcaccgtattggtcagaaaaacaaagtgctctgctttcaactgactaccaagaacacagtcgaagagaagattatgcaagtgggcaaaaggaagatggctctcgaccatgctctcatcgaatcgatggacgctaaagatgaagctggcgaagatctggaatccattctcaagcatggcgccgcagccttgttcagtaacgaatcggaggacaagatcgtctacgacgaggcttctgtagacagattgcttgatcgaagtcaagctgaaaacaccagcgcaggagacgatgcctctgccgaaacccaattttcatttgcccgagtatgggaaaatagcaaaggcgatcttgctaccaatgtcgacagtgaggagaataatgctgacgatactacgccggatgctacttccatttgggagaatattatcaaagagagggagagggagcaccaggaagagctcaaaaagaaccagagagagtatggtcggggtgccagaaggcgcggcactcagggcattgactacaaactcaaccgccctaagggagcggacctgattgactctgagaatgaggggactggtgatgaattgtatatcgaccaaaacgacatggatgacgatgatgacgatgacgatggtaacgcaagcgatacatttggggagaatgctcagaaaaatggtcaggcacccacggcgcgatcaaagcgcaaaggtacaccctcacccacaaaacccaagaagaagaagaccaagaccacaaaagttaacttgtcgtcaagtaatgggccagctggaggaagtgagcctcagcggcaccaaaacagtgtcggaggaatcactcaatactcgtccgacaagcctcgcggtaccaaaccagagctcgctccccccacagcgtcctcggccgaaaacaaagctcccaaccagccaggtttcgcagcctccactctcgacgcggcctctagtagtggagattccgagaccattgccaggccccaacagaaacatgaacaatcactcaattgctaa

SEQ ID NO: 14138 - protein, 1555 aa, Muscodor strobelii
  misc_feature: SGI Peptide ID NO. 564653
  misc_feature (1139)..(1218): Pfam Id: PF00271 Pfam Desc: Helicase conserved C-terminal domain
  misc_feature (795)..(1081): Pfam Id: PF00176 Pfam Desc: SNF2 family N-terminal domain
  misc_feature (795)..(974): Pfam Id: PF00176 Pfam Desc: SNF2 family N-terminal domain
  misc_feature (987)..(1081): Pfam Id: PF00176 Pfam Desc: SNF2 family N-terminal domain
  misc_feature (283)..(1358): NCBI GI: 171691859 Blast Desc: protein product [Podospora anserina] gi|170945878|emb|CAP72679.1| protein product [Podospora anserina]
  misc_feature (256)..(1383): NCBI GI: 212534796 Blast Desc: chromatin remodeling complex subunit (Chd3), [Penicillium marneffei ATCC 18224] gi|210069953|gb|EEA24043.1| chromatin remodeling complex subunit (Chd3), [Penicillium ATCC
  misc_feature (355)..(1457): NCBI GI: 239606660 Blast Desc: chromatin remodeling complex subunit [Ajellomyces dermatitidis ER-3]
  misc_feature (355)..(1457): NCBI GI: 261197277 Blast Desc: chromatin remodeling complex subunit [Ajellomyces dermatitidis SLH14081] gi|239595671|gb|EEQ78252.1| chromatin remodeling complex subunit [Ajellomyces dermatitidis SLH14081]
  misc_feature (360)..(1455): NCBI GI: 226289867 Blast Desc: chromodomain-helicase-DNA-binding protein [Paracoccidioides brasiliensis Pb18]
  misc_feature (362)..(1485): NCBI GI: 225682466 Blast Desc: chromodomain-helicase-DNA-binding protein [Paracoccidioides brasiliensis Pb03]
  misc_feature (360)..(1441): NCBI GI: 226280983 Blast Desc: chromodomain-helicase-DNA-binding protein [Paracoccidioides brasiliensis Pb01]
  misc_feature (250)..(1381): NCBI GI: 242791161 Blast Desc: chromatin remodeling complex subunit (Chd3), [Talaromyces stipitatus ATCC 10500] gi|218718291|gb|EED17711.1| chromatin remodeling complex subunit (Chd3), [Talaromyces ATCC
  misc_feature (358)..(1439): NCBI GI: 159125579 Blast Desc: chromatin remodeling complex subunit (Chd3), [Aspergillus fumigatus A1163]
  misc_feature (358)..(1439): NCBI GI: 70993280 Blast Desc: chromatin remodeling complex subunit (Chd3) [Aspergillus fumigatus Af293] gi|66849121|gb|EAL89449.1| chromatin remodeling complex subunit (Chd3), [Aspergillus Af293]
MDALLESLMAHGPSDAIPPDLDPPAFDDGDSTEQTDFSVSDAVVDQKPVDDEPLDGVLPAVQGLDIFNGHVSADDAAWAERSLAETPEETPSIDLDIDINAQPPEPKRVHPIEVVFPPVADPESYIPIATSHTIERILNIEVDEANTYYTVEYTDGRIEEMCAWDDVIHCKGARAAIDRYQAPRFGPQSAMASTQKHDRSEDEYEESESDAPPVSKRPKRGAKSAQRPSRYATRQASAPATNDDSDSDRGRGKPIIIGDDDSENDPVASNSQTSQPTRSTRSRNLRNRVPVAAIDSGDELAQDYQNDDDDDGDAFVPIVSDLVQSKRPARKKVTKVRAKSARKVVYDDGDSEIEFENKRRSARGNRNTKSMRDPDFDEFDLIEEKQTTAPKHASIKEIFQELDPDSAFVRMHSDKCDSCGSQSSSRGPLVHCQGCSYSYHKACIGLRAVRDHRVTKVGHEDFVLQCKFCIQFYKKKDKDGRAPDHALCQSQFCHEHGVSCFEFSTKKTPKIEENLRMDNGGEDPITEVQASLLNNADNVLFRCASCRRAYHFEHLPSPTVTLGGGRDVRDVKEQILDECLISEWRCTDCLGAKPINALVAWRPLPSKVFPGGQATNIDYPEDDIEYLVQWSKRSHYHDTWMPGPWVYGIAQPTMRTSFLKRESQLYPKMNTEDAIEEEWLLADVILNVKYRTRISASTKEEEKSHIDDIVSVFVKFQGLSYEEVVWDEPPSKALEGPWTQFSIAYDEYLNGKYFKNIPEYKMLDRIAAYRALDFGEECELKSQPSQMTKGQLMEYQLEGVNFLLYNFHQRHNVILADEMGLGKTVQIVAFISALTHTQPCCWPFLVVVPNATCPNWRRELKNWAPDLRIVTYHGGKAAQDLAYKHELFPEGTKVGMKAHVVIMSYEAAANVRTEFQGVNWVGLIVDEGQRLKNENTLLYKNLVQMKIPCRILLTGTPLQNNKRELFNLLQFIDPQRNAEVLDARYAELTKENLPELHKLIRPYFLRRTKAQVLKFLPGMAQIILPVTMTVIQEKLSKSIMSRNPDLIKAIMSRTKVKATERKSLNNILADLRQCLCHPFCFNSEVEDKSASPEQMHRNLVEASPKLLLLNVMLPRLKQRGNRVLIFSQFLHCLTIIEDFLTGLGLEHNRIDGSLSALEKQKRIDAYNAPNSSLFAMLLSTRAGGVGINLATADTVIIFDPDFNPHQDIQALSRAHRIGQKNKVLCFQLTTKNTVEEKIMQVGKRKMALDHALIESMDAKDEAGEDLESILKHGAAALFSNESEDKIVYDEASVDRLLDRSQAENTSAGDDASAETQFSFARVWENSKGDLATNVDSEENNADDTTPDATSIWENIIKEREREHQEELKKNQREYGRGARRRGTQGIDYKLNRPKGADLIDSENEGTGDELYIDQNDMDDDDDDDDGNASDTFGENAQKNGQAPTARSKRKGTPSPTKPKKKKTKTTKVNLSSSNGPAGGSEPQRHQNSVGGITQYSSDKPRGTKPELAPPTASSAENKAPNQPGFAASTLDAASSSGDSETIARPQQKHEQSLNC

SEQ ID NO: 14139 - DNA, 5839 bp, Muscodor strobelii
  misc_feature: SGI EST ID NO. CUFF.33763.1
  misc_feature: Variant of the nucleotide sequence at SEQ ID NO 14137
cacatctctcatcttgtcgccgttgtcgcattgctataccttcaatgtggccttgcgcgcgatcgcccacggctcagttttgacatatttcttttgttttttgtagtggcgcccacgcgaggtgtactgtagctgtagagctaggcgttatcccttcgacaatggacgctctgctcgagtctctcatggctcatgggccctccgacgccatccctcccgacctcgatcctcccgccttcgacgacggcgatagcaccgagcaaaccgacttctctgtgtcggatgccgtagtcgatcagaagccggtcgatgacgaacctctcgacggcgtactcccagctgttcagggcttagacatcttcaatggacatgtctcggctgatgatgcagcctgggccgagcgatcgctagcagagaccccagaagagacccccagcatcgatctcgacatcgacataaatgcgcaacctcccgagccgaagcgagtacaccctattgaggtcgtcttcccacctgttgcggatccagagtcgtacattcccattgctaccagccatacgatcgagcgcatcctcaacatcgaagtggacgaagctaatacctactacaccgtcgagtatacagatggtcgcatagaagagatgtgtgcctgggacgacgtcattcactgcaagggcgcaagagctgccatagacaggtaccaggccccaaggtttggccctcagtcagccatggcaagtacccagaagcatgatcgctcagaggatgagtatgaggagtcagagtcggacgcaccccctgtgtccaaacggcctaagcgaggtgccaagtcagctcagcgaccaagcaggtatgcaactcgacaagcatctgctcccgcaaccaacgatgactccgactcggatcggggtcgagggaagccaatcattattggtgatgacgactccgagaatgatccagtggcatcgaacagtcagacatctcaacccacacgaagtaccaggtctcgtaacctcagaaatcgggtaccagtagccgcgatcgactcaggagacgagctcgcccaggactaccagaacgacgacgacgacgacggagatgcatttgttccgatagtatcggatctcgttcagtcgaaacggcctgccaggaagaaggttaccaaggtcagagccaagtcagctcgcaaggtcgtttatgatgatggcgactcggagatcgagttcgagaacaagcgccgctccgcccggggcaataggaacaccaagagcatgcgggatccagattttgatgagtttgacttgatcgaggagaaacagactactgctcccaaacacgcatcaatcaaagaaatatttcaagaattggacccagactctgctttcgtcagaatgcattcggacaaatgcgactcctgcggaagccagtcaagctcaaggggtcctctggttcactgtcaaggttgctcctactcgtaccataaggcttgcattggccttcgagccgtacgtgatcaccgagtcactaaagtcggccacgaagactttgtgctccaatgcaagttttgtatccagttctacaagaagaaagacaaggatggccgggctcctgaccatgccttgtgtcagtcacaattctgtcatgagcatggcgtgtcttgtttcgagttctcgaccaagaaaaccccgaaaatagaggagaatttgcgaatggacaatggcggcgaagatcccatcaccgaagttcaagcttctctcctcaacaatgccgacaacgttcttttcaggtgcgctagttgcaggcgtgcttatcactttgagcatctgccaagtcccacagttactctaggtggcggccgagatgtccgagatgttaaagaacagattctcgacgaatgcttgatctcagaatggcgttgcacggattgccttggtgcgaagcccatcaacgcgcttgttgcatggcgtccgcttccctcaaaggtattcccaggaggacaggctacgaatattgactatcccgaggatgacatcgaatatctggtccaatggagcaagcgatcccattaccatgatacctggatgcctggaccctgggtctatggaattgctcaaccgactatgcgaacttcatttctaaagcgtgaatcacagctatacccaaagatgaacacagaggatgcgattgaggaagagtggctcctagcagatgtgatcctcaacgtcaagtatcgtacacgaatcagtgcttctaccaaagaggaagaaaagagccacatcgacgacatagtttccgtgttcgtcaagtttcaaggtctgagttacgaagaagttgtttgggatgagcctccatccaaagcattggaaggcccatggacccaattcagcatcgcatatgacgagtacctcaacggcaaatactttaagaatatccctgagtacaagatgcttgatcggattgctgcttaccgagccttagactttggcgaggagtgcgaactgaaatcacagccatcgcaaatgaccaaaggccagctcatggaatatcaactagaaggtgtcaactttttgctatacaacttccaccaacggcacaatgtcatcctcgccgacgaaatggggctggggaagacagtccagatcgttgcattcatctccgccctcactcacacccagccatgctgctggccattcttagttgtcgtgccgaacgcaacatgtcccaattggcgacgcgaattgaaaaactgggcacccgatcttcgaattgtgacttatcacggtggcaaagcggcccaagatctcgcatataaacatgagctctttccagaggggaccaaggtcggaatgaaggctcacgttgtcatcatgtcctacgaggcggccgctaacgtaaggactgaatttcaaggagtgaactgggtcggacttattgttgacgaagggcaacgtctcaagaacgagaatactctgctctataaaaacctcgtgcaaatgaagattccctgtcgcattctcctgaccggtacgccattacagaacaacaagcgagagttgttcaacttgctgcagtttatcgatcctcagagaaatgcggaagtgctagacgcgcgctacgccgagttgaccaaggagaatcttcctgagctgcataaattgattcgaccttacttcttgcgtcgtactaaagcacaagtcctcaagtttttgcccggtatggcacagatcatattgccagtcacgatgacggtcattcaagagaaactgtccaaatcgatcatgtccaggaacccagaccttatcaaagccattatgtccagaaccaaagtaaaggctacagagaggaagtctctgaacaacatcctcgcagacctccgccagtgtctgtgtcacccgttctgcttcaacagtgaggtcgaagacaagagcgcaagtcccgagcagatgcatcgtaatctagtggaagcctccccgaagctcctattactcaatgttatgctacctcgtctaaagcaaaggggtaatcgtgtcttgatctttagccaattcctgcattgtctcactatcatcgaggacttcttgactggattaggtctcgagcacaacagaattgatggcagcctttctgcgcttgagaaacagaagcgtatcgatgcatacaatgcgcccaattccagtctcttcgctatgcttctctcaactcgagctggtggcgttggaatcaacctggccacagcagacactgtgatcatatttgatcctgatttcaatcctcatcaagacattcaagccctttcacgcgctcaccgtattggtcagaaaaacaaagtgctctgctttcaactgactaccaagaacacagtcgaagagaagattatgcaagtgggcaaaaggaagatggctctcgaccatgctctcatcgaatcgatggacgctaaagatgaagctggcgaagatctggaatccattctcaagcatggcgccgcagccttgttcagtaacgaatcggaggacaagatcgtctacgacgaggcttctgtagacagattgcttgatcgaagtcaagctgaaaacaccagcgcaggagacgatgcctctgccgaaacccaattttcatttgcccgagtatgggaaaatagcaaaggcgatcttgctaccaatgtcgacagtgaggagaataatgctgacgatactacgccggatgctacttccatttgggagaatattatcaaagagagggagagggagcaccaggaagagctcaaaaagaaccagagagagtatggtcggggtgccagaaggcgcggcactcagggcattgactacaaactcaaccgccctaagggagcggacctgattgactctgagaatgaggggactggtgatgaattgtatatcgaccaaaacgacatggatgacgatgatgacgatgacgatggtaacgcaagcgatacatttggggagaatgctcagaaaaatggtcaggcacccacggcgcgatcaaagcgcaaaggtacaccctcacccacaaaacccaagaagaagaagaccaagaccacaaaagttaacttgtcgtcaagtaatgggccagctggaggaagtgagcctcagcggcaccaaaacagtgtcggaggaatcactcaatactcgtccgacaagcctcgcggtaccaaaccagagctcgctccccccacagcgtcctcggccgaaaacaaagctcccaaccagccaggtttcgcagcctccactctcgacgcggcctctagtagtggagattccgagaccattgccaggccccaacagaaacatgaacaatcactcaattgctaagtccatcgcaccgatcatcccaagtcaaacacttccctcgcaacacaccaaacctgtaccatcttcttccggtattcctcacaccttgccaacttatcatccttaccccgctgtccaacttcctaacgggatgtggtcaatgacaggcaggattgggggaggttcgccttgtgccctgtgtcaagaaaaacacgaccccatcgagaagccctgcgttgatctcaacatggaaaagtctctgcggcttgcacttgatcgcttacgcttacaaaatcgtacagatgtagctatagatggcaccgtcagatttctacggaaacgactggatgtggtcacatcaccagactggaagcactcggctagacagagcttgtaatatattagagctttccaaaatagagaagacgaagtcgacggcctctaactgggaggcttgttgagctggaagcaaagggcatcttcgtagaattgcgacgttcagccatttcactaaggagccaacatcacttgcagaaagctagacagataaagagcttgcaatgtaggaatagatactcaataccaaaaatgagataaaagagaccaaaagcccaccaattagctctgtatgtgatgtgaacatgttcgttgtacacttcattgcggagatggcatggtcaaagcttggggccagtgcagtcttctatcttttacctaggccattattcttctagcatttctatttcaacctattcgatctttcttatacgtgtgagtcgcttgcccttggcagatctgctaactgtttgtcacgtggaatccagagcacacaaaaactgcaggtaaccgtggctgtgatgcatccaaccttatttgaggtttctgtgcaaacagtcgtgatactcacaactgcctatctgcctgatgcaaatgtgcttgacccagccaaaaggctttgcttgtcttgcttgcttgcttgatttgcttgcctgggaaaatccactagggccagtctcgttggctgcccgtgc

SEQ ID NO: 14140 - DNA, 1671 bp, Muscodor strobelii
  misc_feature: SGI cDNA ID NO. 564654
  misc_feature: Encodes the peptide sequence at SEQ ID NO 14141
atggacactcctctgcccaccgctcccgccagcccagcagccaactcctcccccctcgacctatctggctcctctagcagatctcgcgcctccacaagagacacttctcccagctctgtatcatttaattctcgtgaatcttctccgttaatagatttggaatcggaggtcttcattacggccactaccgcagatacaattcctgaccctcggcccgacgacatggagcggaacccgttccagtctgttaacgacagacgaaacaagctcgtcaacgaacgaggaataccattagaccaaattcaggatgctcaacagctgcaaacttcgccacaaattagtcgtcctgttccgcagtcattgagttctcttcgtagtctcacgtcttccaattggcgagctcatcaaacggaagaggcagctttctcgcattcgcgcaatgtttccttgtataatcctctcgacccatcgggtaaagctcattcgccgcatgttggtttacatcattcgggctatccaaatttccagatagatcaacaacagcaatatcatcccagcactggcgtggtctcctatccaaaccacaaagtcctctccgaatcacaacttgatacgaactatgcatactgctatgatcgtggcgatggccagtatactcgtctcatccctgccgatatgcttcccgccatgcgagacatacccgctactcaagttagctgcgttggcatgatagtgattccgcaacctcgcggttttcctccaaacggccgctcaagcaatacgcaacctgtcactctcgtccagagcccgtccgtaagccctacctcaccagcggatcaaatccagtcaagaatcgacaacatcgtcgctaccacccctcaaacgcccgctctgtcatcctctgtcggcggtgcgacttctggctcatcgagcggcaacttctcaaaccaacgacgacctaagatctattgcgataagtgggttcatgaaggtgtttgtgctttcacacaacagggctgcaagtacaagcatgagatgccgttcgacaagaaaacccagaaccagctcggcctcttccatggattcccagcatggtggaaaaaacaccaggctgatcttgcgaggcagcgagaaacgccatttgacagcggcaacagccctgtcggagtcatgagcggaagtagtatcacaaagaaagacccagcattgaccagtgagcgatattttgatcctgttggctcaagtatgggacagggtggtgatggtggtggaagttttcccgtacagcttgacacgggcggacatactatgtggcagcagagtgacaacttcgccggtggtccccaagcctcgggttcggcaacgcccatcggacgaggtggcggcaccagatctaatctagctccgtacggatcgcccttcggacctattgcacctcctgcgcgcaataccgttgcgatgagctcctcggccacgccaacttcttcgtcaccatatgatacaccccaaagaaacaaacgagagggtcaggcgggtggtaataccacgaagcccacctcagtcccaagcgacaacccatatgcctctctagcagcactgagagagcgcagagaaagagagaattggaaatatgagaacatcgacgacgacactgagcatgttgacgtgtga

SEQ ID NO: 14141 - protein, 556 aa, Muscodor strobelii
  misc_feature: SGI Peptide ID NO. 564654
  misc_feature (207)..(378): NCBI GI: 145611038 Blast Desc: MGG_00688 [Magnaporthe grisea 70-15] gi|145018382|gb|EDK02661.1| MGG_00688 [Magnaporthe grisea 70-15]
  misc_feature (194)..(380): NCBI GI: 256731762 Blast Desc: NECHADRAFT_41200 [Nectria haematococca mpVI 77-13-4]
  misc_feature (207)..(424): NCBI GI: 85099688 Blast Desc: NCU01407 [Neurospora crassa OR74A] gi|28922357|gb|EAA31594.1| [Neurospora crassa OR74A] gi|38566826|emb|CAE76133.1| [Neurospora crassa]
  misc_feature (122)..(376): NCBI GI: 46137315 Blast Desc: FG10173.1 [Gibberella zeae PH-1]
  misc_feature (204)..(375): NCBI GI: 116179966 Blast Desc: CHGG_00611 [Chaetomium globosum CBS 148.51] gi|88184908|gb|EAQ92376.1| CHGG_00611 [Chaetomium globosum CBS 148.51]
  misc_feature (209)..(378): NCBI GI: 171691861 Blast Desc: protein product [Podospora anserina] gi|170945879|emb|CAP72680.1| protein product [Podospora anserina]
  misc_feature (202)..(371): NCBI GI: 154316745 Blast Desc: BC1G_03790 [Botryotinia fuckeliana B05.10] gi|150845402|gb|EDN20595.1| BC1G_03790 [Botryotinia fuckeliana B05.10]
  misc_feature (202)..(370): NCBI GI: 156043553 Blast Desc: SS1G_10780 [Sclerotinia sclerotiorum 1980] gi|154695167|gb|EDN94905.1| SS1G_10780 [Sclerotinia sclerotiorum 1980]
  misc_feature (207)..(276): NCBI GI: 261351834 Blast Desc: conserved [Verticillium albo-atrum VaMs.102]
  misc_feature (321)..(375): NCBI GI: 169606518 Blast Desc: SNOG_06302 [Phaeosphaeria nodorum SN15] gi|111065013|gb|EAT86133.1| SNOG_06302 [Phaeosphaeria nodorum SN15]
MDTPLPTAPASPAANSSPLDLSGSSSRSRASTRDTSPSSVSFNSRESSPLIDLESEVFITATTADTIPDPRPDDMERNPFQSVNDRRNKLVNERGIPLDQIQDAQQLQTSPQISRPVPQSLSSLRSLTSSNWRAHQTEEAAFSHSRNVSLYNPLDPSGKAHSPHVGLHHSGYPNFQIDQQQQYHPSTGVVSYPNHKVLSESQLDTNYAYCYDRGDGQYTRLIPADMLPAMRDIPATQVSCVGMIVIPQPRGFPPNGRSSNTQPVTLVQSPSVSPTSPADQIQSRIDNIVATTPQTPALSSSVGGATSGSSSGNFSNQRRPKIYCDKWVHEGVCAFTQQGCKYKHEMPFDKKTQNQLGLFHGFPAWWKKHQADLARQRETPFDSGNSPVGVMSGSSITKKDPALTSERYFDPVGSSMGQGGDGGGSFPVQLDTGGHTMWQQSDNFAGGPQASGSATPIGRGGGTRSNLAPYGSPFGPIAPPARNTVAMSSSATPTSSSPYDTPQRNKREGQAGGNTTKPTSVPSDNPYASLAALRERRERENWKYENIDDDTEHVDV

SEQ ID NO: 14142 - DNA, 1465 bp, Muscodor strobelii
  misc_feature: SGI EST ID NO. CUFF.33646.0
  misc_feature: Variant of the nucleotide sequence at SEQ ID NO 14140
gtccatatccgaatacttcgcagagataaccttttcttttgaactaacgatgagtctgctgacacattttctccctaatagtcaagaatcgacaacatcgtcgctaccacccctcaaacgcccgctctgtcatcctctgtcggcggtgcgacttctggctcatcgagcggcaacttctcaaaccaacgacgacctaagatctattgcgataagtgggttcatgaaggtgtttgtgctttcacacaacagggctgcaagtacaagcatgagatgccgttcgacaagaaaacccagaaccagctcggcctcttccatggattcccagcatggtggaaaaaacaccaggctgatcttgcgaggcagcgagaaacgccatttgacagcggcaacagccctgtcggagtcatgagcggaagtagtatcacaaagaaagacccagcattgaccagtgagcgatattttgatcctgttggctcaagtatgggacagggtggtgatggtggtggaagttttcccgtacagcttgacacgggcggacatactatgtggcagcagagtgacaacttcgccggtggtccccaagcctcgggttcggcaacgcccatcggacgaggtggcggcaccagatctaatctagctccgtacggatcgcccttcggacctattgcacctcctgcgcgcaataccgttgcgatgagctcctcggccacgccaacttcttcgtcaccatatgatacaccccaaagaaacaaacgagagggtcaggcgggtggtaataccacgaagcccacctcagtcccaagcgacaacccatatgcctctctagcagcactgagagagcgcagagaaagagagaattggaaatatgagaacatcgacgacgacactgagcatgttgacgtgtgattcttggctctctgatgctgctgatagccagaacgtgactctaaatcaacaaccacattacaacacatcaggagtgttattctacatttcaataaagtgccagacgttccaaaccctaacttcagcatacatcaccgcctagtcacgacaagatccacgaattcatgcatctcggacgttttgacaaaacgaccccccatacaaatacacagtatcgcacatcgcaaatgttccgtatctacatatcgagtctccactaacacacacaaacatcaccaaccagcgatcaaccacttcaaccacaacacagcgagacaaccaacaacgaaagaaaatataaggcaaaggcggcatataaaactgatagaaaaggaaacaaacatccatgtttgcctcgttactgcctcattcccgggatataacactgcatttttgcgcgggaccggtgcattgtttaaggacatggaaggggaaattcgtggtttcaactgggcattgggcgagggtatgggatatgaattgtagatagacatatatctacgagcatgaatgaaatgaa

SEQ ID NO: 14143 - DNA, 1398 bp, Muscodor strobelii
  misc_feature: SGI cDNA ID NO. 564655
  misc_feature: Encodes the peptide sequence at SEQ ID NO 14144
atgtctgaccgacagccatcatctgttcatgtagatggagtctatcgctttcccccaagtgggatcactatcgctgtagctggaggaggagtgggagggctacttttcgctctagaggcatggcgccagggtcacgaagtcaaggtcttcgaaaggagccccaaactagacacactagctcagtttgaaagagagtcgtacgatgcgaaaatgagtctgtgggactatgctgggaacaaactcgtccatgttggcgatggaccttggaaccagaagggcgcagtacatccggcaaaggatgtttacattccgtggattgagtctcgacacagtattgctgatatgttgaccaagcagtgtgagagactgggaatcaagatcaactatggttgtactgttgttgcttacaatgagacacctgacaaagcgaggttgactattgaacgtgccggaactacatctcaggaagaagcagatattgctatagcggcagatggcgtcggtacgaaaagccacatgttcatcacaggacgtgaggtcaaggcaaccagcagcggctactcgatataccgtgggactatcccaacacaactgatcaagagcaagcttagccccagaatcgtggacaaattctttccagataatggagatgatgagtttaggatgtatctttcacctcccgatacgcataccaacattattttgacgaaggatgtctttggttatgcggctacgtataaagatcctaactacaaaacgaaagacatcaaagaggattggaactcaacagtatcgagtgacgagctgatcaacaggtattctacctatgatcccgatttgcttgagatattccgcctcgttccagataacagtgtcaccgattggacactgcgctggcgtgatccacaaccagtctgggcttctgcgggtggacgcgtggtccaacttggcgatagtgcccatgcgttcttacctacgtcgggaaatggggcgacacaggcctgtgaagatgcgctgtcactcgcaacctgtttgcgcatcgccggaaagggcaaagaaaatatcgcgacgaaagtgcataacaagcttcgatttgagcgagtttcgacaattcagagatttggcgtgacgactcgatcggttctacaccgtgttgatctggacgctgtcagaaagaacccggaagtgctcaaggagaagatgacgatgccggaatggatctggggtcacgatccggttcagtacgcgatggacaattatgcagcggcggaaaagcatgttactgaaggcgctgacttcgagaacacgaatttgccgcccggatataaatacgagccttggacagttgctagtgagatggaggttgaccagtacgcaagcaatgttgagacagaatag

SEQ ID NO: 14144 - protein, 465 aa, Muscodor strobelii
  misc_feature: SGI Peptide ID NO. 564655
  misc_feature (7)..(453): NCBI GI: 145241630 Blast Desc: An09g01440 [Aspergillus niger] gi|134078000|emb|CAK49065.1| protein product [Aspergillus niger]
  misc_feature (8)..(465): NCBI GI: 1019889 Blast Desc: maackiain detoxification [Nectria haematococca]
  misc_feature (16)..(465): NCBI GI: 261336163 Blast Desc: similar to monooxygenase [Alternaria alternata]
  misc_feature (16)..(454): NCBI GI: 238482491 Blast Desc: monoxygenase, [Aspergillus flavus NRRL3357] gi|220700534|gb|EED56872.1| monoxygenase, [Aspergillus flavus NRRL3357]
  misc_feature (16)..(455): NCBI GI: 119483740 Blast Desc: monoxygenase [Neosartorya fischeri NRRL 181] gi|119409929|gb|EAW19876.1| monoxygenase [Neosartorya fischeri NRRL 181]
  misc_feature (20)..(465): NCBI GI: 115389020 Blast Desc: ATEG_02837 [Aspergillus terreus NIH2624] gi|114194411|gb|EAU36111.1| ATEG_02837 [Aspergillus terreus NIH2624]
  misc_feature (14)..(463): NCBI GI: 256720797 Blast Desc: [Nectria haematococca mpVI 77-13-4]
  misc_feature (14)..(449): NCBI GI: 46134089 Blast Desc: FG09184.1 [Gibberella zeae PH-1]
  misc_feature (16)..(464): NCBI GI: 256720024 Blast Desc: NECHADRAFT_56548 [Nectria haematococca mpVI 77-13-4]
  misc_feature (14)..(465): NCBI GI: 67902424 Blast Desc: AN8199.2 [Aspergillus nidulans FGSC A4] gi|40739653|gb|EAA58843.1| AN8199.2 [Aspergillus nidulans FGSC A4] gi|259480976|tpe|CBF74093.1| TPA: MAK1-like monooxygenase,
  misc_feature (37)..(374): SWISSPROT Homolog: EC 1.14.13.24 3-hydroxybenzoate 6-monooxygenase
MSDRQPSSVHVDGVYRFPPSGITIAVAGGGVGGLLFALEAWRQGHEVKVFERSPKLDTLAQFERESYDAKMSLWDYAGNKLVHVGDGPWNQKGAVHPAKDVYIPWIESRHSIADMLTKQCERLGIKINYGCTVVAYNETPDKARLTIERAGTTSQEEADIAIAADGVGTKSHMFITGREVKATSSGYSIYRGTIPTQLIKSKLSPRIVDKFFPDNGDDEFRMYLSPPDTHTNIILTKDVFGYAATYKDPNYKTKDIKEDWNSTVSSDELINRYSTYDPDLLEIFRLVPDNSVTDWTLRWRDPQPVWASAGGRVVQLGDSAHAFLPTSGNGATQACEDALSLATCLRIAGKGKENIATKVHNKLRFERVSTIQRFGVTTRSVLHRVDLDAVRKNPEVLKEKMTMPEWIWGHDPVQYAMDNYAAAEKHVTEGADFENTNLPPGYKYEPWTVASEMEVDQYASNVETE

SEQ ID NO: 14145 - DNA, 2415 bp, Muscodor strobelii
  misc_feature: SGI EST ID NO. CUFF.33655.0
  misc_feature: Variant of the nucleotide sequence at SEQ ID NO 14143
tttcagatcgcttcacgtcgtaaactatcccatttcgagccccgacgaaggatctggccagatcctccatgacggcatttaaagagatcacaattgcaacgacgctcgaaggtacaaaatcacgacgattattggctgacagaagtgcgttttcaattcatcatctgcctttgttagcacacaagatgcacagagaacgctcttaccttgagagctgggggatcctgtagtagtccgaaaacctcacctctcaaaccccttgtcacgcttagtcacaggcgcgcgctccaccctctgattggatcagtatgtcgccatggcagacgcccatatgctgccacaggcacatatgttgtgatagaatacacgaaagcaattgtcagattgaacatgtcgggtccgtatacgctccgtgtatgcttcgcgacatgttgtcgcttaaaaacatagcccgagaaataccagggcttggagctataagaaatcaaccgacaggagtaattcaagttctcgacactcatcatgtctgaccgacagccatcatctgttcatgtagatggagtctatcgctttcccccaagtgggatcactatcgctgtagctggaggaggagtgggagggctacttttcgctctagaggcatggcgccagggtcacgaagtcaaggtcttcgaaaggagccccaaactagacacactaggcgacacgtttggtatcatggctacggcattcgttcactctgcgatattttccgaagatgaaagctcagtttgaaagagagtcgtacgatgcgaaaatgagtctgtgggactatgctgggaacaaactcgtccatgttggcgatggaccttggaaccagaagggcgcagtacatccggcaaaggatgtttacattccgtggattgagtctcgacacagtattgctgatatgttgaccaagcagtgtgagagactgggaatcaagatcaactatggttgtactgttgttgcttacaatgagacacctgacaaagcgaggttgactattgaacgtgccggaactacatctcaggaagaagcagatattgctatagcggcagatggcgtcggtacgaaaagccacatgttcatcacaggacgtgaggtcaaggcaaccagcagcggctactcgatataccgtgggactatcccaacacaactgatcaagagcaagcttagccccagaatcgtggacaaattctttccagataatggagatgatgagtttaggatgtatctttcacctcccgatacgcataccaacattattttgacgaaggatgtctttggttatgcggctacgtataaagatcctaactacaaaacgaaagacatcaaagaggattggaactcaacagtatcgagtgacgagctgatcaacaggtattctacctatgatcccgatttgcttgagatattccgcctcgttccagataacagtgtcaccgattggacactgcgctggcgtgatccacaaccagtctgggcttctgcgggtggacgcgtggtccaacttggcgatagtgcccatgcgttcttacctacgtcgggaaatggggcgacacaggcctgtgaagatgcgctgtcactcgcaacctgtttgcgcatcgccggaaagggcaaagaaaatatcgcgacgaaagtgcataacaagcttcgatttgagcgagtttcgacaattcagagatttggcgtgacgactcgatcggttctacaccgtgttgatctggacgctgtcagaaagaacccggaagtgctcaaggagaagatgacgatgccggaatggatctggggtcacgatccggttcagtacgcgatggacaattatgcagcggcggaaaagcatgttactgaaggcgctgacttcgagaacacgaatttgccgcccggatataaatacgagccttggacagttgctagtgagatggaggttgaccagtacgcaagcaatgttgagacagaatagcgtgtgagacacaagaattcttggtataggaccggatttaggaagctatagagttcgcccaatatgattgttccgcgtgtgtcaaacagtatgatttcgataaagctgatattccatagccaggatgcagctccgcggcatattacagatctccttcgaattgagtacactaagcagaatattttgtgcgacgttaagctgatgtctagcctccttgtttcaagtgttatacctgttattattatcatctcgttgccctccagtccagtcttctcgatagaactgctcttcaccttttcccgcaatggctgctatgaagataatcgagaagtacgtcacagctttgaagtgcacgcgccaaagtcatcgacatcaactcagtcctgtcagaaccaagtcaaatatcaagagcgattgagacctgagcaaga

SEQ ID NO: 14146 - DNA, 1365 bp, Muscodor strobelii
  misc_feature: SGI cDNA ID NO. 564656
  misc_feature: Encodes the peptide sequence at SEQ ID NO 14147
atgtctgaccgacagccatcatctgttcatgtagatggagtctatcgctttcccccaagtgggatcactatcgctgtagctggaggaggagtgggagggctacttttcgctctagaggcatggcgccagggtcacgaagtcaaggtcttcgaaaggagccccaaactagacacactagctcagtttgaaagagagtcgtacgatgcgaaaatgagtctgtgggactatgctgggaacaaactcgtccatgttggcgatggaccttggaaccagaagggcgcagtacatccggcaaaggatgtttacattccgtggattgagtctcgacacagtattgctgatatgttgaccaagcagtgtgagagactgggaatcaagatcaactatggttgtactgttgttgcttacaatgagacacctgacaaagcgaggttgactattgaacgtgccggaactacatctcaggaagaagcagatattgctatagcggcagatggcgtcggtacgaaaagccacatgttcatcacaggacgtgaggtcaaggcaaccagcagcggctactcgatataccgtgggactatcccaacacaactgatcaagagcaagcttagccccagaatcgtggacaaattctttccagataatggagatgatgagtttaggatgtatctttcacctcccgatacgcataccaacattattttgacgaaggatgtctttggttatgcggctacgtataaagattggaactcaacagtatcgagtgacgagctgatcaacaggtattctacctatgatcccgatttgcttgagatattccgcctcgttccagataacagtgtcaccgattggacactgcgctggcgtgatccacaaccagtctgggcttctgcgggtggacgcgtggtccaacttggcgatagtgcccatgcgttcttacctacgtcgggaaatggggcgacacaggcctgtgaagatgcgctgtcactcgcaacctgtttgcgcatcgccggaaagggcaaagaaaatatcgcgacgaaagtgcataacaagcttcgatttgagcgagtttcgacaattcagagatttggcgtgacgactcgatcggttctacaccgtgttgatctggacgctgtcagaaagaacccggaagtgctcaaggagaagatgacgatgccggaatggatctggggtcacgatccggttcagtacgcgatggacaattatgcagcggcggaaaagcatgttactgaaggcgctgacttcgagaacacgaatttgccgcccggatataaatacgagccttggacagttgctagtgagatggaggttgaccagtacgcaagcaatgttgagacagaatag

SEQ ID NO: 14147 - protein, 454 aa, Muscodor strobelii
  misc_feature: SGI Peptide ID NO. 564656
  misc_feature (7)..(442): NCBI GI: 145241630 Blast Desc: An09g01440 [Aspergillus niger] gi|134078000|emb|CAK49065.1| protein product [Aspergillus niger]
  misc_feature (8)..(454): NCBI GI: 1019889 Blast Desc: maackiain detoxification [Nectria haematococca]
  misc_feature (20)..(454): NCBI GI: 115389020 Blast Desc: ATEG_02837 [Aspergillus terreus NIH2624] gi|114194411|gb|EAU36111.1| ATEG_02837 [Aspergillus terreus NIH2624]
  misc_feature (16)..(444): NCBI GI: 119483740 Blast Desc: monoxygenase [Neosartorya fischeri NRRL 181] gi|119409929|gb|EAW19876.1| monoxygenase [Neosartorya fischeri NRRL 181]
  misc_feature (16)..(454): NCBI GI: 261336163 Blast Desc: similar to monooxygenase [Alternaria alternata]
  misc_feature (16)..(443): NCBI GI: 238482491 Blast Desc: monoxygenase, [Aspergillus flavus NRRL3357] gi|220700534|gb|EED56872.1| monoxygenase, [Aspergillus flavus NRRL3357]
  misc_feature (14)..(452): NCBI GI: 256720797 Blast Desc: [Nectria haematococca mpVI 77-13-4]
  misc_feature (14)..(438): NCBI GI: 46134089 Blast Desc: FG09184.1 [Gibberella zeae PH-1]
  misc_feature (12)..(454): NCBI GI: 145232414 Blast Desc: An02g05170 [Aspergillus niger] gi|134056570|emb|CAK37624.1| protein product [Aspergillus niger]
  misc_feature (16)..(453): NCBI GI: 256720024 Blast Desc: NECHADRAFT_56548 [Nectria haematococca mpVI 77-13-4]
  misc_feature (37)..(363): SWISSPROT Homolog: EC 1.14.13.24 3-hydroxybenzoate 6-monooxygenase
MSDRQPSSVHVDGVYRFPPSGITIAVAGGGVGGLLFALEAWRQGHEVKVFERSPKLDTLAQFERESYDAKMSLWDYAGNKLVHVGDGPWNQKGAVHPAKDVYIPWIESRHSIADMLTKQCERLGIKINYGCTVVAYNETPDKARLTIERAGTTSQEEADIAIAADGVGTKSHMFITGREVKATSSGYSIYRGTIPTQLIKSKLSPRIVDKFFPDNGDDEFRMYLSPPDTHTNIILTKDVFGYAATYKDWNSTVSSDELINRYSTYDPDLLEIFRLVPDNSVTDWTLRWRDPQPVWASAGGRVVQLGDSAHAFLPTSGNGATQACEDALSLATCLRIAGKGKENIATKVHNKLRFERVSTIQRFGVTTRSVLHRVDLDAVRKNPEVLKEKMTMPEWIWGHDPVQYAMDNYAAAEKHVTEGADFENTNLPPGYKYEPWTVASEMEVDQYASNVETE

SEQ ID NO: 14148 - DNA, 2415 bp, Muscodor strobelii; identical to SEQ ID NO: 14145
  misc_feature: SGI EST ID NO. CUFF.33655.0
  misc_feature: Variant of the nucleotide sequence at SEQ ID NO 14146

SEQ ID NO: 14149 - DNA, 879 bp, Muscodor strobelii
  misc_feature: SGI cDNA ID NO. 564657
  misc_feature: Encodes the peptide sequence at SEQ ID NO 14150
atggccagtcacaacgagaagactttggcgtattcgcccattccagacgactcgtctgcgacggagtccgatgatctcctatatgaaggctacggctcatcatcaaggaacaagacgcctcgtttctctcgttggcttattgcgggcggggtagtagccttcgttgtatactctgcagttcttgtttcactaccatacatgtggtttcagaagcagaggatacatggcgcaaatgtgatcgataccccgatcagagattacatcaaatacgagcccacgtttttcggccattctgagacgtccaaggactacaacctcgtcgggaagccaagcgatgagcttgatgcggcgtggagttcaatcatgcagtatttctattctgaagtacctaaagaatatatccaatcacttgatcgtgagagggatagtatccagctacctaacggcaattacttggctaattatgcgttcattcacgagctgcactgcctgaaacggctacatcagtcttacttcccagactactattggccagatatgacagaggaggagaaggaactccagttagaacacagcttgcactgcctacaaatgctcgtggaggtcaccatgtgtaaagctgacgagacaccgctgaccatgtactggtttgacgagagtattctgcctggcggaaacagaactattgcgcatgagtgtaagaactgggatactttgatcgagggtatggagaaggtgaagatcgaccctttcacacctggccttcttgttcaccccaaatacgggcctgtcgtaccagatggacgacagacgaaattggacaatagaatcggctacgttaagcatgcgacacctctgaacagaacgcaatggccataa

SEQ ID NO: 14150 - protein, 292 aa, Muscodor strobelii
  misc_feature: SGI Peptide ID NO. 564657
  misc_feature (34)..(273): NCBI GI: 225562435 Blast Desc: conserved [Ajellomyces capsulatus G186AR]
  misc_feature (15)..(262): NCBI GI: 225680940 Blast Desc: conserved [Paracoccidioides brasiliensis Pb03]
  misc_feature (34)..(273): NCBI GI: 261204982 Blast Desc: conserved [Ajellomyces dermatitidis SLH14081] gi|239592287|gb|EEQ74868.1| conserved [Ajellomyces dermatitidis SLH14081] gi|239611559|gb|EEQ88546.1| conserved [Ajellomyces
  misc_feature (46)..(262): NCBI GI: 28881151 Blast Desc: [Neurospora crassa]
  misc_feature (82)..(262): NCBI GI: 85079216 Blast Desc: NCU03374 [Neurospora crassa OR74A] gi|28917367|gb|EAA27073.1| [Neurospora crassa OR74A]
  misc_feature (52)..(268): NCBI GI: 115401678 Blast Desc: [Aspergillus terreus NIH2624] gi|114190368|gb|EAU32068.1| [Aspergillus terreus NIH2624]
  misc_feature (34)..(270): NCBI GI: 242804865 Blast Desc: conserved [Talaromyces stipitatus ATCC 10500] gi|218717807|gb|EED17228.1| conserved [Talaromyces stipitatus ATCC 10500]
  misc_feature (13)..(273): NCBI GI: 226292646 Blast Desc: conserved [Paracoccidioides brasiliensis Pb18]
  misc_feature (16)..(253): NCBI GI: 212534390 Blast Desc: conserved [Penicillium marneffei ATCC 18224] gi|210069750|gb|EEA23840.1| conserved [Penicillium marneffei ATCC 18224]
  misc_feature (108)..(250): NCBI GI: 242809614 Blast Desc: conserved [Talaromyces stipitatus ATCC 10500] gi|218716032|gb|EED15454.1| conserved [Talaromyces stipitatus ATCC 10500]
MASHNEKTLAYSPIPDDSSATESDDLLYEGYGSSSRNKTPRFSRWLIAGGVVAFVVYSAVLVSLPYMWFQKQRIHGANVIDTPIRDYIKYEPTFFGHSETSKDYNLVGKPSDELDAAWSSIMQYFYSEVPKEYIQSLDRERDSIQLPNGNYLANYAFIHELHCLKRLHQSYFPDYYWPDMTEEEKELQLEHSLHCLQMLVEVTMCKADETPLTMYWFDESILPGGNRTIAHECKNWDTLIEGMEKVKIDPFTPGLLVHPKYGPVVPDGRQTKLDNRIGYVKHATPLNRTQWP

SEQ ID NO: 14151 - DNA, 918 bp, Muscodor strobelii
  misc_feature: SGI EST ID NO. CUFF.33659.0
  misc_feature: Variant of the nucleotide sequence at SEQ ID NO 14149
atcagagattacatcaaatacgagcccacgtttttcggccattctgagacgtccaaggactacaacctcgtcgggaagccaagcgatgagcttgatgcggcgtggagttcaatcatgcagtatttctattctgaagtacctaaagaatatatccaatcacttgatcgtgagagggatagtatccagctacctaacggcaattacttggctaattatgcgttcattcacgagctgcactgcctggtgagcaaccatagatcgacctcgtccacaggatgatctaacaatcttcacacagaaacggctacatcagtcttacttcccagactactattggccagatatgacagaggaggagaaggaactccagttagaacacagcttgcactgcctacaaatgctcgtggaggtcaccatgtgtaaagctgacgagacaccgctgaccatgtactggtttgacgagagtattctgcctggcggaaacagaactattgcgcatgagtgtaagaactgggatactttgatcgagggtatggagaaggtgaagatcgaccctttcacacctggccttcttgttcaccccaaatacgggcctgtcgtaccagatggacgacagacgaaattggacaatagaatcggctacgttaagcatgcgacacctctgaacagaacgcaatggccataagaagggtccttaatgtaagggaaacgtgaaataatttcgggtcgttagattagtgagtttataggaagataccatagcataagacagtctcgacagtcaattggcatagctatgtctggactatgaaccgccctaaagtgacgcccgatcctgtaataggaaactgcttgtgtgctatcaacatgtcagcatttagttcgcaggcctcattgcttgactattggaccctctta

SEQ ID NO: 14152 - DNA, 360 bp, Muscodor strobelii
  misc_feature: SGI cDNA ID NO. 564658
  misc_feature: Elevated expression when VOC is produced
  misc_feature: Encodes the peptide sequence at SEQ ID NO 14153
atgcaattcaaacaacttgctattgtagctccgctactacttgcaactgcttctgcagtagcaattcccgtacaagacaagcgagctcccgtccccgagaaagacaacgacgatatctggttgtggaagaagaatcagttggagaaggacaatgatgacatttggttgtggaagaagggtgaactcgagaagaaggagaaagacaacgatgacatctggctatggaagaagggccaggccgagaagcagaagagagacggtctagagaaagacaatgatgacatctggctctggaagaaaggtcagactcagaagaagagcaagcttgagaaggataacgatgatatctggctctggtaa

SEQ ID NO: 14153 - protein, 119 aa, Muscodor strobelii
  misc_feature: SGI Peptide ID NO. 564658
  misc_feature: Useful for introducing or modulating the production of volatile compounds
MQFKQLAIVAPLLLATASAVAIPVQDKRAPVPEKDNDDIWLWKKNQLEKDNDDIWLWKKGELEKKEKDNDDIWLWKKGQAEKQKRDGLEKDNDDIWLWKKGQTQKKSKLEKDNDDIWLW

SEQ ID NO: 14154 - DNA, 1385 bp, Muscodor strobelii
  misc_feature: SGI EST ID NO. CUFF.33661.0
  misc_feature: Variant of the nucleotide sequence at SEQ ID NO 14152
tatacaacgaaggctactaccccgcccgcaataagccaacgagagaaacgaggcgtcttgttccttgatgatgagccgtagccttcatataggagatcatcggactccgtcgcagacgagtcgtctggaatgggcgaatacgccaaagtcttctcgttgtgactggccatgatttaactcaagacgtgaactctttggatcaggagatgaatattatgacatgagcggaagcgatagataggaagacaaaggcaggcgaggttggaagtttagaggacgaatgtaacaggaggatcctattgattaactagctagcatactggcaactccacggttattggttcagatccgttgcaaccaagataacatgatacttcgaagtaaagacgtcagtcccggccagtcggtttagatatccgaaggatcatcggtggcgacgctaagcatcggctcctgcgccgcacgactactccgctaaataaccataattgtacgacaactccaccaatatcatatataccttcccaaaccatacagtatcttcccaccattatcttcttggcggtgttcgatcatggattcttaccatggcattggacccttcgcgcggggtatatgaatccttcggggccagaggatgacacgaggtttgatgccaatacgtcgtgtaatgatcggcttgataggagcggtatggcgaattattcatcatcatgctcctagttctcacgcggggcaaccgcattgaccacgcggcttgcgcaacaatggatgtagtgttgataaagacttgatggagccgatcaaggatagactctcttctcctctgacttccacttgtcgaggtttccgtctctaacctgtaatcaatacatcaataaccacctaagactaaaggtcatcatgcaattcaaacaacttgctattgtagctccgctactacttgcaactgcttctgcagtagcaattcccgtacaagacaagcgagctcccgtccccgagaaagacaacgacgatatctggttgtggaagaagaatcagttggagaaggacaatgatgacatttggttgtggaagaagggtgaactcgagaagaaggagaaagacaacgatgacatctggctatggaagaagggccaggccgagaagcagaagagagacggtctagagaaagacaatgatgacatctggctctggaagaaaggtcagactcagaagaagagcaagcttgagaaggataacgatgatatctggctctggtaaatcttgtgtaccaaccatgaagatctaaatgatggacctcatatccgtcaaacatacatagcaaggaacaagccgattgagcttttcagcatcattcatgcaattaagttattaaatatcaa

SEQ ID NO: 14155 - DNA, 1008 bp, Muscodor strobelii
  misc_feature: SGI cDNA ID NO. 564659
  misc_feature: Encodes the peptide sequence at SEQ ID NO 14156
atgcagctcagtaggaggtgggcggcgctgtgcagcctgctggtgctggcaccttcgcttgtgccggctactacgctctacatggcacctagtggtaacgatagcaacacgggtgccagcacgacgactgctctgaaaacgctcaaaggggtgctcaacaaagtcaaaagtgccaagcccactgacgcgatcaacgtcgtgattgcggaaggaacttatacaagccagtcggttgtatggacttacttcaatggagaggctatcacgtttcgaccaacatctggcgccactaccaaacctgtgtttgacggcgagagctctggattaacttggttcacgatggaagacagtgctagtgcttctgtgccaaccaacttgcatttcatcggccttaacgtgacgaattactggctgggcttagatttgggccgcgacaaagcacctggtaacagtttcaatgaagtgcgaaacatgcttttcgaacgtgtcggcgcatcttacaccaacaatcttcccaatgccaagggttatgcggcgctccgcctccgtcagtcgagcaacaacactatcgtgaacaaccgctttcatggagtcaagaattccggcgccgccgatagcgatggcgatggtgtgaatgaggatctaacaggatacatccatgccatctatcttgcgcataattcccgaagcaacaacatcacaaataacgagttcaaccaagtgactggcgatgctgtgcgcactcgggatggctcagacaacaacttaataatgggaaatcgcttcatcacggcaggcaagtactcggcctattcggattggatcgatgacgaaggagatgaatgcccgtcgcacaacaatctgttcaaagataatacagtgggagacggttatttcggtgctttcaaggatggctacgtcacgcatacatacggacccgacgatcggtgttcgaccggggggacgataccgccacgcatcactgagagtggtacaatactacagtga

SEQ ID NO: 14156 - protein, 335 aa, Muscodor strobelii
  misc_feature: SGI Peptide ID NO. 564659
  misc_feature (26)..(333): NCBI GI: 188993184 Blast Desc: xccb100_3789 [Xanthomonas campestris pv. campestris str. B100] gi|167734944|emb|CAP53156.1| exported protein [Xanthomonas campestris pv. campestris]
  misc_feature (26)..(333): NCBI GI: 21230034 Blast Desc: XCC0559 [Xanthomonas campestris pv. campestris str. ATCC 33913] gi|66769972|ref|YP_244734.1| XC_3673 [Xanthomonas campestris pv. campestris str. 8004] gi|21111554|gb|AAM39875.1|
  misc_feature (23)..(300): NCBI GI: 229866215 Blast Desc: SnasDRAFT_54840 [Stackebrandtia nassauensis DSM 44728] gi|229746396|gb|EEP04193.1| SnasDRAFT_54840 [Stackebrandtia nassauensis DSM 44728]
  misc_feature (45)..(300): NCBI GI: 256378680 Blast Desc: Amir_4662 [Actinosynnema mirum DSM 43827] gi|255922983|gb|ACU38494.1| conserved [Actinosynnema mirum DSM 43827]
MQLSRRWAALCSLLVLAPSLVPATTLYMAPSGNDSNTGASTTTALKTLKGVLNKVKSAKPTDAINVVIAEGTYTSQSVVWTYFNGEAITFRPTSGATTKPVFDGESSGLTWFTMEDSASASVPTNLHFIGLNVTNYWLGLDLGRDKAPGNSFNEVRNMLFERVGASYTNNLPNAKGYAALRLRQSSNNTIVNNRFHGVKNSGAADSDGDGVNEDLTGYIHAIYLAHNSRSNNITNNEFNQVTGDAVRTRDGSDNNLIMGNRFITAGKYSAYSDWIDDEGDECPSHNNLFKDNTVGDGYFGAFKDGYVTHTYGPDDRCSTGGTIPPRITESGTILQ

SEQ ID NO: 14157 - DNA, 2005 bp, Muscodor strobelii
  misc_feature: SGI EST ID NO. CUFF.33670.0
  misc_feature: Variant of the nucleotide sequence at SEQ ID NO 14155
cgactacatacagcagagccagaagcaaccgttgtctactcatttccgggaggtttgctggtgcaattgcaaagttgcaagatttcaagctggcactcagtcctcgaagaaacaagcagtaatccgctctctgtaatgctgcttgctacaaaccacgatcatgatttgcatataattaacattgcatgggatctctacttggtggagcttggggctatgcatgtcggtcgtgttcctggattctctctgatttcggagaccgaaactaatacgtacgaccgttgacgaatgcggataccgaatgtgaccagttcttgacttataagtatctgcaagtttgtcttgttcgatacatagagtaacggcttcgactctcagactggggcatattcgaaggctgacttgtgtctacattgcctcttgcaagtaactcaacttcagaatttgttggtctccatccgaaaattaacatgcagctcagtaggaggtgggcggcgctgtgcagcctgctggtgctggcaccttcgcttgtgccggctactacgctctacatggcacctagtggtaacgatagcaacacgggtgccagcacgacgactgctctgaaaacgctcaaaggggtgctcaacaaagtcaaaagtgccaagcccactgacgcgatcaacgtcgtgattgcggaaggaacttatacaagccagtcggttgtatggacttacttcaatggagaggctatcacgtttcgaccaacatctggcgccactaccaaacctgtgtttgacggcgagagctctggattaacttggttcacgatggaagacagtgctagtgcttctgtgccaaccaacttgcatttcatcggccttaacgtgacgaattactggctgggcttagatttgggccgcgacaaagcacctggtaacagtttcaatgaagtgcgaaacatgcttttcgaacgtgtcggcgcatcttacaccaacaatcttcccaatgccaagggttatgcggcgctccgcctccgtcagtcgagcaacaacactatcgtgaacaaccgctttcatggagtcaagaattccggcgccgccgatagcgatggcgatggtgtgaatgaggatctaacaggatacatccatgccatctatcttgcgcataattcccgaagcaacaacatcacaaataacgagttcaaccaagtgactggcgatgctgtgcgcactcgggatggctcagacaacaacttaataatgggaaatcgcttcatcacggcaggcaagtactcggcctattcggattggatcgatgacgaaggagatgaatgcccgtcgcacaacaatctgttcaaagataatacagtgggagacggttatttcggtgctttcaaggatggctacgtcacgcatacatacggacccgacgatcggtgttcgaccggggggacgataccgccacgcatcactgagagtggtacaatactacagtgaaatcgatttcgccgttacggtcatgagctacatcaaacatgctagacacctgtgacttgtatatggcttagtctaggagcactctttattgccctcctgattgtatatatcttcagcagcgtaaacgttaggaaagcggcaagtttagtagatctagcccctagatttgggacaatagaacggcatgttattctctgtactggtccgtacctaaaggatcatctaggacttcatactcaacttcaaaacttgctcattattcttctgctgaaataccctctactctgggaggtcaaactcatcacactgctcttcctcgtcatcgctggtcccatgtcgcatttgatgtatactcaagcgaaagttccgctcaggacgatcgtgataataaaatgcgagcacgaatatgcagatccatcccaataaaaacgcaagaacaagcagcagtgctatacggtcgatatgtaagcccttgtgagggtagcctacacctgagtggtgatgatggctaggtatattggttgtcg

SEQ ID NO: 14158 - DNA, 819 bp, Muscodor strobelii
  misc_feature: SGI cDNA ID NO. 564660
  misc_feature: Encodes the peptide sequence at SEQ ID NO 14159
atgggcttccgaagccaagttacacacatggcggtcaatgccggccattctcaagcatcgaacgcaaaaactaggggcgtgaaggcggcgaagatggtcttcctcagatgggtacaaacatggctgatacccattcgtctcgtagttcgaggtatacaactcatctttgccctggtagttattggcctttacggtacaaaggtccatgcagattcagagcccggccagcatcaacatgttcgatgggttattgctttgggtgtcggctcagctgctgctattatatcggttctcttcactatcctcccgatactgcaagtcaagacacatcgtttctacattgtcgactttatcatcgccgcattatattttgtcgttcttagttggttcgctgccagtttaaactataaggacgatcaacccgacacgtattatggtacaagcaaaagtacgatgcgccatgccatctggattgacttgttgaatacccttttctgggcactcaccggcggttggggcgtgttctccactatgagcggaaagaaagtcacggaacttacagatcgtggcttcgagaaagtctcgaataaagcatataagacctttggcgtggattcgtctgcggatcttgagaaaggaaacaacgtggatctcggcctcaaaggcttcaagctcgaaggctacatcaactcgagagaagtgggagaccatgctgagaaacttactgggaatttgtctgggaaattggctggaaaactgaagtctcaaattccggcgaggccatcggctgcgagagtaagacccgagaggatcttctag

SEQ ID NO: 14159 - protein, 272 aa, Muscodor strobelii
  misc_feature: SGI Peptide ID NO. 564660
  misc_feature (4)..(197): NCBI GI: 261356795 Blast Desc: conserved [Verticillium albo-atrum VaMs.102]
  misc_feature (15)..(200): NCBI GI: 46114552 Blast Desc: FG03118.1 [Gibberella zeae PH-1]
  misc_feature (45)..(172): NCBI GI: 238844191 Blast Desc: conserved [Microsporum canis CBS 113480]
  misc_feature (45)..(172): NCBI GI: 258570809 Blast Desc: [Uncinocarpus reesii 1704] gi|237904478|gb|EEP78879.1| [Uncinocarpus reesii 1704]
  misc_feature (49)..(172): NCBI GI: 255952841 Blast Desc: Pc21g01020 [Penicillium chrysogenum Wisconsin 54-1255] gi|211588884|emb|CAP94999.1| Pc21g01020 [Penicillium chrysogenum Wisconsin 54-1255]
  misc_feature (48)..(172): NCBI GI: 240109668 Blast Desc: CPC735_031730 [Coccidioides posadasii C735 delta SOWgp]
  misc_feature (46)..(217): NCBI GI: 169763114 Blast Desc: [Aspergillus oryzae RIB40] gi|238488977|ref|XP_002375726.1| conserved [Aspergillus flavus NRRL3357] gi|83770485|dbj|BAE60618.1| protein product oryzae]
  misc_feature (57)..(166): NCBI GI: 164429531 Blast Desc: NCU01891 [Neurospora crassa OR74A] gi|157073516|gb|EAA36286.2| conserved [Neurospora crassa OR74A]
  misc_feature (46)..(170): NCBI GI: 189188656 Blast Desc: conserved [Pyrenophora tritici-repentis Pt-1C-BFP] gi|187972273|gb|EDU39772.1| conserved [Pyrenophora tritici-repentis Pt-1C-BFP]
  misc_feature (45)..(172): NCBI GI: 119479545 Blast Desc: NFIA_078440 [Neosartorya fischeri NRRL 181] gi|119407955|gb|EAW17904.1| conserved [Neosartorya fischeri NRRL 181]
MGFRSQVTHMAVNAGHSQASNAKTRGVKAAKMVFLRWVQTWLIPIRLVVRGIQLIFALVVIGLYGTKVHADSEPGQHQHVRWVIALGVGSAAAIISVLFTILPILQVKTHRFYIVDFIIAALYFVVLSWFAASLNYKDDQPDTYYGTSKSTMRHAIWIDLLNTLFWALTGGWGVFSTMSGKKVTELTDRGFEKVSNKAYKTFGVDSSADLEKGNNVDLGLKGFKLEGYINSREVGDHAEKLTGNLSGKLAGKLKSQIPARPSAARVRPERIF

SEQ ID NO: 14160 - DNA, 1696 bp, Muscodor strobelii
  misc_feature: SGI EST ID NO. CUFF.33685.0
  misc_feature: Variant of the nucleotide sequence at SEQ ID NO 14158
gcaccatcagggccttcgaccgccttgagcccaaatcgagtcttcagtgactgttggatgctactgctttgaacttctagtctttgtcccaaatataccgtactctagctgagaacaaggacctcggcgcaagctggacttggcctctttgtgtgcggtcagatgtcactgggccatttggcctctagctttcattttccagttgggcgcgtagcattgtccttgctacgaggaccatgataaggctgtgttggctcaatgacaatcattgtcttcttgattcaaatactcaagaagtatccgctccttcgtgacaagttcatattcacttcttcttgcaccaacaccgtactacaatctttttgtgcctgttgtcccacttctatagactttccctctctattctatttgcacttttaccttaatatcactcgcttgcttctgctttaccttctggcactggatgtcactggccatcttccgtattcaaaatctttgacatatttcaactcgtacttgataccaatttcgatatttaatcaggtcacactgccgggtactctctccgtcgttttcagcagatcatacttaatacaacgatttcaatatatcaaccacgtacacaatcagccactacaactcgacagtaaccacacaagatgggcttccgaagccaagttacacacatggcggtcaatgccggccattctcaagcatcgaacgcaaaaactaggggcgtgaaggcggcgaagatggtcttcctcagatgggtacaaacatggctgatacccattcgtctcgtagttcgaggtatacaactcatctttgccctggtagttattggcctttacggtacaaaggtccatgcagattcagagcccggccagcatcaacatgttcgatgggttattgctttgggtgtcggctcagctgctgctattatatcggttctcttcactatcctcccgatactgcaagtcaagacacatcgtttctacattgtcgactttatcatcgccgcattatattttgtcgttcttagttggttcgctgccagtttaaactataaggacgatcaacccgacacgtattatggtacaagcaaaagtacgatgcgccatgccatctggattgacttgttgaatacccttttctgggcactcaccggcggttggggcgtgttctccactatgagcggaaagaaagtcacggaacttacagatcgtggcttcgagaaagtctcgaataaagcatataagacctttggcgtggattcgtctgcggatcttgagaaaggaaacaacgtggatctcggcctcaaaggcttcaagctcgaaggctacatcaactcgagagaagtgggagaccatgctgagaaacttactgggaatttgtctgggaaattggctggaaaactgaagtctcaaattccggcgaggccatcggctgcgagagtaagacccgagaggatcttctaggcctgggtgcgcttgagacagaacaaatgagttattttgctatgttaggacattgccatgacggcatcatgtctctgcatcttgctcctgcattcattcctactagggggagaagttccaggtcgagattctaccttttagactatccggttcctagctatagcattaaacgggcgttacggttttgattctatataccaatgtattgcagccttcgg

SEQ ID NO: 14161 - DNA, 1419 bp, Muscodor strobelii
  misc_feature: SGI cDNA ID NO. 564661
  misc_feature: Encodes the peptide sequence at SEQ ID NO 14162
atggctactgttggcactgctggaacagctgatgagaagattgacatatcgaattcgtctgacatcgatggcacagaaacgttatcgaagatagatgaactagagagacatgaggtcttcaagaaaactgaagacggcgtagactttcgaaacgtcagctggcctcgcgcaactgtcatttttctcaagatcatcttcgcaacaggcgttttgagtatcccgacagcgatgtactcacttggagcagtcgggggagctttctcagtagtgggctggtctatacttaatacgtacacggcagtaatacagggggatttcaaaactcgacatcctgagtgccatacacttgctgacatgggatatcacgtaggtggtgtgtggttcaaagagctcatcggtctgatttacctggttgcctatatactctgctcaggaacggggatgataggcgtttccacagctttcaatgctttatcagaccatgctgcttgtacggtctggtggtcgttcctctccttcgtgattatcactgccgctgcttccgttcgcacgctgcggaacatcggatggcttacgtgggccgggttcctctcaattttcgtcgctgtttttatcgttgttataggcgtcactacatacgatcgaccagcagaggcaccgcaacagggaccttacgaactaggttatcacgtcattgcttacccatcattcactgagggactcactgccactgcgacaatttttgtgtctagtgccggaacttcagcattcttacctgtcatttctgagatgagaaacccgcgcgattatcgaaaagcgctctttgtatgtatgggacttgtgcttgctctgtatctctcgttttcgctcgtagtctatagatggtcaggtcaatgggtagccagcccatcgttgggtagtgccggcggtacaattaaaaaggtctcctacggtataggactcattggcctaattgttagtgggtgtctatatcagcatgtcgctgcgaaatatctcttcgtgcgtattctgagagatacaaaacatttgcaatctaataccgtcatccactggactacatggttaggctgttcgattggtgttgggtcgatagcatttatactcgccgaggctatcgctatattcaactacttgatcgcattagtcgggtctctatgtttcgcaccaatggctataaccatccctggcattctatggctgtatgactttgggactcatcgcaagggcaactcttggcagaaactgcaatatgtgtttcattggtttctgatactactaggccttttcattacgattggcggaacctactcgactattctagcaatcaaagaggcatatgctacaaaattaattggctcagcctttagttgcgctgataattcgaatagcagccattag

SEQ ID NO: 14162 - protein, 472 aa, Muscodor strobelii
  misc_feature: SGI Peptide ID NO. 564661
  misc_feature (50)..(447): Pfam Id: PF01490 Pfam Desc: Transmembrane amino acid transporter protein
  misc_feature (50)..(139): Pfam Id: PF01490 Pfam Desc: Transmembrane amino acid transporter protein
  misc_feature (382)..(447): Pfam Id: PF01490 Pfam Desc: Transmembrane amino acid transporter protein
  misc_feature (32)..(471): NCBI GI: 225556899 Blast Desc: conserved [Ajellomyces capsulatus G186AR]
  misc_feature (14)..(471): NCBI GI: 255940526 Blast Desc: Pc16g06980 [Penicillium chrysogenum Wisconsin 54-1255] gi|211585655|emb|CAP93368.1| Pc16g06980 [Penicillium chrysogenum Wisconsin 54-1255]
  misc_feature (32)..(471): NCBI GI: 240277435 Blast Desc: neutral amino acid permease [Ajellomyces capsulatus H143]
  misc_feature (32)..(471): NCBI GI: 154284934 Blast Desc: conserved [Ajellomyces capsulatus NAm1] gi|150406903|gb|EDN02444.1| conserved [Ajellomyces capsulatus NAm1]
  misc_feature (21)..(471): NCBI GI: 259488585 Blast Desc: TPA: amino acid transporter (Eurofung) [Aspergillus nidulans FGSC A4]
  misc_feature (15)..(471): NCBI GI: 115385467 Blast Desc: conserved [Aspergillus terreus NIH2624] gi|114187727|gb|EAU29427.1| conserved [Aspergillus terreus NIH2624]
  misc_feature (12)..(458): NCBI GI: 67515457 Blast Desc: AN0010.2 [Aspergillus nidulans FGSC A4] gi|40746173|gb|EAA65329.1| AN0010.2 [Aspergillus nidulans FGSC A4]
  misc_feature (4)..(470): NCBI GI: 115400291 Blast Desc: conserved [Aspergillus terreus NIH2624] gi|114191400|gb|EAU33100.1| conserved [Aspergillus terreus NIH2624]
  misc_feature (21)..(458): NCBI GI: 67517847 Blast Desc: AN1101.2 [Aspergillus nidulans FGSC A4] gi|40747063|gb|EAA66219.1| AN1101.2 [Aspergillus nidulans FGSC A4]
  misc_feature (11)..(468): NCBI GI: 169777827 Blast Desc: [Aspergillus oryzae RIB40] gi|83772116|dbj|BAE62246.1| protein product [Aspergillus oryzae]
MATVGTAGTADEKIDISNSSDIDGTETLSKIDELERHEVFKKTEDGVDFRNVSWPRATVIFLKIIFATGVLSIPTAMYSLGAVGGAFSVVGWSILNTYTAVIQGDFKTRHPECHTLADMGYHVGGVWFKELIGLIYLVAYILCSGTGMIGVSTAFNALSDHAACTVWWSFLSFVIITAAASVRTLRNIGWLTWAGFLSIFVAVFIVVIGVTTYDRPAEAPQQGPYELGYHVIAYPSFTEGLTATATIFVSSAGTSAFLPVISEMRNPRDYRKALFVCMGLVLALYLSFSLVVYRWSGQWVASPSLGSAGGTIKKVSYGIGLIGLIVSGCLYQHVAAKYLFVRILRDTKHLQSNTVIHWTTWLGCSIGVGSIAFILAEAIAIFNYLIALVGSLCFAPMAITIPGILWLYDFGTHRKGNSWQKLQYVFHWFLILLGLFITIGGTYSTILAIKEAYATKLIGSAFSCADNSNSSH

SEQ ID NO: 14163 - DNA, 347 bp, Muscodor strobelii
  misc_feature: SGI EST ID NO. CUFF.33689.0
  misc_feature: Variant of the nucleotide sequence at SEQ ID NO 14161
atcagcatgtcgctgcgaaatatctcttcgtgcgtattctgagagatacaaaacatttgcaatctaataccgtcatccactggactacatggttaggctgttcgattggtgttgggtcgatagcatttatactcgccgaggctatcgctatattcaactacttgatcgcattagtcgggtctctatgtttcgcaccaatggctataaccatccctggcattctatggctgtatgactttgggactcatcgcaagggcaactcttggcagaaactgcaatatgtgtttcattggtttctgatactactaggccttttcattacgattggcggaacctactcgactatt

SEQ ID NO: 14164 - DNA, 630 bp, Muscodor strobelii
  misc_feature: SGI cDNA ID NO. 564662
  misc_feature: Encodes the peptide sequence at SEQ ID NO 14165
atgtggcttcataatgttcttcttccagttgcatctgcctgggctgtcgtagccgatcaatcgagcgcagaaccaacgacaaggcttaccgttgtccctatgccaactggtactccaatcatcaccgaaaaacctcgaatgcaatgtggcgatgcgcaaaacgtcggagggctcccaagggaattcctcgccaaagcagacgactgcaagaagatcgcagattcaatgaatgtcaatcatggatactataggactaatgactggaacgataatcaagcgaacgaattcgtcatccttgacggcgaggggacttgcgagttcacgattagacacgtcaacaggaactccaatgtcgacgtcatggttggtaatgaagatatcacggacttcattgacctcgcccttcggcgaaccgactccaacggcatggtcgcggtgggtggtatttttggctgtacaaaggcgaatgatcaagataagaatgagatcctcgaatggcgcgtctggaacccgcaatgggcagacgtggacgatcctgtttttgctggggcacctacgttgaggccgtctcttggtcaactcttcatagctctcgctgctatggctgggctattggccttgtttatgtaa

SEQ ID NO: 14165 - protein, 209 aa, Muscodor strobelii
  misc_feature: SGI Peptide ID NO. 564662
  misc_feature (31)..(170): NCBI GI: 46139607 Blast Desc: FG11318.1 [Gibberella zeae PH-1]
MWLHNVLLPVASAWAVVADQSSAEPTTRLTVVPMPTGTPIITEKPRMQCGDAQNVGGLPREFLAKADDCKKIADSMNVNHGYYRTNDWNDNQANEFVILDGEGTCEFTIRHVNRNSNVDVMVGNEDITDFIDLALRRTDSNGMVAVGGIFGCTKANDQDKNEILEWRVWNPQWADVDDPVFAGAPTLRPSLGQLFIALAAMAGLLALFM

SEQ ID NO: 14166 - DNA, 1248 bp, Muscodor strobelii
  misc_feature: SGI cDNA ID NO. 564663
  misc_feature: Elevated expression when VOC is produced
  misc_feature: Encodes the peptide sequence at SEQ ID NO 14167
atggttgagcatcatccagtacacaacagcgaggtctatcttttaggattggcacctcgcccatcagtaccaccgccatctcctccttcgcctttgtcacctactgctgctggttcaagcacgccaattgagcaactatgtctagacagcacagacattgacgactctgagcgcgtgcaggagactgcctcgcttgcagcacgtcgaattgctggagctattcatgtcctcaatactgaggcgactgctttaagatgtctgactcagctttataagacagacgcaacggtgtccgaagggttcaatgccgccattgacgcgatcgtccggcagagcaatgatagaggcaaattggtgataataggtgttggcaaatctggacacatcgggaagaagctcgtggcgaccttcaacagcctcggcctccacgcaacttttctacacccgacggaagcattgcacggtgacctgggcaaaatcagcaaacatgacgtggtgctgtttatcacgttctcggggaaaactccagagcttttagcgctgctaccccatgtcgaccctgcactgcctgtgattgtcctgacttcacattcgcagccgacaggttgtgagttgattcgacaacgaccgagcgccatccttttgcctgcaccaatccacgagccagaaacgatctcgtttggtgtgtcggcgccgacgacttctacaaccgtggcattagccctcggcgatgcattggctgttgttgcatctcaagaactccatgggtctgtatcatccgtctttgctcgaaaccatccgggtggcgcgattggggctgctttcgccaagtccgattcccgcaatatccgtgacattgctgtcccgctttgcgacattccttctataccggtaaccactccgcatctttcaggtgtcgacgtgttgaaaactgggtatcagtcagcctccggttggatccagatgggggacgcattggctaatcccactcgtatccgccgcctcgacagatttaccatgtcgcgccaccctaacgacatcccggatcttcttgtcaacagagacgaatggctcggcatcgatgctgatactcctgttgcttacgcagctcgatggattcgcgatctaattgcgtcacctaactatagcgagatggcttgtagtgaggatcatatcatttctattacagacgcgggcgaggttattggagttttggaggctggtgatttgcttaagaactgcgaataa

SEQ ID NO: 14167 - protein, 415 aa, Muscodor strobelii
  misc_feature: SGI Peptide ID NO. 564663
  misc_feature (111)..(249): Pfam Id: PF01380 Pfam Desc: SIS domain
  misc_feature (111)..(185): Pfam Id: PF01380 Pfam Desc: SIS domain
  misc_feature (4)..(413): NCBI GI: 256732101 Blast Desc: NECHADRAFT_41459 [Nectria haematococca mpVI 77-13-4]
  misc_feature (6)..(414): NCBI GI: 171694451 Blast Desc: protein product [Podospora anserina] gi|170947174|emb|CAP73979.1| protein product [Podospora anserina]
  misc_feature (4)..(411): NCBI GI: 46136863 Blast Desc: FG09947.1 [Gibberella zeae PH-1]
  misc_feature (1)..(376): NCBI GI: 85089259 Blast Desc: NCU10063 [Neurospora crassa OR74A] gi|28919183|gb|EAA28673.1| [Neurospora crassa OR74A]
  misc_feature (1)..(411): NCBI GI: 156055432 Blast Desc: SS1G_05068 [Sclerotinia sclerotiorum 1980] gi|154702852|gb|EDO02591.1| SS1G_05068 [Sclerotinia sclerotiorum 1980]
  misc_feature (48)..(373): NCBI GI: 116197593 Blast Desc: CHGG_06952 [Chaetomium globosum CBS 148.51] gi|88178231|gb|EAQ85699.1| CHGG_06952 [Chaetomium globosum CBS 148.51]
  misc_feature (1)..(411): NCBI GI: 154302605 Blast Desc: BC1G_09879 [Botryotinia fuckeliana B05.10] gi|150855368|gb|EDN30560.1| BC1G_09879 [Botryotinia fuckeliana B05.10]
  misc_feature (21)..(415): NCBI GI: 238501646 Blast Desc: sugar isomerase, KpsF/GutQ [Aspergillus flavus NRRL3357] gi|220692294|gb|EED48641.1| sugar isomerase, KpsF/GutQ [Aspergillus flavus NRRL3357]
  misc_feature (60)..(414): NCBI GI: 159124337 Blast Desc: sugar isomerase, KpsF/GutQ [Aspergillus fumigatus A1163]
  misc_feature (21)..(410): NCBI GI: 169769202 Blast Desc: [Aspergillus oryzae RIB40] gi|83766929|dbj|BAE57069.1| protein product [Aspergillus oryzae]
  misc_feature: Useful for introducing or modulating the production of volatile compounds
MVEHHPVHNSEVYLLGLAPRPSVPPPSPPSPLSPTAAGSSTPIEQLCLDSTDIDDSERVQETASLAARRIAGAIHVLNTEATALRCLTQLYKTDATVSEGFNAAIDAIVRQSNDRGKLVIIGVGKSGHIGKKLVATFNSLGLHATFLHPTEALHGDLGKISKHDVVLFITFSGKTPELLALLPHVDPALPVIVLTSHSQPTGCELIRQRPSAILLPAPIHEPETISFGVSAPTTSTTVALALGDALAVVASQELHGSVSSVFARNHPGGAIGAAFAKSDSRNIRDIAVPLCDIPSIPVTTPHLSGVDVLKTGYQSASGWIQMGDALANPTRIRRLDRFTMSRHPNDIPDLLVNRDEWLGIDADTPVAYAARWIRDLIASPNYSEMACSEDHIISITDAGEVIGVLEAGDLLKNCE

SEQ ID NO: 14168 - DNA, 1979 bp, Muscodor strobelii
  misc_feature: SGI EST ID NO. CUFF.33709.0
  misc_feature: Variant of the nucleotide sequence at SEQ ID NO 14166
tatatgaataggtagattatctttgcatctaatctctagctccattgagatcttttcttctctctcttcagacctccaagccgtttcttaagcgggcccttggattgaagggtcttttttcttgacatccccacccgatcctgaccgaggcggaaaatagaattgatctggatacagacggaacaagggatggaaagcagattctgtcttcaatcttgtcttgctttatgatctcaactagcatcgtcacgcacccgtaagacaagatgctagattgaaatgccatgaacgcccacgtttcttcactactccgcatctggccgttacccgcaagctagagagaggtcaaatacacaaacataacgcatgactaatacctgtgcaccaatatcatggttgagcatcatccagtacacaacagcgaggtctatcttttaggattggcacctcgcccatcagtaccaccgccatctcctccttcgcctttgtcacctactgctgctggttcaagcacgccaattgagcaactatgtctagacagcacagacattgacgactctgagcgcgtgcaggagactgcctcgcttgcagcacgtcgaattgctggagctattcatgtcctcaatactgaggcgactgctttaagatgtctgactcagctttataagacagacgcaacggtgtccgaagggttcaatgccgccattgacgcgatcgtccggcagagcaatgatagaggcaaattggtgataataggtgttggcaaatctggacacatcgggaagaagctcgtggcgaccttcaacagcctcggcctccacgcaacttttctacacccgacggaagcattgcacggtgacctgggcaaaatcagcaaacatgacgtggtgctgtttatcacgttctcggggaaaactccagagcttttagcgctgctaccccatgtcgaccctgcactgcctgtgattgtcctgacttcacattcgcagccgacaggttgtgagttgattcgacaacgaccgagcgccatccttttgcctgcaccaatccacgagccagaaacgatctcgtttggtgtgtcggcgccgacgacttctacaaccgtggcattagccctcggcgatgcattggctgttgttgcatctcaagaactccatgggtctgtatcatccgtctttgctcgaaaccatccgggtggcgcgattggggctgctttcgccaagtccgattcccgcaatatccgtgacattgctgtcccgctttgcgacattccttctataccggtaaccactccgcatctttcaggtgtcgacgtgttgaaaactgggtatcagtcagcctccggttggatccagatgggggacgcattggctaatcccactcgtatccgccgcctcgacagatttaccatgtcgcgccaccctaacgacatcccggatcttcttgtcaacagagacgaatggctcggcatcgatgctgatactcctgttgcttacgcagctcgatggattcgcgatctaattgcgtcacctaactatagcgagatggcttgtagtgaggatcatatcatttctattacagacgcgggcgaggttattggagttttggaggctggtgatttgcttaagaactgcgaataaggaatttggcgtatttatggtgcggtattgcatgggtgggcgttgagtggtttgtctatgacatctatcaaaattggatcatgaagaatgatggggcggattcctactcgaatcaatcaacgagtcacaaatggtgggataaaaagatattttaaatactttgctagagcgccttgtttcaacctcatctaaaggtctcgtggttttgagccctatcttcagctttctggatccctgaaaagacagtgtacaatatatgtattctaagatggcagaaaagcatccttctttagttctgattgatttcccgacttcgagttgcatattaaccgaatacct

SEQ ID NO: 14169 - DNA, 810 bp, Muscodor strobelii
  misc_feature: SGI cDNA ID NO. 564664
  misc_feature: Reduced expression when VOC is produced
  misc_feature: Encodes the peptide sequence at SEQ ID NO 14170
atggctgaatacgcaacgctgaaggtcccggagctgaagaagcttctacaagagagatcgctccccgtcgcgggcaataaagccgacctcgtcgcccgtttggaggagcacgacaaagccagcgagcagcctactgctgctgccgccgcacccacctcagccgaggacgacgtgatcgattactctgacgacgatgaaccggccgccaagcccacagagcctgccccagccccgacacaggagaagccagctgaacccgcagctgcgaccgagcccccaactgaagctccagctgagtccacagccgccacagaggccgcgggcgagtccaagccagaagaggaggccaagcccaaggtagacttctcagcccacctacccgcctcaacggcagacgaggaggcccgcaagcgagctgagagagccaagcgctttggtgtcgtccaggacgcagatgaggaggccaagaagaaggcagaccgcgccgcccgcttcggcacagagggtgacagctcagtcgtctctggtctcgactcagcacttcccgagaagcgtgagcgcaagcgcggccgcgagggcaacacagaaggtggcgaccgaggtgccaagcgacaacaacagaacggtgatcggcgtcaaggaggcagattccgtggtcgcggtggtggtgttcgtcgcggcagcgaccgaggtgcaccgccaccgaggagagaaggcggaggaaacgagaagcccagacgtatcttggatgatccgtccgagaaagcaaaggcagaagccagagcgaagcgattcggtggtggagcatag

SEQ ID NO: 14170 - protein, 269 aa, Muscodor strobelii
  misc_feature: SGI Peptide ID NO. 564664
  misc_feature (4)..(38): Pfam Id: PF02037 Pfam Desc: SAP domain
  misc_feature (1)..(268): NCBI GI: 46109926 Blast Desc: FG01845.1 [Gibberella zeae PH-1]
  misc_feature (1)..(268): NCBI GI: 256728511 Blast Desc: NECHADRAFT_101897 [Nectria haematococca mpVI 77-13-4]
  misc_feature (2)..(227): NCBI GI: 154279960 Blast Desc: [Ajellomyces capsulatus NAm1] gi|150412736|gb|EDN08123.1| [Ajellomyces capsulatus NAm1]
  misc_feature (1)..(219): NCBI GI: 261360880 Blast Desc: [Verticillium albo-atrum VaMs.102]
  misc_feature (1)..(252): NCBI GI: 156051688 Blast Desc: SS1G_07251 [Sclerotinia sclerotiorum 1980] gi|154705029|gb|EDO04768.1| SS1G_07251 [Sclerotinia sclerotiorum 1980]
  misc_feature (1)..(215): NCBI GI: 154312684 Blast Desc: BC1G_05043 [Botryotinia fuckeliana B05.10] gi|150849745|gb|EDN24938.1| BC1G_05043 [Botryotinia fuckeliana B05.10]
  misc_feature (2)..(227): NCBI GI: 225562826 Blast Desc: conserved [Ajellomyces capsulatus G186AR]
  misc_feature (2)..(269): NCBI GI: 212539790 Blast Desc: SAP domain protein, [Penicillium marneffei ATCC 18224] gi|210067349|gb|EEA21441.1| SAP domain protein, [Penicillium marneffei ATCC 18224]
  misc_feature (2)..(242): NCBI GI: 261196622 Blast Desc: SAP domain-containing protein [Ajellomyces dermatitidis SLH14081] gi|239595959|gb|EEQ78540.1| SAP domain-containing protein [Ajellomyces dermatitidis SLH14081] SAP
  misc_feature (2)..(266): NCBI GI: 226279105 Blast Desc: conserved [Paracoccidioides brasiliensis Pb01]
  misc_feature: Useful for introducing or modulating the production of volatile compounds
MAEYATLKVPELKKLLQERSLPVAGNKADLVARLEEHDKASEQPTAAAAAPTSAEDDVIDYSDDDEPAAKPTEPAPAPTQEKPAEPAAATEPPTEAPAESTAATEAAGESKPEEEAKPKVDFSAHLPASTADEEARKRAERAKRFGVVQDADEEAKKKADRAARFGTEGDSSVVSGLDSALPEKRERKRGREGNTEGGDRGAKRQQQNGDRRQGGRFRGRGGGVRRGSDRGAPPPRREGGGNEKPRRILDDPSEKAKAEARAKRFGGGA

SEQ ID NO: 14171 - DNA, 1639 bp, Muscodor strobelii
  misc_feature: SGI EST ID NO. CUFF.33854.1
  misc_feature: Variant of the nucleotide sequence at SEQ ID NO 14169
cccgtgcatagcagttgctcattgcgcggtgtcccgggtaaggaagcaggcgcatcctcgcattcacgcgtttcctgcattgttcctgttttcatcatacaaaggcaagcaagctcaagctagctgccatccctctcatctacactcacattcccggccatctccatcaacagccacccacgcgaacacagcattttctttgtcgccggtgtccaaatagtatcatctagctgctgcagttactcgctccgtttgcgcgcgctcttccacgcgcatcccgaccccaacagccactctgccttctcaccatcttgcgccagccgcaaaatcaagcacatacctcgcaactatggctgaatacgcaacgctgaaggtcccggagctgaagaagcttctacaagagagatcgctccccgtcgcgggcaataaagccgacctcgtcgcccgtttggaggagcacgacaaagccagcgagcagcctactgctgctgccgccgcacccacctcagccgaggacgacgtgatcgattactctgacgacgatgaaccggccgccaagcccacagagcctgccccagccccgacacaggagaagccagctgaacccgcagctgcgaccgagcccccaactgaagctccagctgagtccacagccgccacagaggccgcgggcgagtccaagccagaagaggaggccaagcccaaggtagacttctcagcccacctacccgcctcaacggcagacgaggaggcccgcaagcgagctgagagagccaagcgctttggtgtcgtccaggacgcagatgaggaggccaagaagaaggcagaccgcgccgcccgcttcggcacagagggtgacagctcagtcgtctctggtctcgactcagcacttcccgagaagcgtgagcgcaagcgcggccgcgagggcaacacagaaggtggcgaccgaggtgccaagcgacaacaacagaacggtgatcggcgtcaaggaggcagattccgtggtcgcggtggtggtgttcgtcgcggcagcgaccgaggtgcaccgccaccgaggagagaaggcggaggaaacgagaagcccagacgtatcttggatgatccgtccgagaaagcaaaggcagaagccagagcgaagcgattcggtggtggagcatagggaagctcaaccgccatcgcggacccggcggaacagattaaggcagaggcacgaatgcggcgtttcggaggcggggcttagggagactcgtccgctctttccgatccggctgatcaggttcgagcagaggctcgactacgacgatttggaaggggctgaatgaacaagcatcgaataatggccgccgcaaccctcggtagaaaaggaaaggccttgaggaattttcatagttgctgtacactattacaatccgctaaaaagtggcgtttatggagttcctcttaatattcttacgacgcgcgaatgaattctgatgaacacaggactttggcaacctggcttttgtactttacttgcgtcatgaggtatagaggggaaatatcagtctgaatgattattattgactctgacaacctttgcagctatgcatcttggaaatctcaagcccaagtttgtgagctgttttttagtcgcccggag

SEQ ID NO: 14172 - DNA, 486 bp, Muscodor strobelii
  misc_feature: SGI cDNA ID NO. 564665
  misc_feature: Reduced expression when VOC is produced
  misc_feature: Encodes the peptide sequence at SEQ ID NO 14173
atggtctgcctacccaagatcttcctcgccatcgccactgccagtgtggcagtctcagccatcccgctgaacatcgatgacattgacggaatcgagttcctcgacgacgacatcgacactcttctcggcggcaatgccaccgaaatcgccagcaccatcgaagctcgcgcagccgtccacaagggcgatttgacctactacactccgggtctgggagcttgcggtgtcactaacggcgagaatgaccccatcgtcgccatctcgcacgtcatcttcgaccccaagactcctggcggcaaccccaacaacaaccccctttgcggaaagaagattaagatccgccgcaatggcaagtcggttgttgtcactgttcgcgatcgttgtgagggatgcaagaagtgggatcttgatgtccccgtcaagactttcaagaagctcgccaagcctgctgctggtcgtgtcaggatgaactggaactaccggtaa

SEQ ID NO: 14173 - protein, 161 aa, Muscodor strobelii
  misc_feature: SGI Peptide ID NO. 564665
  misc_feature (84)..(158): Pfam Id: PF03330 Pfam Desc: Rare lipoprotein A (RlpA)-like double-psi beta-barrel
  misc_feature (115)..(158): Pfam Id: PF03330 Pfam Desc: Rare lipoprotein A (RlpA)-like double-psi beta-barrel
  misc_feature (60)..(160): NCBI GI: 225558116 Blast Desc: riboflavin aldehyde-forming enzyme [Ajellomyces capsulatus G186AR]
  misc_feature (60)..(160): NCBI GI: 242796253 Blast Desc: riboflavin aldehyde-forming enzyme [Talaromyces stipitatus ATCC 10500] gi|218719348|gb|EED18768.1| riboflavin aldehyde-forming enzyme [Talaromyces stipitatus ATCC 10500]
  misc_feature (60)..(160): NCBI GI: 212536624 Blast Desc: riboflavin aldehyde-forming enzyme [Penicillium marneffei ATCC 18224] gi|210070867|gb|EEA24957.1| riboflavin aldehyde-forming enzyme [Penicillium marneffei ATCC 18224]
  misc_feature (60)..(160): NCBI GI: 121713458 Blast Desc: riboflavin aldehyde-forming enzyme [Aspergillus clavatus NRRL 1] gi|119402493|gb|EAW12914.1| riboflavin aldehyde-forming enzyme [Aspergillus clavatus NRRL 1]
  misc_feature (53)..(160): NCBI GI: 154320937 Blast Desc: BC1G_01343 [Botryotinia fuckeliana B05.10] gi|150851881|gb|EDN27073.1| BC1G_01343 [Botryotinia fuckeliana B05.10]
  misc_feature (45)..(160): NCBI GI: 156054592 Blast Desc: SS1G_06144 [Sclerotinia sclerotiorum 1980] gi|154703924|gb|EDO03663.1| SS1G_06144 [Sclerotinia sclerotiorum 1980]
  misc_feature (60)..(160): NCBI GI: 70997721 Blast Desc: riboflavin aldehyde-forming enzyme [Aspergillus fumigatus Af293] gi|66851232|gb|EAL91558.1| riboflavin aldehyde-forming enzyme [Aspergillus fumigatus Af293] riboflavin
  misc_feature (60)..(160): NCBI GI: 115401264 Blast Desc: [Aspergillus terreus NIH2624] gi|114190161|gb|EAU31861.1| [Aspergillus terreus NIH2624]
  misc_feature (60)..(160): NCBI GI: 226279489 Blast Desc: riboflavin aldehyde-forming enzyme [Paracoccidioides brasiliensis Pb01]
  misc_feature (60)..(160): NCBI GI: 154280709 Blast Desc: [Ajellomyces capsulatus NAm1] gi|150411346|gb|EDN06734.1| [Ajellomyces capsulatus NAm1]
  misc_feature: Useful for introducing or modulating the production of volatile compounds
MVCLPKIFLAIATASVAVSAIPLNIDDIDGIEFLDDDIDTLLGGNATEIASTIEARAAVHKGDLTYYTPGLGACGVTNGENDPIVAISHVIFDPKTPGGNPNNNPLCGKKIKIRRNGKSVVVTVRDRCEGCKKWDLDVPVKTFKKLAKPAAGRVRMNWNYR

SEQ ID NO: 14174 - DNA, 714 bp, Muscodor strobelii
  misc_feature: SGI EST ID NO. CUFF.33712.0
  misc_feature: Variant of the nucleotide sequence at SEQ ID NO 14172
catcccgctgaacatcgatgacattgacggaatcgagttcctcgacgacgacatcgacactcttctcggcggcaatgccaccgaaatcgccagcaccatcgaagctcgcgcagccgtccacaagggcgatttgacctactacactccgggtctgggagcttgcggtgtcactaacggcgagaatgaccccatcgtcgccatctcgcacgtcatcttcgaccccaagactcctggcggcaaccccaacaacaaccccctttgcggaaagaagattaagatccgccgcaatggcaagtcggttgttgtcactgttcgcgatcgttgtgagggatgcaagaagtgggatcttgatgtccccgtcaagactttcaagaagctcgccaagcctgctgctggtcgtgtcaggatgaactggaactaccggtaaatgtcttctcggacgtttatccccttcgcttctcagatgataaggagaacgtggtcgagagcaggttgcaagtgtcggggaggaattggggcttggtggcgacttctgcttctttacttttcattcgttgtagaaaattgattcatttgttttccgaattgtagtcgctactgctatcatttctgaccttgtgattgaagaccaaaatcttgcctcatgcaaactattgacaaatgatacatatattccaatatgtgcaacactaatgtgagacgaggagtgccacg

SEQ ID NO: 14175 - DNA, 993 bp, Muscodor strobelii
  misc_feature: SGI cDNA ID NO. 564666
  misc_feature: Encodes the peptide sequence at SEQ ID NO 14176
atgttgttcaaaacgttccttaccctcgctgcttcagcagctctagtctccgcgaggacaatccccaactatcctcgcgacaccgacagcagcgacatcatctccgtcgaagctgacgacatctctgacttcgacgtctccgtcttcgatcgctcagtcgaggacgatggcgaagacctcgatgacgacatggacatggacatggacgacgaagatgacgatggcgacgacgacgacggcgtcgacctccccaacccagacctggacgaaatcttctccaccaacaacaccgcaggggcagatttcccaacaggcggtctagtccgcgagcccgtaacgcccgagaacaaccccaacacccctgagctcacaaagcgcgccttcacctgccccacaaaagccatgaaagtcaagggctccaaagtgaaaggcaaaggactaaagatcacaaacggcgactccgtcgcacgatctttctacatctaccacaactcctgcgactccgtgccattcaaatacatatctatccccgcgcacaaaacgcgatacgtcggagtcccggcacacttcgagggccggatcacgcgtggtaacaataagctgaatctcgctggcaagccacgtaccttgggaacttggttagaattctctatcgatgcctcaggcgtgatgtggggcgatgtctctctaatccgtggttgtgacggcgcggccgcagtctggtctcttgacaatgcgccacgccgacacaagggattccgccagaacatcctacctggtgcgccgaagaaggctatgactaagaaggctggcggtgctatggttatccgggctactgagaaggcggatgggagtattaatgttgtgccccggaactatgacctgaagaaggttggtgcgggtaatgcgtatgtggatgatagccatggaaaccccgttatcaactctgctaccggacgtatgggtgtttggtttggtaagggacggatctag

SEQ ID NO: 14176 - protein, 330 aa, Muscodor strobelii
  misc_feature: SGI Peptide ID NO. 564666
  misc_feature (83)..(329): NCBI GI: 212530368 Blast Desc: PMAA_036190 [Penicillium marneffei ATCC 18224] gi|210074739|gb|EEA28826.1| PMAA_036190 [Penicillium marneffei ATCC 18224]
  misc_feature (159)..(328): NCBI GI: 171680731 Blast Desc: protein product [Podospora anserina] gi|170939993|emb|CAP65219.1| protein product [Podospora anserina]
MLFKTFLTLAASAALVSARTIPNYPRDTDSSDIISVEADDISDFDVSVFDRSVEDDGEDLDDDMDMDMDDEDDDGDDDDGVDLPNPDLDEIFSTNNTAGADFPTGGLVREPVTPENNPNTPELTKRAFTCPTKAMKVKGSKVKGKGLKITNGDSVARSFYIYHNSCDSVPFKYISIPAHKTRYVGVPAHFEGRITRGNNKLNLAGKPRTLGTWLEFSIDASGVMWGDVSLIRGCDGAAAVWSLDNAPRRHKGFRQNILPGAPKKAMTKKAGGAMVIRATEKADGSINVVPRNYDLKKVGAGNAYVDDSHGNPVINSATGRMGVWFGKGRI

SEQ ID NO: 14177 - DNA, 582 bp, Muscodor strobelii
  misc_feature: SGI cDNA ID NO. 564667
  misc_feature: Encodes the peptide sequence at SEQ ID NO 14178
atgtccgcagatacaatgtcttcttcagacgagaaacccgtagaggctcgggcccgatcgcgaaccagggacctcctcgcctatagtcagcgacaggtcgaccgcatcgtgagcccgccaacacgccagagagccatggactccacgcaagcatttgcatctgagcggcctgttcttactgccctgatcgtaacccaagccggtctcgccgcgctgccaatcctcttcttcctcggcttcgccctctcaaccttgacattcgccgttctctccgcgctcgcattcacattcttctgggtcggcctcgcgctcctcttcctcatccctaccctcctcgtaactagtggtctcgggatcctcgtctggctgtggattgtgggaagttatctcgtcggccgatggacctataataagctccccgtctccgtccgcggcgacgtacaagtcgaggccccccccggtggaaaacaggtcatcttccagaagcataccaatggcgaccagagtgcacagagcgatcagagttacgctgctgtgcttgacaaagcgatcaaggacgaggcggctgaggtccgggattag

SEQ ID NO: 14178 - protein, 193 aa, Muscodor strobelii
  misc_feature: SGI Peptide ID NO. 564667
  misc_feature (5)..(145): NCBI GI: 256728557 Blast Desc: NECHADRAFT_85970 [Nectria haematococca mpVI 77-13-4]
  misc_feature (30)..(167): NCBI GI: 154292563 Blast Desc: BC1G_14805 [Botryotinia fuckeliana B05.10] gi|150845886|gb|EDN21079.1| BC1G_14805 [Botryotinia fuckeliana B05.10]
  misc_feature (30)..(163): NCBI GI: 156051754 Blast Desc: SS1G_07284 [Sclerotinia sclerotiorum 1980] gi|154705062|gb|EDO04801.1| SS1G_07284 [Sclerotinia sclerotiorum 1980]
  misc_feature (18)..(188): NCBI GI: 39977733 Blast Desc: MGG_06751 [Magnaporthe grisea 70-15] gi|145013729|gb|EDJ98370.1| MGG_06751 [Magnaporthe grisea 70-15]
  misc_feature (8)..(145): NCBI GI: 261360583 Blast Desc: [Verticillium albo-atrum VaMs.102]
  misc_feature (21)..(155): NCBI GI: 46110290 Blast Desc: FG02027.1 [Gibberella zeae PH-1]
  misc_feature (33)..(193): NCBI GI: 212535468 Blast Desc: PMAA_083850 [Penicillium marneffei ATCC 18224] gi|210070289|gb|EEA24379.1| PMAA_083850 [Penicillium marneffei ATCC 18224]
  misc_feature (36)..(126): NCBI GI: 85091006 Blast Desc: NCU08922 [Neurospora crassa OR74A] gi|28920071|gb|EAA29455.1| [Neurospora crassa OR74A] gi|28950289|emb|CAD70743.1| [Neurospora crassa]
  misc_feature (24)..(139): NCBI GI: 116198485 Blast Desc: [Chaetomium globosum CBS 148.51] gi|88178677|gb|EAQ86145.1| [Chaetomium globosum CBS 148.51]
  misc_feature (34)..(133): NCBI GI: 189190426 Blast Desc: [Pyrenophora tritici-repentis Pt-1C-BFP] gi|187973158|gb|EDU40657.1| [Pyrenophora tritici-repentis Pt-1C-BFP]
MSADTMSSSDEKPVEARARSRTRDLLAYSQRQVDRIVSPPTRQRAMDSTQAFASERPVLTALIVTQAGLAALPILFFLGFALSTLTFAVLSALAFTFFWVGLALLFLIPTLLVTSGLGILVWLWIVGSYLVGRWTYNKLPVSVRGDVQVEAPPGGKQVIFQKHTNGDQSAQSDQSYAAVLDKAIKDEAAEVRD

SEQ ID NO: 14179 - DNA, 1314 bp, Muscodor strobelii
  misc_feature: SGI EST ID NO. CUFF.33745.0
  misc_feature: Variant of the nucleotide sequence at SEQ ID NO 14177
gaacaggacctgacatacacaagtcccgctagaccagatcaggactggtctatccgcttccccggcccctggccaacccacgggatcggcaggcagagggagcgatgatgaggtgatgtcagcttccttcccgctgagccttcccgctgggcagtgagaggatcaaagcttcttacgcggggcccttccgcgtttctccaacgacgttgtctgtagtgatcttctaatctttcaaatcttgctgcatatttctaatcaccatgcattttttcttacattgacctgcttgacgtcgagaacttcgtcatagctgcctagctttgagaatttcgcattccgttcgctccgtccgacatatcctactccccggatcttcattgcccttactctccgaaacagaacctctcgccatcatgtccgcagatacaatgtcttcttcagacgagaaacccgtagaggctcgggcccgatcgcgaaccagggacctcctcgcctatagtcagcgacaggtcgaccgcatcgtgagcccgccaacacgccagagagccatggactccacgcaagcatttgcatctgagcggcctgttcttactgccctgatcgtaacccaagccggtctcgccgcgctgccaatcctcttcttcctcggcttcgccctctcaaccttgacattcgccgttctctccgcgctcgcattcacattcttctgggtcggcctcgcgctcctcttcctcatccctaccctcctcgtaactagtggtctcgggatcctcgtctggctgtggattgtgggaagttatctcgtcggccgatggacctataataagctccccgtctccgtccgcggcgacgtacaagtcgaggccccccccggtggaaaacaggtcatcttccagaagcataccaatggcgaccagagtgcacagagcgatcagagttacgctgctgtgcttgacaaagcgatcaaggacgaggcggctgaggtccgggattaggttgctcacaaggtcgccatggtcttgactgctgtctggtggttctttgttcatctcgggcttcatgagctgttctcatggcatgcgtttcatagatggtaacggcggattctactacctagcttttaggctttggatggtcggcgtcgggatcggcattggtaggatgaaacgaggcgtttatggctgagatacccgtattgagtccgaagacgaagctattgaattggcgtcttagaggtctaccttgtaagaggcaatgggtgcttagtgcactcttcgatattactaatatgtatcattcttcaccgaaaccgaa

SEQ ID NO: 14180 - DNA, 1311 bp, Muscodor strobelii
  misc_feature: SGI cDNA ID NO. 564668
  misc_feature: Encodes the peptide sequence at SEQ ID NO 14181
atggagcacgatacaaaaaccccacaatatcgaacagacgatagaacatctttcgcctacacgtcagctcgggatcgatggcccgtcattattaccggagcaatcgatgacaccttcagatcagtagctcaatgcgacgatgctgagaagcgatacgaaggcaagaagatcgtggaagagcttggaaacctcaaatatgaattacagcacgacagaaagttgacgccgatccgagacgatggctttcctgatgtttcgctgtataacgaagagttagggaagttgggtacaccaacgtggttcaatattccgtggctgtactgcgaatgttatctttaccgacgcatcagcacgtcattcacattatcccaacactggaaaagctatgatgtattctctcgccaaaagatcaacacgtttcgttcctctcggccagccgtaatcgaattagctgcgcgttataaggatcttgtaacacagatggcagccgacaaggacaaaacgggtaccgagcatgaggcaacgcagaaactcctattcaccgagatgtgcgagatctgcctctggggaaatgccacagatttatctcttcttacgacattgacatatgatgacattcaaaagcttcaaggttccgaagcaaggaaggcttcggaaaagaacatcgtcgtaaacaacttagatgctgcctatgccgttcttcaaaaggccaagagcgacggcaagaaagaacgacgagtcgatattgtcctggacaacgctggtttcgaactctacgtagacttgatcctagctggctatcttatctcctccggcctcgcaacacatgtcgttctgcatccaaagtctattccctggtttgtatcggatgtattaccgggtgacttcgcagcattactgagtgctctcgccaatcccaaggctttctacgaaaatccttcagaagacgagaaggcgcaagataagacaccgccgccgctgtccgagaaggaagaatccgacctgagcttcttgttccaggagtgggctaagatgcacgccgaaggacagctgctcttgagaccgaaccgtttctggacacacggaggcagtttctggagattgccagctacggagaaagatctgtacgaagacctgaaagagagcgaactcgtagtgttcaaaggtgacttgaactaccggaaactaacggccgacccaggcgaggacgagaagctcagagcgatggacggtggaggaggtgacagcggtgcccgaaaatgggcatggaatggcaagtgggccgttgcgtctttctctggcggcaaatga

SEQ ID NO: 14181 - protein, 436 aa, Muscodor strobelii
  misc_feature: SGI Peptide ID NO. 564668
  misc_feature (20)..(420): Pfam Id: PF01937 Pfam Desc: Domain of function DUF89
  misc_feature (20)..(397): Pfam Id: PF01937 Pfam Desc: Domain of function DUF89
  misc_feature (1)..(436): NCBI GI: 154316139 Blast Desc: BC1G_03654 [Botryotinia fuckeliana B05.10] gi|150846441|gb|EDN21634.1| BC1G_03654 [Botryotinia fuckeliana B05.10]
  misc_feature (1)..(435): NCBI GI: 145615233 Blast Desc: MGG_13068 [Magnaporthe grisea 70-15] gi|145022110|gb|EDK06130.1| MGG_13068 [Magnaporthe grisea 70-15]
  misc_feature (1)..(435): NCBI GI: 46110357 Blast Desc: FG02060.1 [Gibberella zeae PH-1]
  misc_feature (1)..(436): NCBI GI: 156037498 Blast Desc: SS1G_12462 [Sclerotinia sclerotiorum 1980] gi|154697871|gb|EDN97609.1| SS1G_12462 [Sclerotinia sclerotiorum 1980]
  misc_feature (1)..(435): NCBI GI: 171692485 Blast Desc: protein product [Podospora anserina] gi|170946191|emb|CAP72992.1| protein product [Podospora anserina]
  misc_feature (1)..(435): NCBI GI: 256728586 Blast Desc: [Nectria haematococca mpVI 77-13-4]
  misc_feature (1)..(436): NCBI GI: 212535626 Blast Desc: DUF89 domain protein [Penicillium marneffei ATCC 18224] gi|210070368|gb|EEA24458.1| DUF89 domain protein [Penicillium marneffei ATCC 18224]
  misc_feature (1)..(433): NCBI GI: 169624164 Blast Desc: SNOG_15336 [Phaeosphaeria nodorum SN15] gi|160705123|gb|EAT77269.2| SNOG_15336 [Phaeosphaeria nodorum SN15]
  misc_feature (1)..(435): NCBI GI: 85089202 Blast Desc: NCU07814 [Neurospora crassa OR74A] gi|28919176|gb|EAA28668.1| NCU07814 [Neurospora crassa OR74A]
  misc_feature (9)..(436): NCBI GI: 242793584 Blast Desc: serine/threonine protein phosphatase PPT1 [Talaromyces stipitatus ATCC 10500] gi|218718782|gb|EED18202.1| serine/threonine protein phosphatase PPT1 [Talaromyces stipitatus
MEHDTKTPQYRTDDRTSFAYTSARDRWPVIITGAIDDTFRSVAQCDDAEKRYEGKKIVEELGNLKYELQHDRKLTPIRDDGFPDVSLYNEELGKLGTPTWFNIPWLYCECYLYRRISTSFTLSQHWKSYDVFSRQKINTFRSSRPAVIELAARYKDLVTQMAADKDKTGTEHEATQKLLFTEMCEICLWGNATDLSLLTTLTYDDIQKLQGSEARKASEKNIVVNNLDAAYAVLQKAKSDGKKERRVDIVLDNAGFELYVDLILAGYLISSGLATHVVLHPKSIPWFVSDVLPGDFAALLSALANPKAFYENPSEDEKAQDKTPPPLSEKEESDLSFLFQEWAKMHAEGQLLLRPNRFWTHGGSFWRLPATEKDLYEDLKESELVVFKGDLNYRKLTADPGEDEKLRAMDGGGGDSGARKWAWNGKWAVASFSGGK

SEQ ID NO: 14182 - DNA, 1676 bp, Muscodor strobelii
  misc_feature: SGI EST ID NO. CUFF.33752.0
  misc_feature: Variant of the nucleotide sequence at SEQ ID NO 14180
caacgatcatcattgaaatcgcgttaatttggttagatgcttgtcagactttcttcttctagaactgagcaatagaaaccagaaatccacatattcaaacaaaagtacttagtactgagatacgcaccatggagcacgatacaaaaaccccacaatatcgaacagacgatagaacatctttcgcctacacgtcagctcgggatcgatggcccgtcattattaccggagcaatcgatgacaccttcagatcagtagctcaatgcgacgatgctgagaagcgatacgaaggcaagaagatcgtggaagagcttggaaacctcaaatatgaattacagcacgacagaaagttgacgccgatccgagacgatggctttcctgatgtttcgctgtataacgaagagttagggaagttgggtacaccaacgtggttcaatattccgtggctgtactgcgaatgttatctttaccgacgcatcagcacgtcattcacattatcccaacactggaaaagctatgatgtattctctcgccaaaagatcaacacgtttcgttcctctcggccagccgtaatcgaattagctgcgcgttataaggatcttgtaacacagatggcagccgacaaggacaaaacgggtaccgagcatgaggcaacgcagaaactcctattcaccgagatgtgcgagatctgcctctggggaaatgccacagatttatctcttcttacgacattgacatatgatgacattcaaaagcttcaaggttccgaagcaaggaaggcttcggaaaagaacatcgtcgtaaacaacttagatgctgcctatgccgttcttcaaaaggccaagagcgacggcaagaaagaacgacgagtcgatattgtcctggacaacgctggtttcgaactctacgtagacttgatcctagctggctatcttatctcctccggcctcgcaacacatgtcgttctgcatccaaagtctattccctggtttgtatcggatgtattaccgggtgacttcgcagcattactgagtgctctcgccaatcccaaggctttctacgaaaatccttcagaagacgagaaggcgcaagataagacaccgccgccgctgtccgagaaggaagaatccgacctgagcttcttgttccaggagtgggctaagatgcacgccgaaggacagctgctcttgagaccgaaccgtttctggacacacggaggcagtttctggagattgccagctacggagaaagatctgtacgaagacctgaaagagagcgaactcgtagtgttcaaaggtgacttgaactaccggaaactaacggccgacgccgcctgggatcccgcgaccccattcacggaagccatcggccctctcggacctggctccggtgtcaacatacttgcattaagaacatgcaaagctgatgtagtcgttggactacagccaggcgaggacgagaagctcagagcgatggacggtggaggaggtgacagcggtgcccgaaaatgggcatggaatggcaagtgggccgttgcgtctttctctggcggcaaatgagatagctgtgcttgaatactcgacgtcatgttgtagatgaccatagaccttttagactccccatcttagagatactactgtcacatagacagcctcaaagaaagagaagatacctgctac

SEQ ID NO: 14183 - DNA, 588 bp, Muscodor strobelii
  misc_feature: SGI cDNA ID NO. 564669
  misc_feature: Reduced expression when VOC is produced
  misc_feature: Encodes the peptide sequence at SEQ ID NO 14184
atgagatacaccattgctgccgtggcctttgctgccgctgtttccgcacagagcctcagcgatatcccttcatgcgctctgccttgcatcaacgatgccgtcacgtcctccaccgactgtgatgtctccgactacaagtgcatctgcgacaacgaggacactttgaccactgcctccaccagctgtgtcatcgacaaatgcggtgcctctacggccgtcagcgaggttcttcccgctgtccaggctttctgctcagccgtcgaggcctctgcttccgcaactcctacctctactgcggcgcccaccagcagcggctcggctactcccacctcgactgaggcttctaccactgctgctcccacttccaccgtagcctcatcttcctcggctgccacctctactgctgctccttcatccagcggtgctgcatccggatacccaacctccggataccctactccttcaagctccggcaacggcaccgctcccactagctctagcaccccagttcccactgctggtgccgctattgtcggctccgttggcagcttcgccatgctcgccctcggtgctcttgccgctttctaa

SEQ ID NO: 14184 - protein, 195 aa, Muscodor strobelii
  misc_feature: SGI Peptide ID NO. 564669
  misc_feature (18)..(85): Pfam Id: PF05730 Pfam Desc: CFEM domain
  misc_feature (1)..(193): NCBI GI: 256728597 Blast Desc: NECHADRAFT_101945 [Nectria haematococca mpVI 77-13-4]
  misc_feature (1)..(151): NCBI GI: 226492324 Blast Desc: LOC100274375 [Zea mays] gi|194707598|gb|ACF87883.1| [Zea mays]
  misc_feature (1)..(92): NCBI GI: 85091019 Blast Desc: NCU07776 [Neurospora crassa OR74A] gi|12718341|emb|CAC28576.1| conserved [Neurospora crassa] gi|28920078|gb|EAA29461.1| [Neurospora crassa OR74A]
  misc_feature (17)..(193): NCBI GI: 261360505 Blast Desc: VDBG_09043 [Verticillium albo-atrum VaMs.102]
  misc_feature (14)..(90): NCBI GI: 164424021 Blast Desc: NCU08438 [Neurospora crassa OR74A] gi|28881253|emb|CAD70512.1| conserved [Neurospora crassa] gi|157070335|gb|EAA34172.2| [Neurospora crassa OR74A]
  misc_feature (17)..(84): NCBI GI: 116198435 Blast Desc: [Chaetomium globosum CBS 148.51] gi|88178652|gb|EAQ86120.1| [Chaetomium globosum CBS 148.51]
  misc_feature (21)..(85): NCBI GI: 46110391 Blast Desc: FG02077.1 [Gibberella zeae PH-1]
  misc_feature (1)..(195): NCBI GI: 156051776 Blast Desc: SS1G_07295 [Sclerotinia sclerotiorum 1980] gi|154705073|gb|EDO04812.1| SS1G_07295 [Sclerotinia sclerotiorum 1980]
  misc_feature (1)..(73): NCBI GI: 171692479 Blast Desc: protein product [Podospora anserina] gi|170946188|emb|CAP72989.1| protein product [Podospora anserina]
  misc_feature (1)..(84): NCBI GI: 209570410 Blast Desc: [Glomerella graminicola]
  misc_feature: Useful for introducing or modulating the production of volatile compounds
MRYTIAAVAFAAAVSAQSLSDIPSCALPCINDAVTSSTDCDVSDYKCICDNEDTLTTASTSCVIDKCGASTAVSEVLPAVQAFCSAVEASASATPTSTAAPTSSGSATPTSTEASTTAAPTSTVASSSSAATSTAAPSSSGAASGYPTSGYPTPSSSGNGTAPTSSSTPVPTAGAAIVGSVGSFAMLALGALAAF

SEQ ID NO: 14185 - DNA, 1309 bp, Muscodor strobelii
  misc_feature: SGI EST ID NO. CUFF.33793.0
  misc_feature: Variant of the nucleotide sequence at SEQ ID NO 14183
gcctgcatggtgaagaatagtgccgggtctaccgcgaccatcagctgcgccgccctgcatcaaacggtcaataccctccttcttggaaagatgacggacgttccaatcaacttctcaatgcggtcgatcatcgagagaaaacctgcagacgggaatatagcgagacggcgccacaggggtaactgacgcggcatataagatataggaccgcccatccccccatctcaagtctattctcctgaacaaccacattcgcttttgggattcaacaaatcgtgtttactgtcattcgctcttgtaacaacactcgaaaaactctcagtccagttattacctcatctccaaacccaaccgccaaaatgagatacaccattgctgccgtggcctttgctgccgctgtttccgcacagagcctcagcgatatcccttcatgcgctctgccttgcatcaacgatgccgtcacgtcctccaccgactgtgatgtctccgactacaagtgcatctgcgacaacgaggacactttgaccactgcctccaccagctgtgtcatcgacaaatgcggtgcctctacggccgtcagcgaggttcttcccgctgtccaggctttctgctcagccgtcgaggcctctgcttccgcaactcctacctctactgcggcgcccaccagcagcggctcggctactcccacctcgactgaggcttctaccactgctgctcccacttccaccgtagcctcatcttcctcggctgccacctctactgctgctccttcatccagcggtgctgcatccggatacccaacctccggataccctactccttcaagctccggcaacggcaccgctcccactagctctagcaccccagttcccactgctggtgccgctattgtcggctccgttggcagcttcgccatgctcgccctcggtgctcttgccgctttctaagctggagttgagaaaatggtgcatgttgtgacgaaatgagactgacatatcagactcgggacgggaaatgaacttaggattctcaatgtattaactatgaatttggaaaaatcatgtcttaatgtaattgggcggattggggcacggcattgtcgggtctagtttacttcgactgaaaaaattacaatacagtacaaagttatcccaaaacttgtgtttcgcgatgtattctatgaattccttaaaatacacatatcttggtcgatatttgtcggatagtgagcaagaaaagtgtgaagcgcagcgtgacaacgagatgggaagagcaggcaatcgactattgggttgctcacgcgtccagg

SEQ ID NO: 14186 - DNA, 363 bp, Muscodor strobelii
  misc_feature: SGI cDNA ID NO. 564670
  misc_feature: Encodes the peptide sequence at SEQ ID NO 14187
atgcccacttcacttgactcggctcgtcccatcatggcaccttcagttgtctctccccgggcatcggtccgttacagcacatacagcactgcgccttctctagcagccaccatggccacaacggattccgcccatgccgagatccgcgacatcacgtcgggtcttgcgcgcatggagaacaaggccttgtcgctgcaacgtgtcgtgctgtcggaggataaagctgccaatcttaacaaacttgcacttggagcaaaacttgaccgggctctggaccgccgaatgacgagccaggacgccgaaatgcgaccgagacatgtgacttcatacagcgaaaagatgagggagaaggaggaacaataa

SEQ ID NO: 14187 - protein, 120 aa, Muscodor strobelii
  misc_feature: SGI Peptide ID NO. 564670
  misc_feature (1)..(119): NCBI GI: 256728780 Blast Desc: NECHADRAFT_50679 [Nectria haematococca mpVI 77-13-4]
  misc_feature (1)..(118): NCBI GI: 46110439 Blast Desc: FG02101.1 [Gibberella zeae PH-1]
  misc_feature (1)..(113): NCBI GI: 145615231 Blast Desc: MGG_05454 [Magnaporthe grisea 70-15] gi|145022109|gb|EDK06129.1| MGG_05454 [Magnaporthe grisea 70-15]
  misc_feature (1)..(114): NCBI GI: 116198453 Blast Desc: CHGG_07382 [Chaetomium globosum CBS 148.51] gi|88178661|gb|EAQ86129.1| CHGG_07382 [Chaetomium globosum CBS 148.51]
  misc_feature (1)..(118): NCBI GI: 85090695 Blast Desc: NCU07747 [Neurospora crassa OR74A] gi|28919911|gb|EAA29304.1| conserved [Neurospora crassa OR74A]
  misc_feature (1)..(113): NCBI GI: 261360532 Blast Desc: conserved [Verticillium albo-atrum VaMs.102]
  misc_feature (4)..(106): NCBI GI: 171692491 Blast Desc: protein product [Podospora anserina] gi|170946194|emb|CAP72995.1| protein product [Podospora anserina]
  misc_feature (2)..(105): NCBI GI: 240279678 Blast Desc: conserved [Ajellomyces capsulatus H143]
  misc_feature (3)..(113): NCBI GI: 242803939 Blast Desc: conserved [Talaromyces stipitatus ATCC 10500] gi|218717619|gb|EED17040.1| conserved [Talaromyces stipitatus ATCC 10500]
  misc_feature (4)..(115): NCBI GI: 226279067 Blast Desc: conserved [Paracoccidioides brasiliensis Pb01]
MPTSLDSARPIMAPSVVSPRASVRYSTYSTAPSLAATMATTDSAHAEIRDITSGLARMENKALSLQRVVLSEDKAANLNKLALGAKLDRALDRRMTSQDAEMRPRHVTSYSEKMREKEEQ

SEQ ID NO: 14188 - DNA, 2581 bp, Muscodor strobelii
  misc_feature: SGI EST ID NO. CUFF.34201.1
  misc_feature: Variant of the nucleotide sequence at SEQ ID NO 14186
ctagtcctgtcccagttcctcttactctcaagtaggtcgtttttgcctatcgtcgcagtcatatgctagtgtagtcgtagaccttccgacactcgctcttctggaccttccctgaagcacacatgcagctgcagccctgaagcagtcgtgattggtttccaaatccaaatcccctggcacgttatctggatagtcgctcgctccccagtttaggcgaaccgtcttgactgctagtccggcctcacctcctcctcgaacccgctcataaccctgctggatcccaggtagcacatactggaccgctatctcttcatctctttcactctccctaagactccttcttttcttttgctctacgtagccgtgtgcgcaaaattgtcctgtccactgccctgatcactggtacacacgagtcacgaagacctgctagcctcgggacctctagaacacaaacagcatagtcagtggcctgctactccagacacggcccggcctcacgaacccaatcaacatcttgagtttgacaaatcggcccatcggtcaatacatcatcatcgtatccaagatgcccacttcacttgactcggctcgtcccatcatggcaccttcagttgtctctccccgggcatcggtccgttacagcacatacagcactgcgccttctctagcagccaccatggccacaacggattccgcccatgccgagatccgcgacatcacgtcgggtcttgcgcgcatggagaacaaggccttgtcgctgcaacgtgtcgtgctgtcggaggataaagctgccaatcttaacaaacttgcacttggagcaaaacttgaccgggctctggaccgccgaatgacgagccaggacgccgaaatgcgaccgagacatgtgacttcatacagcgaaaagatgagggagaaggaggaacaataagtccatatacgagaacaaacaggacagaacttcgacgctcacagccattccccgatttgatgatcagccaatgatcatattcactactaggcaccattccagaccttacactcatggcacaaatgccaccaaacccaattctactgccaaggaacgaagatgatgggcgatctcaaattcgacggtgagagccattgtcgagagcatgtgcggaaggatgtgtgccatagggagtctcgagaccatacacccagaataccctcgcattatgccgagtcgatagagcagagaagggagtgaggcaagattctttcattgcaatgtcatgtataatgaggaggaaaggaggcatcaacggaattgttcacgcacaacgtgtgtcaacccaccccagagatgttttgtgttgaatttatagcggtcttttgcatgatattcggtaccaccatagtttcggtacctgactgagagataccaatggaagtacgatcaactgtctatccataatcgcagtgatgatatcatgcgtgatcagccatcatctggtcatactttctcttccgcgaacgcttaagcttgatcgtaacaatcctgttcttgactggtcccttcttgactgacccaacgcctgaactccttatctgtctgcccagcggctggaccggctgcaacaaacgcaaagtcccaatgtaatctgcccaaacagaaaccgagcacgagcaaccgaaatcggcatcacaaccgaaaggcccatcaatctaagacgaccctcccaccttctccagcttcccattaacctccttgagcaaagacagcagctcgccctcctcaggatcaacctcaagacccttacgaacccactcctgcgcctcgctcagccgtcccatctccatcagacactttccccgccgccaccaggccttggagttgcccacgcgcttggcctcgacgctcgcctcggcgtcgacggcgccttcgggccagccttgtagtgccatgtgtgcttgggcgcggttggcgaaaagcgcggctacttcttcgcgcacgagaccttggggttcccataagggacgggtgagagccatttgcagaccgaggttgtagaatttgatggcgtcggcgtatttggagttcttgtaggcggcgttgccgctgtcgcggagcttggcgatgttggcggagcgcttggggtctactgggaccggtggtgggggcacttggtttggtgtgttgagggtgaggagggagcggtggagggcgttgagctgggagagttcgttttggagcgttcgcgagctagagggtgtgctcaaggctttggtctgagggtcgatttggagggggaggagggtgaatgtgtcggcgtccgacattttggcgggttttttgtggtactttgcctgaagctactagtgtggtagttttgttgcttgtataattcgagcagcagttgtgagttggtgagctgtggtggagcgtgggaattgttgatggaatattatggtttgcgatatcaaaagttgtctgatgaagcgatctggcgacttggagtaacggtcggaggtacttggttacaagccgccgtcatttggagggacggtgccaatttagacgacagctggcgaccattcatcccagcattgaatggtaacc

SEQ ID NO: 14189 - DNA, 615 bp, Muscodor strobelii
  misc_feature: SGI cDNA ID NO. 564671
  misc_feature: Reduced expression when VOC is produced
  misc_feature: Encodes the peptide sequence at SEQ ID NO 14190
atgtcggacgccgacacattcaccctcctccccctccaaatcgaccctcagaccaaagccttgagcacaccctctagctcgcgaacgctccaaaacgaactctcccagctcaacgccctccaccgctccctcctcaccctcaacacaccaaaccaagtgcccccaccaccggtcccagtagaccccaagcgctccgccaacatcgccaagctccgcgacagcggcaacgccgcctacaagaactccaaatacgccgacgccatcaaattctacaacctcggtctgcaaatggctctcacccgtcccttatgggaaccccaaggtctcgtgcgcgaagaagtagccgcgcttttcgccaaccgcgcccaagcacacatggcactacaaggctggcccgaaggcgccgtcgacgccgaggcgagcgtcgaggccaagcgcgtgggcaactccaaggcctggtggcggcggggaaagtgtctgatggagatgggacggctgagcgaggcgcaggagtgggttcgtaagggtcttgaggttgatcctgaggagggcgagctgctgtctttgctcaaggaggttaatgggaagctggagaaggtgggagggtcgtcttag

SEQ ID NO: 14190 - protein, 204 aa, Muscodor strobelii
  misc_feature: SGI Peptide ID NO. 564671
  misc_feature (150)..(183): Pfam Id: PF00515 Pfam Desc: Tetratricopeptide repeat
  misc_feature (150)..(183): Pfam Id: PF07719 Pfam Desc: Tetratricopeptide repeat
  misc_feature (1)..(197): NCBI GI: 39941100 Blast Desc: MGG_05462 [Magnaporthe grisea 70-15] gi|145022120|gb|EDK06140.1| MGG_05462 [Magnaporthe grisea 70-15]
  misc_feature (1)..(200): NCBI GI: 156037464 Blast Desc: SS1G_12445 [Sclerotinia sclerotiorum 1980] gi|154697854|gb|EDN97592.1| SS1G_12445 [Sclerotinia sclerotiorum 1980]
  misc_feature (1)..(199): NCBI GI: 261360533 Blast Desc: translocation protein sec72 [Verticillium albo-atrum VaMs.102]
  misc_feature (3)..(198): NCBI GI: 85090693 Blast Desc: NCU07746 [Neurospora crassa OR74A] gi|28919910|gb|EAA29303.1| [Neurospora crassa OR74A]
  misc_feature (1)..(200): NCBI GI: 154316101 Blast Desc: BC1G_03635 [Botryotinia fuckeliana B05.10] gi|150846422|gb|EDN21615.1| BC1G_03635 [Botryotinia fuckeliana B05.10]
  misc_feature (1)..(202): NCBI GI: 46110437 Blast Desc: FG02100.1 [Gibberella zeae PH-1]
  misc_feature (1)..(198): NCBI GI: 116198451 Blast Desc: CHGG_07381 [Chaetomium globosum CBS 148.51] gi|88178660|gb|EAQ86128.1| CHGG_07381 [Chaetomium globosum CBS 148.51]
  misc_feature (1)..(201): NCBI GI: 171692493 Blast Desc: protein product [Podospora anserina] gi|170946195|emb|CAP72996.1| protein product [Podospora anserina]
  misc_feature (1)..(196): NCBI GI: 189190512 Blast Desc: tetratricopeptide repeat domain containing protein [Pyrenophora tritici-repentis Pt-1C-BFP] gi|187973201|gb|EDU40700.1| tetratricopeptide repeat domain
  misc_feature (1)..(204): NCBI GI: 169624116 Blast Desc: SNOG_15310 [Phaeosphaeria nodorum SN15] gi|111056123|gb|EAT77243.1| SNOG_15310 [Phaeosphaeria nodorum SN15]
  misc_feature: Useful for introducing or modulating the production of volatile compounds
MSDADTFTLLPLQIDPQTKALSTPSSSRTLQNELSQLNALHRSLLTLNTPNQVPPPPVPVDPKRSANIAKLRDSGNAAYKNSKYADAIKFYNLGLQMALTRPLWEPQGLVREEVAALFANRAQAHMALQGWPEGAVDAEASVEAKRVGNSKAWWRRGKCLMEMGRLSEAQEWVRKGLEVDPEEGELLSLLKEVNGKLEKVGGSS

SEQ ID NO: 14191 - DNA, 2730 bp, Muscodor strobelii
  misc_feature: SGI EST ID NO. CUFF.34201.0
  misc_feature: Variant of the nucleotide sequence at SEQ ID NO 14189
ggttaccattcaatgctgggatgaatggtcgccagctgtcgtctaaattggcaccgtccctccaaatgacggcggcttgtaaccaagtacctccgaccgttactccaagtcgccagatcgcttcatcagacaacttttgatatcgcaaaccataatattccatcaacaattcccacgctccaccacagctcaccaactcacaactgctgctcgaattatacaagcaacaaaactaccacactagtagcttcaggcaaagtaccacaaaaaacccgccaaaatgtcggacgccgacacattcaccctcctccccctccaaatcgaccctcagaccaaagccttgagcacaccctctagctcgcgaacgctccaaaacgaactctcccagctcaacgccctccaccgctccctcctcaccctcaacacaccaaaccaagtgcccccaccaccggtcccagtagaccccaagcgctccgccaacatcgccaagctccgcgacagcggcaacgccgcctacaagaactccaaatacgccgacgccatcaaattctacaacctcggtctgcaaatggctctcacccgtcccttatgggaaccccaaggtctcgtgcgcgaagaagtagccgcgcttttcgccaaccgcgcccaagcacacatggcactacaaggctggcccgaaggcgccgtcgacgccgaggcgagcgtcgaggccaagcgcgtgggcaactccaaggcctggtggcggcggggaaagtgtctgatggagatgggacggctgagcgaggcgcaggagtgggttcgtaagggtcttgaggttgatcctgaggagggcgagctgctgtctttgctcaaggaggttaatgggaagctggagaaggtgggagggtcgtcttagattgatgggcctttcggttgtgatgccgatttcggttgctcgtgctcggtttctgtttgggcagattacattgggactttgcgtttgttgcagccggtccagccgctgggcagacagataaggagttcaggcgttgggtcagtcaagaagggaccagtcaagaacaggattgttacgatcaagcttaagcgttcgcggaagagaaagtatgaccagatgatggctgatcacgcatgatatcatcactgcgattatggatagacagttgatcgtacttccattggtatctctcagtcaggtaccgaaactatggtggtaccgaatatcatgcaaaagaccgctataaattcaacacaaaacatctctggggtgggttgacacacgttgtgcgtgaacaattccgttgatgcctcctttcctcctcattatacatgacattgcaatgaaagaatcttgcctcactcccttctctgctctatcgactcggcataatgcgagggtattctgggtgtatggtctcgagactccctatggcacacatccttccgcacatgctctcgacaatggctctcaccgtcgaatttgagatcgcccatcatcttcgttccttggcagtagaattgggtttggtggcatttgtgccatgagtgtaaggtctggaatggtgcctagtagtgaatatgatcattggctgatcatcaaatcggggaatggctgtgagcgtcgaagttctgtcctgtttgttctcgtatatggacttattgttcctccttctccctcatcttttcgctgtatgaagtcacatgtctcggtcgcatttcggcgtcctggctcgtcattcggcggtccagagcccggtcaagttttgctccaagtgcaagtttgttaagattggcagctttatcctccgacagcacgacacgttgcagcgacaaggccttgttctccatgcgcgcaagacccgacgtgatgtcgcggatctcggcatgggcggaatccgttgtggccatggtggctgctagagaaggcgcagtgctgtatgtgctgtaacggaccgatgcccggggagagacaacctgctcgggcggagatgtcagcttctccctgcgcggagtgaaatgaaggtgttgctgtttcagcaattttgagatgattcaataatcgatggatgcgttgtgtgcaattggcatggcgatcggtgacttggggagggaaggagactcactgaaggtgccatgatgggacgagccgagtcaagtgaagtgggcatcttggatacgatgatgatgtattgaccgatgggccgatttgtcaaactcaagatgttgattgggttcgtgaggccgggccgtgtctggagtagcaggccactgactatgctgtttgtgttctagaggtcccgaggctagcaggtcttcgtgactcgtgtgtaccagtgatcagggcagtggacaggacaattttgcgcacacggctacgtagagcaaaagaaaagaaggagtcttagggagagtgaaagagatgaagagatagcggtccagtatgtgctacctgggatccagcagggttatgagcgggttcgaggaggaggtgaggccggactagcagtcaagacggttcgcctaaactggggagcgagcgactatccagataacgtgccaggggatttggatttggaaaccaatcacgactgcttcagggctgcagctgcatgtgtgcttcagggaaggtccagaagagcgagtgtcggaaggtctacgactacactagcatatgactgcgacgataggcaaaaacgacctacttgagagtaagaggaactgggacaggactag

SEQ ID NO: 14192 - DNA, 1614 bp, Muscodor strobelii
  misc_feature: SGI cDNA ID NO. 564672
  misc_feature: Elevated expression when VOC is produced
  misc_feature: Encodes the peptide sequence at SEQ ID NO 14193
atgggtttcttacgcacagctctttcggcttccatgctgctggccagcaccaatgccgcattggaacccattgtcatgaagggtaccaagttcttcacaaaaagcggcgagcagttctatctcaagggcgttgcttaccaggctgagggtgccagcggtggatcggagggcactactaccaccaagtacgtcgatcctctcgccgatgagagcatctgcgagcgagatgttcccatcttggagaagctcggagtaaacacgatccgaacctacgctatcaacccggacaaggatcactccgcgtgcatgaagctgctggacgatgctggtatctacgttatcgccgatctaggagagccggctttgtccattaaccgagacacgcccgcctggaatgtcgagctgttcgagcgttaccaaggtgtcattgacaaccttggaaagtatgacaacgtcatcggcttcttcgccggtaacgaagtcaccaacaacgccaccaacacccctgcctctgcattcgtcaaggcggctgttcgtgactccaagaaatacatcactgataaggccagccgctggatgggtgttggttacgcggccaacgacgatgccgaaatccgcaacaccatggcccactacttcaactgcggcgagcaggaatcggcgatcgatttctggggctacaacatctactcttggtgcggaaagagcagcttcaccgagtccggttacgatgtgcaggtcgagttcttctccaacttctctgtccctgttttcttcgccgagtatggctgcaacaccgtcggtggtgctgagggtcgtacttgggatgagaccactgctctctactccagccaaatgacggatgttttcagcggtggcattgcctatatgttccacgaggaggagaacgactacggcttggttaaggtgtctggaaattctgctaagaccatgaagaactacgacgccctccgtgagaagctggctaaggttgatccgtcgaccacatccatgagtgcttacagcccaacgaactcccctgcttcttgccctgctactggcgacgactggcaagcatccaaggatctacctcctactcctgacagctctctctgcgactgtatgttcagctcggtttcttgcgcccctgccacagatctggacgagaaggactacggtgagatgttcgactacatctgcaccaacgaccaaaaggcctgtgctggaatcaagcaggataccgagactggtgtctacggcccttacggcatgtgcaaccccaagcagcagcttgcccatgtccttgatgcatactactcgaaccagaagaaagccagtgatgcttgcgatttcaagggtgccgcccaggttatcagcagtccgtcggccgcttcatcttgcaatgccaagcttgctaaggccagctctgaagtcgcagctgccgccacggccacttcggcatctgaagttggctctggttccggctcggacaccagcgacagcgcggctcctggtcttatgccctcgagcccccttttcacgcttggcaatgttgccgtcggtgtctacatgcttgtcgccatgggtgcgggtgccgccatgattgccttgtaa

SEQ ID NO: 14193 - protein, 537 aa, Muscodor strobelii
  misc_feature: SGI Peptide ID NO. 564672
  misc_feature (8)..(332): Pfam Id: PF03198 Pfam Desc: Glycolipid anchored surface protein (GAS1)
  misc_feature (379)..(469): Pfam Id: PF07983 Pfam Desc: X8 domain
  misc_feature (8)..(537): NCBI GI: 116198507 Blast Desc: CHGG_07409 [Chaetomium globosum CBS 148.51] gi|88178688|gb|EAQ86156.1| CHGG_07409 [Chaetomium globosum CBS 148.51]
  misc_feature (1)..(537): NCBI GI: 171692533 Blast Desc: protein product [Podospora anserina] gi|170946215|emb|CAP73016.1| protein product [Podospora anserina]
  misc_feature (5)..(537): NCBI GI: 85090980 Blast Desc: NCU08909 [Neurospora crassa OR74A] gi|28920058|gb|EAA29442.1| NCU08909 [Neurospora crassa OR74A] gi|28950300|emb|CAD70754.1| beta (1-3) glucanosyltransferase
  misc_feature (1)..(537): NCBI GI: 261360504 Blast Desc: 1,3-beta-glucanosyltransferase gel4 [Verticillium albo-atrum VaMs.102]
  misc_feature (21)..(537): NCBI GI: 226491348 Blast Desc: LOC100274422 [Zea mays] gi|194707854|gb|ACF88011.1| [Zea mays]
  misc_feature (21)..(537): NCBI GI: 91992190 Blast Desc: beta-1,3-glucanosyltransferase [Gibberella moniliformis]
  misc_feature (21)..(537): NCBI GI: 62275449 Blast Desc: beta-1,3-glucanosyltransferase [Fusarium oxysporum]
  misc_feature (21)..(537): NCBI GI: 46110280 Blast Desc: FG02022.1 [Gibberella zeae PH-1]
  misc_feature (21)..(476): NCBI GI: 256728723 Blast Desc: NECHADRAFT_72498 [Nectria haematococca mpVI 77-13-4]
  misc_feature (1)..(471): NCBI GI: 39946284 Blast Desc: MGG_08370 [Magnaporthe grisea 70-15] gi|145019976|gb|EDK04204.1| MGG_08370 [Magnaporthe grisea 70-15]
  misc_feature: Useful for introducing or modulating the production of volatile compounds
MGFLRTALSASMLLASTNAALEPIVMKGTKFFTKSGEQFYLKGVAYQAEGASGGSEGTTTTKYVDPLADESICERDVPILEKLGVNTIRTYAINPDKDHSACMKLLDDAGIYVIADLGEPALSINRDTPAWNVELFERYQGVIDNLGKYDNVIGFFAGNEVTNNATNTPASAFVKAAVRDSKKYITDKASRWMGVGYAANDDAEIRNTMAHYFNCGEQESAIDFWGYNIYSWCGKSSFTESGYDVQVEFFSNFSVPVFFAEYGCNTVGGAEGRTWDETTALYSSQMTDVFSGGIAYMFHEEENDYGLVKVSGNSAKTMKNYDALREKLAKVDPSTTSMSAYSPTNSPASCPATGDDWQASKDLPPTPDSSLCDCMFSSVSCAPATDLDEKDYGEMFDYICTNDQKACAGIKQDTETGVYGPYGMCNPKQQLAHVLDAYYSNQKKASDACDFKGAAQVISSPSAASSCNAKLAKASSEVAAAATATSASEVGSGSGSDTSDSAAPGLMPSSPLFTLGNVAVGVYMLVAMGAGAAMIAL

SEQ ID NO: 14194 - DNA, 2259 bp, Muscodor strobelii
  misc_feature: SGI EST ID NO. CUFF.33857.0
  misc_feature: Variant of the nucleotide sequence at SEQ ID NO 14192
gtacgattcacatgggacagaccatcccgtttcttaagcccttttgtgtgtcgttctcctccttctcaggtgtcactcaatcttccgttttacttgtttttgccttgttcagattctgagggggtttgttttactcaactttgtagcagcaaaccactcgacgctcgctttaccacttccaacttcacacactcattcaataacccaccgcgtaccgacgctctcttcggctaacaccaacaaacaaaatacaacaccaagtatcgtgcgaccagaaagtcaaagaggagcgactggaaaagaccttggtcatcatcaactactcgcgcgactcacttgtcttgccatttggccaaagctttattccaccacatcgaaaccccatatcagagccatcatgggtttcttacgcacagctctttcggcttccatgctgctggccagcaccaatgccgcattggaacccattgtcatgaagggtaccaagttcttcacaaaaagcggcgagcagttctatctcaagggcgttgcttaccaggctgagggtgccagcggtggatcggagggcactactaccaccaagtacgtcgatcctctcgccgatgagagcatctgcgagcgagatgttcccatcttggagaagctcggagtaaacacgatccgaacctacgctatcaacccggacaaggatcactccgcgtgcatgaagctgctggacgatgctggtatctacgttatcgccgatctaggagagccggctttgtccattaaccgagacacgcccgcctggaatgtcgagctgttcgagcgttaccaaggtgtcattgacaaccttggaaagtatgacaacgtcatcggcttcttcgccggtaacgaagtcaccaacaacgccaccaacacccctgcctctgcattcgtcaaggcggctgttcgtgactccaagaaatacatcactgataaggccagccgctggatgggtgttggttacgcggccaacgacgatgccgaaatccgcaacaccatggcccactacttcaactgcggcgagcaggaatcggcgatcgatttctggggctacaacatctactcttggtgcggaaagagcagcttcaccgagtccggttacgatgtgcaggtcgagttcttctccaacttctctgtccctgttttcttcgccgagtatggctgcaacaccgtcggtggtgctgagggtcgtacttgggatgagaccactgctctctactccagccaaatgacggatgttttcagcggtggcattgcctatatgttccacgaggaggagaacgactacggcttggttaaggtgtctggaaattctgctaagaccatgaagaactacgacgccctccgtgagaagctggctaaggttgatccgtcgaccacatccatgagtgcttacagcccaacgaactcccctgcttcttgccctgctactggcgacgactggcaagcatccaaggatctacctcctactcctgacagctctctctgcgactgtatgttcagctcggtttcttgcgcccctgccacagatctggacgagaaggactacggtgagatgttcgactacatctgcaccaacgaccaaaaggcctgtgctggaatcaagcaggataccgagactggtgtctacggcccttacggcatgtgcaaccccaagcagcagcttgcccatgtccttgatgcatactactcgaaccagaagaaagccagtgatgcttgcgatttcaagggtgccgcccaggttatcagcagtccgtcggccgcttcatcttgcaatgccaagcttgctaaggccagctctgaagtcgcagctgccgccacggccacttcggcatctgaagttggctctggttccggctcggacaccagcgacagcgcggctcctggtcttatgccctcgagcccccttttcacgcttggcaatgttgccgtcggtgtctacatgcttgtcgccatgggtgcgggtgccgccatgattgccttgtaaatgatctcacgatgttctcgggagttgagaaggtgcataatatcataccctgattgtctgtttttgttcaggtttctacggatagacatggtcatggaatggcggatctgcaaaatgctgggtcgtacttgtttgcttctggtgtagcctcatcggtatatgtaggatacatgatcctccaagattccgctagatgagtagcgtcaataatgtcatacttataatgaatgaccgttttgttctgaatt

SEQ ID NO: 14195 - DNA, 1134 bp, Muscodor strobelii
  misc_feature: SGI cDNA ID NO. 564673
  misc_feature: Encodes the peptide sequence at SEQ ID NO 14196
atggcggttcacaaaatttctctcactccaagcccttccaaagcaagtccaaatgctaaaaatgtcctgatatttttcatatccggaaatcctggcctgatagactactatgggccgtttctctcaactcttcacgaagccctagattcctcgtcgtcaataaaagagacaagtttccacatctatggccaaaacctccttggctttagcgacgatgagcatgagccgtttacagcgaaaaacaagccttacaatctcgagcaacagatacaatacacacttgagtcactcagtaacctgcgaatctcgtcaggggcacgccaaggcgaagcctatgacgatgtgctgctcatgggtcattcggtaggctcctacatagctctcgagctctctcaccgcgtcctccgcgacgcaagcatagcaccacatcttaatctttcctcgggtatcctactctttccgactattgaaaacattgcctcttctccctcgggatggcgtctcaacatgctccggcaaactcccctcctcggtgataacgcgtaccgaatcgcacaaggctttctacgattatggccttacagcacgctcctcgcattcgtaggcagcgttctcggattcccgcctcacgcggcggaggtgacgacaaagtggctcaagagccgcgatggcgtttggcaggctcttcatcttggcatggatgagatgcaagtcattgggcccaataagtgggatgaggaattatgggctatcgagcgtgatgcaaaaatgcagtccaaaacacagatatcgaagttttacttcttctttgggaaaaacgatcactgggttgcaaaccatgttcgtgatgcgttcattgcgaagcgtgaaaagaatgtgaggattatgcttgacgagggagatttacctcatgctttctgcatagatcatagcaaagaagtcgcagacaaggttcatagatggatctgcccactgcaagtcaaggtctccgccgctttcgacatgcgaaggaggtttgcacatcgctctgctattaatttcgtcgatccaggacgtcttcaagatgttctgttgaatattagcgagtcaaaacgtgtcagattagtaccattcatcagagcaccaaatggttga

SEQ ID NO: 14196 - protein, 377 aa, Muscodor strobelii
  misc_feature: SGI Peptide ID NO. 564673
  misc_feature (21)..(322): NCBI GI: 261361628 Blast Desc: conserved [Verticillium albo-atrum VaMs.102]
  misc_feature (3)..(322): NCBI GI: 256728765 Blast Desc: NECHADRAFT_51077 [Nectria haematococca mpVI 77-13-4]
  misc_feature (10)..(322): NCBI GI: 171692539 Blast Desc: protein product [Podospora anserina] gi|170946218|emb|CAP73019.1| protein product [Podospora anserina]
  misc_feature (19)..(322): NCBI GI: 46110393 Blast Desc: FG02078.1 [Gibberella zeae PH-1]
  misc_feature (10)..(322): NCBI GI: 116198523 Blast Desc: CHGG_07417 [Chaetomium globosum CBS 148.51] gi|88178696|gb|EAQ86164.1| CHGG_07417 [Chaetomium globosum CBS 148.51]
  misc_feature (9)..(322): NCBI GI: 85089403 Blast Desc: NCU09838 [Neurospora crassa OR74A] gi|28919220|gb|EAA28700.1| [Neurospora crassa OR74A]
  misc_feature (9)..(322): NCBI GI: 39977729 Blast Desc: MGG_06749 [Magnaporthe grisea 70-15] gi|145013731|gb|EDJ98372.1| MGG_06749 [Magnaporthe grisea 70-15]
  misc_feature (3)..(318): NCBI GI: 146324105 Blast Desc: conserved [Aspergillus fumigatus Af293] gi|129558066|gb|EAL91814.2| conserved [Aspergillus fumigatus Af293]
  misc_feature (3)..(318): NCBI GI: 119479743 Blast Desc: NFIA_079440 [Neosartorya fischeri NRRL 181] gi|119408054|gb|EAW18003.1| conserved [Neosartorya fischeri NRRL 181]
  misc_feature (58)..(322): NCBI GI: 156051752 Blast Desc: SS1G_07283 [Sclerotinia sclerotiorum 1980] gi|154705061|gb|EDO04800.1| SS1G_07283 [Sclerotinia sclerotiorum 1980]
MAVHKISLTPSPSKASPNAKNVLIFFISGNPGLIDYYGPFLSTLHEALDSSSSIKETSFHIYGQNLLGFSDDEHEPFTAKNKPYNLEQQIQYTLESLSNLRISSGARQGEAYDDVLLMGHSVGSYIALELSHRVLRDASIAPHLNLSSGILLFPTIENIASSPSGWRLNMLRQTPLLGDNAYRIAQGFLRLWPYSTLLAFVGSVLGFPPHAAEVTTKWLKSRDGVWQALHLGMDEMQVIGPNKWDEELWAIERDAKMQSKTQISKFYFFFGKNDHWVANHVRDAFIAKREKNVRIMLDEGDLPHAFCIDHSKEVADKVHRWICPLQVKVSAAFDMRRRFAHRSAINFVDPGRLQDVLLNISESKRVRLVPFIRAPNG

SEQ ID NO: 14197 - DNA, 1248 bp, Muscodor strobelii
  misc_feature: SGI cDNA ID NO. 564674
  misc_feature: Encodes the peptide sequence at SEQ ID NO 14198
atgccctcatcagagcttcggcagcgcccgctgtcagagactaagattcctgcaccaagtttgaatgccgggaacaccaatcccgcattagatccgaaagtcggccatccatcgggtaaggccaagtacggccggtttagagcgcggcttcgggcactcacgttgagcctatacttcgggactggtattcttgttgtacatcttacacaatttctcggagcgccactctatcttcttaatcgggatttgtattatgcatacatgtcattgactaaggcgtcatttggcctgctgataacaaccatgacccagtggtgggctcctactacaatcaggatcagcggagatgcttctgttgctggacaactgagcctgacccctgacggcagagtgcaatgcaattttccggagcggatggtcatgatcgcgaatcaccagatttatactgactggttgtatctttggtgggttggatacacgagtattccacagatgcatgggcatatttacatcatcttgaaagaatccctgaaatggatcccgattcttggcccaggctgcatgtttctgggatttatttttatgtctcgtaaaatggctgtcgatcgaccacgacttgcacaccggcttggtaaactcaaggctgagcagaaagatccagaaggcaattctttctttaacccgatgtggcttttgctattccccgagggcacgaatctctcgggcaacggacgaaataaatctgctgcttgggcagctaaaagtggactgaaagacatggagcatctaatgctaccaaggagcacaggcatgtatttttgcctaactgagctcaagggaactgtggactatgtctatgattgtacagtagcctatgaaggcatccctcgcggtaaatacggcgaagactacttcaccatagcaagtacctacttccaaggtcgtcctccaaagtctgtcaacttttattggcgtcgctttgctgtcgccgacatccctcttggaacgccagaagagtttgacaagtggattctccaacgttggtatgagaaagacgcattgatggaggaatatgtctccaccggcagattccctgccaatggtgctggaatcaaaggacacattgaaactgaggtcaaaacgcaatactggtgggagtttattaagatctacgtaatgcttggcgcttttgggctgctcttcagatttctcctacaaggccttcgccgactcttattacggacttga

SEQ ID NO: 14198 - protein, 415 aa, Muscodor strobelii
  misc_feature: SGI Peptide ID NO. 564674
  misc_feature (126)..(279): Pfam Id: PF01553 Pfam Desc: Acyltransferase
  misc_feature (134)..(245): Pfam Id: PF01553 Pfam Desc: Acyltransferase
  misc_feature (36)..(412): NCBI GI: 171692517 Blast Desc: protein product [Podospora anserina] gi|170946207|emb|CAP73008.1| protein product [Podospora anserina]
  misc_feature (35)..(400): NCBI GI: 85089963 Blast Desc: NCU07741 [Neurospora crassa OR74A] gi|28919527|gb|EAA28956.1| NCU07741 [Neurospora crassa OR74A]
  misc_feature (70)..(412): NCBI GI: 116198439 Blast Desc: CHGG_07375 [Chaetomium globosum CBS 148.51] gi|88178654|gb|EAQ86122.1| CHGG_07375 [Chaetomium globosum CBS 148.51]
  misc_feature (12)..(402): NCBI GI: 46110379 Blast Desc: FG02071.1 [Gibberella zeae PH-1]
  misc_feature (1)..(406): NCBI GI: 154315248 Blast Desc: BC1G_04663 [Botryotinia fuckeliana B05.10] gi|150847626|gb|EDN22819.1| BC1G_04663 [Botryotinia fuckeliana B05.10]
  misc_feature (15)..(412): NCBI GI: 145615223 Blast Desc: MGG_05451 [Magnaporthe grisea 70-15] gi|145022104|gb|EDK06124.1| MGG_05451 [Magnaporthe grisea 70-15]
  misc_feature (1)..(400): NCBI GI: 156037864 Blast Desc: SS1G_12646 [Sclerotinia sclerotiorum 1980] gi|154698054|gb|EDN97792.1| SS1G_12646 [Sclerotinia sclerotiorum 1980]
  misc_feature (88)..(409): NCBI GI: 261360951 Blast Desc: lysocardiolipin acyltransferase [Verticillium albo-atrum VaMs.102]
  misc_feature (1)..(414): NCBI GI: 169626327 Blast Desc: SNOG_16448 [Phaeosphaeria nodorum SN15] gi|111055026|gb|EAT76146.1| SNOG_16448 [Phaeosphaeria nodorum SN15]
  misc_feature (7)..(404): NCBI GI: 258571674 Blast Desc: conserved [Uncinocarpus reesii 1704] gi|237904910|gb|EEP79311.1| conserved [Uncinocarpus reesii 1704]
  misc_feature (137)..(365): SWISSPROT Homolog: EC 2.3.1.51 1-acylglycerol-3-phosphate O-acyltransferase
MPSSELRQRPLSETKIPAPSLNAGNTNPALDPKVGHPSGKAKYGRFRARLRALTLSLYFGTGILVVHLTQFLGAPLYLLNRDLYYAYMSLTKASFGLLITTMTQWWAPTTIRISGDASVAGQLSLTPDGRVQCNFPERMVMIANHQIYTDWLYLWWVGYTSIPQMHGHIYIILKESLKWIPILGPGCMFLGFIFMSRKMAVDRPRLAHRLGKLKAEQKDPEGNSFFNPMWLLLFPEGTNLSGNGRNKSAAWAAKSGLKDMEHLMLPRSTGMYFCLTELKGTVDYVYDCTVAYEGIPRGKYGEDYFTIASTYFQGRPPKSVNFYWRRFAVADIPLGTPEEFDKWILQRWYEKDALMEEYVSTGRFPANGAGIKGHIETEVKTQYWWEFIKIYVMLGAFGLLFRFLLQGLRRLLLRT

SEQ ID NO: 14199 - DNA, 2315 bp, Muscodor strobelii
  misc_feature: SGI EST ID NO. CUFF.34097.0
  misc_feature: Variant of the nucleotide sequence at SEQ ID NO 14197
cgccgtcatccgtcatttctcgctgcctacctcttcgttgctatcgtctacgcgaaacacttcttcactgctttccacattccttctcactttatcacatgttattttcattcctggtagcagcagcgattaccacaacctgctattaaccatcactcatgctgtcgtcaatatcgtaaactcaggtgctcgctcgccacgtgccccgcgttaaaaagttgtgaagctcttcccaaccatcgccagctacctcgacctaatagttcgctcatataccaacgactaagaacctattctaacccgagtattggtctatgtggcttgcgcaaattctgtcaaagttggtacctcgagggatgagccaacttggcgcatagctgttccactcttgctatatcctcgattccgtcaattgctgcaacggccgattctcatcaaagatcaaacgacgtgtgactatctatgcttcatgtcttaatgtcctagtagtcgacccgccctaagtgtgctgctgcgtctactagtcgacgatatgccctcatcagagcttcggcagcgcccgctgtcagagactaagattcctgcaccaagtttgaatgccgggaacaccaatcccgcattagatccgaaagtcggccatccatcgggtaaggccaagtacggccggtttagagcgcggcttcgggcactcacgttgagcctatacttcgggactggtattcttgttgtacatcttacacaatttctcggagcgccactctatcttcttaatcgggatttgtattatgcatacatgtcattgactaaggcgtcatttggcctgctgataacaaccatgacccagtggtgggctcctactacaatcaggatcagcggagatgcttctgttgctggacaactgagcctgacccctgacggcagagtgcaatgcaattttccggagcggatggtcatgatcgcgaatcaccagatttatactgactggttgtatctttggtgggttggatacacgagtattccacagatgcatgggcatatttacatcatcttgaaagaatccctgaaatggatcccgattcttggcccaggctgcatgtttctgggatttatttttatgtctcgtaaaatggctgtcgatcgaccacgacttgcacaccggcttggtaaactcaaggctgagcagaaagatccagaaggcaattctttctttaacccgatgtggcttttgctattccccgagggcacgaatctctcgggcaacggacgaaataaatctgctgcttgggcagctaaaagtggactgaaagacatggagcatctaatgctaccaaggagcacaggcatgtatttttgcctaactgagctcaagggaactgtggactatgtctatgattgtacagtagcctatgaaggcatccctcgcggtaaatacggcgaagactacttcaccatagcaagtacctacttccaaggtcgtcctccaaagtctgtcaacttttattggcgtcgctttgctgtcgccgacatccctcttggaacgccagaagagtttgacaagtggattctccaacgttggtatgagaaagacgcattgatggaggaatatgtctccaccggcagattccctgccaatggtgctggaatcaaaggacacattgaaactgaggtcaaaacgcaatactggtgggagtttattaagatctacgtaatgcttggcgcttttgggctgctcttcagatttctcctacaaggccttcgccgactcttattacggacttgataccttacttggaattgccatggttctcgcgcgcatagtgtgaacgaagcatatcacgggtggcgtttaggtgaagatcggcgtacagacagttttggagagcaattacgtgataccaaggaggtgatgcattccgggacgactttatacatgggactaacaaatccgtcttgcacgcgtattgcatatatatcgacgtcgtttaactactcgagcttgtactcaagcccaatggagggctcgtgttacagccgggtagcgatcagatttactagttctagacagacaggctttactggcatgatcggcgcgtgttggacttgcgacctgacggcatggttcgatagtaggatattggcgtataccacctttagcatagattgattatgatatccctactctaacttttatcagtccgactactcgtttcccattttatcgccctatttacttgatgctttgctgagacatgagcgaattactttgaccataacgctcttattagagattttctagagtgtaaagctaacaatgc

SEQ ID NO: 14200 - DNA, 1110 bp, Muscodor strobelii
  misc_feature: SGI cDNA ID NO. 564675
  misc_feature: Reduced expression when VOC is produced
  misc_feature: Encodes the peptide sequence at SEQ ID NO 14201
atggcaccgtccgacaagaaagtcttcaacgtcggcgtgataggctacggcctctcagccaaggtcttccacattcctttcatcactataacaccaacttttaagcttcactcaatcttgcagcgcaagcccactgctggagattcagcacctgaagattacccttctatccagcacttcacagactttgagacattccttggcgactcatcgctagatgtcgttgttctatctacgccccctcaaacccacttttcatttgcgaaggcagcgctctcagccggaaagcatgtcttcgtcgagaagccgttcgtcccaacttctgctgaggccggcgatctgatcgctctcgcggaggagaaaggacgccagatctgcgtataccagaacagacgctgggatagcgatttcctgacgttgcgcaaattaattgccgacgataagctaggaagaattttggagttcgagacgcatttcgatcggtatcgcgctgataagccgacgaattggaaaggcgagctgagtatgaaggacggtggatctgccctctacgacctcggaacgcatctgacggaccaggtatacaccttattcggtatgccgaagggtgtcttcgcgaagcttgtcagtcagcgtgacggcaaggttatgggtcccgatgagccggatttggagcccgacagcgtaaatatgcagctgttctacgacgatggtttgatcgtgcatgtgcgcattgctgtcatgagtgctgagacgaagcaaacaagattctgggtccgtggcacgaagggaagctatcacaaatccggccttgatacccaagaagatcaattgaaggctggcatgaagacaagcgatccgcaatttggactggatgcaccggaaggacatggaacactgatctcactgggctcggacgggaagttcagcgagacttcttgccccaatcttaagcctgtcacgtataagaagatctacgaactgtttggcgaggctctgaacggaaatggtcctgtgcctgttcctgcatcggaggcccgagatgttctgcgcattctggaggctgctagagaaagtgcccttacccggcgcgaagtagctttgtcttga

SEQ ID NO: 14201 - protein, 369 aa, Muscodor strobelii
  misc_feature: SGI Peptide ID NO. 564675
  misc_feature (141)..(260): Pfam Id: PF02894 Pfam Desc: Oxidoreductase family, C-terminal alpha/beta domain
  misc_feature (9)..(129): Pfam Id: PF01408 Pfam Desc: Oxidoreductase family, NAD-binding Rossmann fold
  misc_feature (141)..(213): Pfam Id: PF02894 Pfam Desc: Oxidoreductase family, C-terminal alpha/beta domain
  misc_feature (4)..(366): NCBI GI: 39940868 Blast Desc: MGG_05346 [Magnaporthe grisea 70-15] gi|145021974|gb|EDK05994.1| MGG_05346 [Magnaporthe grisea 70-15]
  misc_feature (6)..(366): NCBI GI: 171692545 Blast Desc: protein product [Podospora anserina] gi|170946221|emb|CAP73022.1| protein product [Podospora anserina]
  misc_feature (1)..(367): NCBI GI: 85098450 Blast Desc: NCU08882 [Neurospora crassa OR74A] gi|28922120|gb|EAA31377.1| conserved [Neurospora crassa OR74A] gi|38566775|emb|CAE76086.1| related to oxidoreductase [Neurospora
  misc_feature (6)..(366): NCBI GI: 261360950 Blast Desc: oxidoreductase [Verticillium albo-atrum VaMs.102]
  misc_feature (7)..(369): NCBI GI: 256728764 Blast Desc: NECHADRAFT_72556 [Nectria haematococca mpVI 77-13-4]
  misc_feature (7)..(369): NCBI GI: 46110387 Blast Desc: FG02075.1 [Gibberella zeae PH-1]
  misc_feature (4)..(368): NCBI GI: 154292557 Blast Desc: BC1G_14802 [Botryotinia fuckeliana B05.10] gi|150845883|gb|EDN21076.1| BC1G_14802 [Botryotinia fuckeliana B05.10]
  misc_feature (1)..(360): NCBI GI: 256723351 Blast Desc: NECHADRAFT_97231 [Nectria haematococca mpVI 77-13-4]
  misc_feature (18)..(368): NCBI GI: 156051836 Blast Desc: SS1G_07325 [Sclerotinia sclerotiorum 1980] gi|154705103|gb|EDO04842.1| SS1G_07325 [Sclerotinia sclerotiorum 1980]
  misc_feature (4)..(367): NCBI GI: 116198489 Blast Desc: CHGG_07400 [Chaetomium globosum CBS 148.51] gi|88178679|gb|EAQ86147.1| CHGG_07400 [Chaetomium globosum CBS 148.51]
  misc_feature (3)..(366): SWISSPROT Homolog: EC 1.1.99.28 Glucose-fructose oxidoreductase
  misc_feature: Useful for introducing or modulating the production of volatile compounds
MAPSDKKVFNVGVIGYGLSAKVFHIPFITITPTFKLHSILQRKPTAGDSAPEDYPSIQHFTDFETFLGDSSLDVVVLSTPPQTHFSFAKAALSAGKHVFVEKPFVPTSAEAGDLIALAEEKGRQICVYQNRRWDSDFLTLRKLIADDKLGRILEFETHFDRYRADKPTNWKGELSMKDGGSALYDLGTHLTDQVYTLFGMPKGVFAKLVSQRDGKVMGPDEPDLEPDSVNMQLFYDDGLIVHVRIAVMSAETKQTRFWVRGTKGSYHKSGLDTQEDQLKAGMKTSDPQFGLDAPEGHGTLISLGSDGKFSETSCPNLKPVTYKKIYELFGEALNGNGPVPVPASEARDVLRILEAARESALTRREVALS

SEQ ID NO: 14202 - DNA, 2541 bp, Muscodor strobelii
  misc_feature: SGI EST ID NO. CUFF.34555.1
  misc_feature: Variant of the nucleotide sequence at SEQ ID NO 14200
gacttcacgccggagagaaagccgtgagctattataacctataaaactacttcatgatccacgaaagacggaccaagttgaacaaatacgacaagccctcataccttctcgtttctctcaatactgaaggcagattccggcgaaagcattgagattgtgtcatccacagcgaattaactatcttcattcccttcccctcactaccgaaagaaaaaaaattcagccgcattttcaacgtcaccccacgtagacattaaaatggcaccgtccgacaagaaagtcttcaacgtcggcgtgataggctacggcctctcagccaaggtcttccacattcctttcatcactataacaccaacttttaagcttcactcaatcttgcagcgcaagcccactgctggagattcagcacctgaagattacccttctatccagcacttcacagactttgagacattccttggcgactcatcgctagatgtcgttgttctatctacgccccctcaaacccacttttcatttgcgaaggcagcgctctcagccggaaagcatgtcttcgtcgagaagccgttcgtcccaacttctgctgaggccggcgatctgatcgctctcgcggaggagaaaggacgccagatctgcgtataccagaacagacgctgggatagcgatttcctgacgttgcgcaaattaattgccgacgataagctaggaagaattttggagttcgagacgcatttcgatcggtatcgcgctgataagccgacgaattggaaaggcgagctgagtatgaaggacggtggatctgccctctacgacctcggaacgcatctgacggaccaggtatacaccttattcggtatgccgaagggtgtcttcgcgaagcttgtcagtcagcgtgacggcaaggttatgggtcccgatgagccggatttggagcccgacagcgtaaatatgcagctgttctacgacgatggtttgatcgtgcatgtgcgcattgctgtcatgagtgctgagacgaagcaaacaagattctgggtccgtggcacgaagggaagctatcacaaatccggccttgatacccaagaagatcaattgaaggctggcatgaagacaagcgatccgcaatttggactggatgcaccggaaggacatggaacactgatctcactgggctcggacgggaagttcagcgagacttcttgccccaatcttaagcctgtcacgtataagaagatctacgaactgtttggcgaggctctgaacggaaatggtcctgtgcctgttcctgcatcggaggcccgagatgttctgcgcattctggaggctgctagagaaagtgcccttacccggcgcgaagtagctttgtcttgatttgttcttgaaaaatcttcaagggttgaggacacaataacttataccacataattcagttggacggtctaaacgacaacattatatctcggtgatctagtgttctcaattattacgtattggatatgctatgtttattcgacactctgtttcacgccctcagcggacactttaagacgatgactaagatccaactaaagtaggagaactggactcacgaaattgagcattgcctcgcaatccagcatcattatttgcaagcgaagaaccatcgagttccctcgaaagatcaatggtcgagctatcgcgtaagtcttgcgggtggttctggttctcatgaagctctgatcgaccctgatcttcgttaagctccgatctccaggcatttccacggaagctcttgtgtgcgttatcacccggttccatctctaacacagctggtggaacacgtttcctccatttcataatccacgacatccttctgattttattcgattttcctggtgaatctgagggtgcatgggcttggtgatgatcttctgtgtttgaagttttccagcgccggacaagaacaaggtagcccaagattgcaattatggtggctacggccacaatgccgatgcttataccagcaattgtcccggcagaaaggtacgtcgtagagccgttctcactcattgctgtctctgtgggctgttgatcggcgatcgaccccattgccgctctcagagaagcagtgacagatgctgggtatagtgtcaagtcggactcatgccattccacgctgaatgggcgccctaaagctacggccttggagctgaggactgtgcttgttggcactatggtactcgggttgacccagactgtgacaggaggttggaaattcgacacacagaacgtggaagtggatattaaaggggaaccatcgctagtatctactgattcgctggtccacagtgtaaatgatcttcgtcgaataccacattagactcgttcttcatgtcagatatcaggaggaaagctggacttacgaactacagcagaatccgtcataaaaggtgttattgctcccatttacccatgcggtgactgtttgaaactcttgtcctttcgggcatgccccaggactgaaggcccagaacgaagtaccgtacggctgacacgcatcccaat

SEQ ID NO: 14203 - DNA, 1407 bp, Muscodor strobelii
  misc_feature: SGI cDNA ID NO. 564676
  misc_feature: Reduced expression when VOC is produced
  misc_feature: Encodes the peptide sequence at SEQ ID NO 14204
atgtcgcgcccgttaaatccccagcgcttcgcccgatatagccactgcattccttctccactatccttccttcaaaggcgaagtttctcggccactccatatcgtcgggagatactcgatctatctgctctacccgaacggattctgcccagatacagagacagcccaacatcgtctctattgtcattgcaatggccggagccacctcgaaatgtcctcatcatacccaaactacatgcacccaaggtcaccttgtctgctgtcgaatttgccaaacacctccatagtgagtatgccgacgtgaacctcatattcgaacgtcgcatagcctcggagatacacgaatcgctgccgttcccggtctacactgccgatccagcagtcttgccggacaagatcgatctcgttgcaacgttgggtggcgatggcactatattgcgtgctgccagcttgtttagttcccgttcatctgtccctccgattctgtcctttagtatgggatctctaggatttctgggtgaatggaaatttgaagagtacaaacgtgcctggcgacaggtatatatgagtggttctcgtgttgcagtaaccgatctacaggagccgcacacccaggctgttgtcaacggctcgccagaagaagaggacttgccgcttcacaatgcatgggatcatgtccgtgggaagagtatggggctcacgcggtccagcaagatactattacgtcatcgactcaaggtgggcatttacgatgctgccggtgtcaatatcaatggaagactgatgccaacttcaaccgccgaaccacaaatgcgccttccttcgggacagccagaaccgaagcgggcatcgaggctgggtgagccgatcaaaccggcatttcatgccatcaatgagctcgtcattcaccgtggtcccaatccacatctcgccatcattgatgtttatgtgaacaaccgctttctgaccgaggccgtggccgatggaatgctagttagcaccccgacaggttctacggcgtattcgctgtctgctggcggaagcataatgcacccgcttgtcaagacgctcctgatcacgccgatctgtgctcgcagcctgagcttccggcctctcggccttcctctaaactccaagatagtcttgaagttgagcgagaaaaaccgtggccgggagctcgaggtcagtatcgacggcaaacgaaaagctggtgtgagcatcggaatggaaatccgagtcgaaggcgaaacagtcgggcgaacgcccgatggcaactggtctggcggtgtaccgtgcgtcattcggtctcctacgaatggaggccgcgagggcagcgaggacgacgatggttgggtaggcggtctaaacgggcttttgaagttcaattacccgtttggtgatgcctga

SEQ ID NO: 14204 - protein, 468 aa, Muscodor strobelii
  misc_feature: SGI Peptide ID NO. 564676
  misc_feature (71)..(424): Pfam Id: PF01513 Pfam Desc: ATP-NAD kinase
  misc_feature (295)..(402): Pfam Id: PF01513 Pfam Desc: ATP-NAD kinase
  misc_feature (121)..(188): Pfam Id: PF01513 Pfam Desc: ATP-NAD kinase
  misc_feature (27)..(468): NCBI GI: 39941076 Blast Desc: MGG_05450 [Magnaporthe grisea 70-15] gi|145022103|gb|EDK06123.1| MGG_05450 [Magnaporthe grisea 70-15]
  misc_feature (27)..(466): NCBI GI: 85089965 Blast Desc: NCU07742 [Neurospora crassa OR74A] gi|28919528|gb|EAA28957.1| NCU07742 [Neurospora crassa OR74A]
  misc_feature (27)..(467): NCBI GI: 116198437 Blast Desc: CHGG_07374 [Chaetomium globosum CBS 148.51] gi|88178653|gb|EAQ86121.1| CHGG_07374 [Chaetomium globosum CBS 148.51]
  misc_feature (2)..(466): NCBI GI: 261360967 Blast Desc: NADH kinase POS5 [Verticillium albo-atrum VaMs.102]
  misc_feature (70)..(466): NCBI GI: 171692519 Blast Desc: protein product [Podospora anserina] gi|170946208|emb|CAP73009.1| protein product [Podospora anserina]
  misc_feature (25)..(467): NCBI GI: 156037866 Blast Desc: SS1G_12647 [Sclerotinia sclerotiorum 1980] gi|154698055|gb|EDN97793.1| SS1G_12647 [Sclerotinia sclerotiorum 1980]
  misc_feature (18)..(466): NCBI GI: 242794831 Blast Desc: mitochondrial NADH kinase POS5, [Talaromyces stipitatus ATCC 10500] gi|218719044|gb|EED18464.1| mitochondrial NADH kinase POS5, [Talaromyces stipitatus ATCC 10500]
  misc_feature (24)..(466): NCBI GI: 240109259 Blast Desc: ATP-NAD kinase family protein [Coccidioides posadasii C735 delta SOWgp]
  misc_feature (47)..(466): NCBI GI: 256728594 Blast Desc: [Nectria haematococca mpVI 77-13-4]
  misc_feature (18)..(467): NCBI GI: 119498579 Blast Desc: poly(p)/ATP NAD kinase [Neosartorya fischeri NRRL 181] gi|119414211|gb|EAW24150.1| poly(p)/ATP NAD kinase [Neosartorya fischeri NRRL 181]
  misc_feature (56)..(413): SWISSPROT Homolog: EC 2.7.1.23 NAD(+) kinase
  misc_feature: Useful for introducing or modulating the production of volatile compounds
MSRPLNPQRFARYSHCIPSPLSFLQRRSFSATPYRREILDLSALPERILPRYRDSPTSSLLSLQWPEPPRNVLIIPKLHAPKVTLSAVEFAKHLHSEYADVNLIFERRIASEIHESLPFPVYTADPAVLPDKIDLVATLGGDGTILRAASLFSSRSSVPPILSFSMGSLGFLGEWKFEEYKRAWRQVYMSGSRVAVTDLQEPHTQAVVNGSPEEEDLPLHNAWDHVRGKSMGLTRSSKILLRHRLKVGIYDAAGVNINGRLMPTSTAEPQMRLPSGQPEPKRASRLGEPIKPAFHAINELVIHRGPNPHLAIIDVYVNNRFLTEAVADGMLVSTPTGSTAYSLSAGGSIMHPLVKTLLITPICARSLSFRPLGLPLNSKIVLKLSEKNRGRELEVSIDGKRKAGVSIGMEIRVEGETVGRTPDGNWSGGVPCVIRSPTNGGREGSEDDDGWVGGLNGLLKFNYPFGDA

SEQ ID NO: 14205 - DNA, 1922 bp, Muscodor strobelii
  misc_feature: SGI EST ID NO. CUFF.33822.0
  misc_feature: Variant of the nucleotide sequence at SEQ ID NO 14203
gtgcaaatggaacaccacccgaatcacctacgtagtagtatggataattcctaatacaacgctggcagtactggagacgctctcggtgaagactcgagctatgttattgacagacgagtgactcgctcctcatgtctatccgcagatccgatggtgataacgtcctagactcccacgctacttcaacccgtaacgatttattagctcaagacgatgcgacggcgtcttgtttcctgcaccgcgacaagcccctcccatcaacattatatcgagccttgccggcgcctcgacacgtgaaacatgtcgcgcccgttaaatccccagcgcttcgcccgatatagccactgcattccttctccactatccttccttcaaaggcgaagtttctcggccactccatatcgtcgggagatactcgatctatctgctctacccgaacggattctgcccagatacagagacagcccaacatcgtctctattgtcattgcaatggccggagccacctcgaaatgtcctcatcatacccaaactacatgcacccaaggtcaccttgtctgctgtcgaatttgccaaacacctccatagtgagtatgccgacgtgaacctcatattcgaacgtcgcatagcctcggagatacacgaatcgctgccgttcccggtctacactgccgatccagcagtcttgccggacaagatcgatctcgttgcaacgttgggtggcgatggcactatattgcgtgctgccagcttgtttagttcccgttcatctgtccctccgattctgtcctttagtatgggatctctaggatttctgggtgaatggaaatttgaagagtacaaacgtgcctggcgacaggtatatatgagtggttctcgtgttgcagtaaccgatctacaggagccgcacacccaggctgttgtcaacggctcgccagaagaagaggacttgccgcttcacaatgcatgggatcatgtccgtgggaagagtatggggctcacgcggtccagcaagatactattacgtcatcgactcaaggtgggcatttacgatgctgccggtgtcaatatcaatggaagactgatgccaacttcaaccgccgaaccacaaatgcgccttccttcgggacagccagaaccgaagcgggcatcgaggctgggtgagccgatcaaaccggcatttcatgccatcaatgagctcgtcattcaccgtggtcccaatccacatctcgccatcattgatgtttatgtgaacaaccgctttctgaccgaggccgtggccgatggaatgctagttagcaccccgacaggttctacggcgtattcgctgtctgctggcggaagcataatgcacccgcttgtcaagacgctcctgatcacgccgatctgtgctcgcagcctgagcttccggcctctcggccttcctctaaactccaagatagtcttgaagttgagcgagaaaaaccgtggccgggagctcgaggtcagtatcgacggcaaacgaaaagctggtgtgagcatcggaatggaaatccgagtcgaaggcgaaacagtcgggcgaacgcccgatggcaactggtctggcggtgtaccgtgcgtcattcggtctcctacgaatggaggccgcgagggcagcgaggacgacgatggttgggtaggcggtctaaacgggcttttgaagttcaattacccgtttggtgatgcctgaacggaatcgtaaggcctcatcgggagcgacgatctccatttgtaaatacatgacgacactcttgcattcttgcattttgggtaacattatgcatggcgatcattctgtgttgcatcaatggcgttggagttaagtcgatctagcttagtactcttgataccctcaatcattttattgcccaaagtctgaacaggttcgggaatgaaacattctag

SEQ ID NO: 14206 - DNA, 1332 bp, Muscodor strobelii
  misc_feature: SGI cDNA ID NO. 564677
  misc_feature: Reduced expression when VOC is produced
  misc_feature: Encodes the peptide sequence at SEQ ID NO 14207
atgattccaaatttccacgtctgcatcgtcggaggcggaatagtaggcctagttgggagtctactactctgccagctcgggtgcaaagtcacgatacttgagcgagacgtaacactcgaaacgaccggtgcgggcatccaactacaccccaacgccacacgcatactccaagaaataggagtcttagacaagatcaaagccagatcagtcattcctccattcttgatattgaaggcgtataagacaggacaggtgttgcatagacagaatctcctcgaggacactaggaaatatggagcgccgttacttactgttcatcgagcacatttacgtcagatactatatgatgaggctctgaagaggggtgttgagatcagacatggtgtctatgttgatgctgatggggtgaatttgagagatggatacttaagtgtgtcgtctcggtctcaagccaaagacgaaccctctaatacagagatattccgcgcggacctcttcatcggcgcagacggtggcaattcagttgtcagagaagcccttacaggacaaaaacccgtcgcagtgccacacggcaaggtcgtacatcgaatgctcatctcagaaaagaaaattagtgaacacccgcggctgaagtggcttgcggaacaacggaatatcacgctatggctagggccgaattcccaagctgtaacctacgcattaaatgggttcttcaatattgcgtttacatggcccgacacgccggatcctaagaaattattcttcggtgcgcaggaatttgacgttgaggaattccgatcgcggctcggggactgggaactagatctgagggagctgattggccttgtcgacagcggctcgcggttcatgctccttgcgccggaaatcgacgatactgcgccgtggattgataataaggggaagttttgtattgttggggatgcggcgcataggactttaccgtacttagctcaaggcgctgcatccggtatcgagtcagttgcggttcttgcacatctaatagcgaaagcgaagagtagaggccagattcctgcctgcctcagcatgtaccagcgtcttcgcaaggaacgaacaacacatatgatcaaggcggctttgaagatcggtcgagttcacgagatggatgatggaccgctcaaggacgagcgagatagggagcttctgaacgagacgccgagttttggatgtcctaatcctttcgcagaccccttcttgcaggaatggttgtggggctttgaggcaaggagaactgttgatgaggcctgggcgatgctacagaatgggaagagacatgctggttacaagttatag

SEQ ID NO: 14207 - protein, 443 aa, Muscodor strobelii
  misc_feature: SGI Peptide ID NO. 564677
  misc_feature (4)..(372): Pfam Id: PF01494 Pfam Desc: FAD binding domain
  misc_feature (6)..(44): Pfam Id: PF01266 Pfam Desc: FAD dependent oxidoreductase
  misc_feature (4)..(74): Pfam Id: PF01494 Pfam Desc: FAD binding domain
  misc_feature (6)..(35): Pfam Id: PF00070 Pfam Desc: Pyridine nucleotide-disulphide oxidoreductase
  misc_feature (5)..(436): NCBI GI: 258568520 Blast Desc: conserved [Uncinocarpus reesii 1704] gi|237906450|gb|EEP80851.1| conserved [Uncinocarpus reesii 1704]
  misc_feature (3)..(436): NCBI GI: 240110032 Blast Desc: FAD binding domain containing protein [Coccidioides posadasii C735 delta SOWgp]
  misc_feature (3)..(436): NCBI GI: 119184946 Blast Desc: CIMG_07216 [Coccidioides immitis RS]
  misc_feature (9)..(436): NCBI GI: 149245524 Blast Desc: conserved [Lodderomyces elongisporus NRRL YB-4239] gi|146449633|gb|EDK43889.1| conserved [Lodderomyces elongisporus NRRL YB-4239]
  misc_feature (3)..(436): NCBI GI: 238838861 Blast Desc: salicylate hydroxylase [Microsporum canis CBS 113480]
  misc_feature (4)..(436): NCBI GI: 150866748 Blast Desc: Salicylate hydroxylase (Salicylate 1-monooxygenase) [Pichia stipitis CBS 6054] gi|149388004|gb|ABN68416.2| Salicylate hydroxylase (Salicylate 1-monooxygenase) [Pichia stipitis CBS
  misc_feature (9)..(436): NCBI GI: 202953394 Blast Desc: DEHA2F17820p [Debaryomyces hansenii]
  misc_feature (9)..(436): NCBI GI: 50425087 Blast Desc: DEHA0F19239g [Debaryomyces hansenii CBS767]
  misc_feature (4)..(434): NCBI GI: 115400601 Blast Desc: conserved [Aspergillus terreus NIH2624] gi|114191555|gb|EAU33255.1| conserved [Aspergillus terreus NIH2624]
  misc_feature (4)..(428): NCBI GI: 261353542 Blast Desc: FAD binding domain-containing protein [Verticillium albo-atrum VaMs.102]
  misc_feature (27)..(419): SWISSPROT Homolog: EC 1.14.13.24 3-hydroxybenzoate 6-monooxygenase
  misc_feature: Useful for introducing or modulating the production of volatile compounds
MIPNFHVCIVGGGIVGLVGSLLLCQLGCKVTILERDVTLETTGAGIQLHPNATRILQEIGVLDKIKARSVIPPFLILKAYKTGQVLHRQNLLEDTRKYGAPLLTVHRAHLRQILYDEALKRGVEIRHGVYVDADGVNLRDGYLSVSSRSQAKDEPSNTEIFRADLFIGADGGNSVVREALTGQKPVAVPHGKVVHRMLISEKKISEHPRLKWLAEQRNITLWLGPNSQAVTYALNGFFNIAFTWPDTPDPKKLFFGAQEFDVEEFRSRLGDWELDLRELIGLVDSGSRFMLLAPEIDDTAPWIDNKGKFCIVGDAAHRTLPYLAQGAASGIESVAVLAHLIAKAKSRGQIPACLSMYQRLRKERTTHMIKAALKIGRVHEMDDGPLKDERDRELLNETPSFGCPNPFADPFLQEWLWGFEARRTVDEAWAMLQNGKRHAGYKL

SEQ ID NO: 14208 - DNA, 1885 bp, Muscodor strobelii
  misc_feature: SGI EST ID NO. CUFF.33825.0
  misc_feature: Variant of the nucleotide sequence at SEQ ID NO 14206
gacgaaggcaagcgcgtgtattggtcgagtacttccttaagcgcctcgaagctgcatgaaatatatattagccatgactagctggagtcaaaagtcagcaatgctatcacataccttattcccgatatcggtcccggcatcagtatagtataggagtctctacggtcgttcacagtctcttcaaacgattatcaaagatgattccaaatttccacgtctgcatcgtcggaggcggaatagtaggcctagttgggagtctactactctgccagctcgggtgcaaagtcacgatacttgagcgagacgtaacactcgaaacgaccggtgcgggcatccaactacaccccaacgccacacgcatactccaagaaataggagtcttagacaagatcaaagccagatcagtcattcctccattcttgatattgaaggcgtataagacaggacaggtgttgcatagacagaatctcctcgaggacactaggaaatatggagcgccgttacttactgttcatcgagcacatttacgtcagatactatatgatgaggctctgaagaggggtgttgagatcagacatggtgtctatgttgatgctgatggggtgaatttgagagatggatacttaagtgtgtcgtctcggtctcaagccaaagacgaaccctctaatacagagatattccgcgcggacctcttcatcggcgcagacggtggcaattcagttgtcagagaagcccttacaggacaaaaacccgtcgcagtgccacacggcaaggtcgtacatcgaatgctcatctcagaaaagaaaattagtgaacacccgcggctgaagtggcttgcggaacaacggaatatcacgctatggctagggccgaattcccaagctgtaacctacgcattaaatgggttcttcaatattgcgtttacatggcccgacacgccggatcctaagaaattattcttcggtgcgcaggaatttgacgttgaggaattccgatcgcggctcggggactgggaactagatctgagggagctgattggccttgtcgacagcggctcgcggttcatgctccttgcgccggaaatcgacgatactgcgccgtggattgataataaggggaagttttgtattgttggggatgcggcgcataggactttaccgtacttagctcaaggcgctgcatccggtatcgagtcagttgcggttcttgcacatctaatagcgaaagcgaagagtagaggccagattcctgcctgcctcagcatgtaccagcgtcttcgcaaggaacgaacaacacatatgatcaaggcggctttgaagatcggtcgagttcacgagatggatgatggaccgctcaaggacgagcgagatagggagcttctgaacgagacgccgagttttggatgtcctaatcctttcgcagaccccttcttgcaggaatggttgtggggctttgaggcaaggagaactgttgatgaggcctgggcgatgctacagaatgggaagagacatgctggttacaagttatagtatttgtcgtcagcgacctatggcacaatagatattaagtacgatgattcagaattagacgattgtagtccatataggcaaggggtgaagaagggtgcgtactgtaagttgccagaaagcagtagaacgaacatgagcaaacattacgttcgaaatatcaagagctaggtactccatatctggtacgctcacttgcttgaagacccttgacatacaggagatcgtaattagctatttggggtggctttttggcaatttcagaagaaaattattaattactctgcgaaaggatcaatggctattcgaaaacggtcctttacttcgcgcaactataaatacgatcatatacaatctag

SEQ ID NO: 14209 - DNA, 2466 bp, Muscodor strobelii
  misc_feature: SGI cDNA ID NO. 564678
  misc_feature: Encodes the peptide sequence at SEQ ID NO 14210
atgaatgatagtgatccaatggatttaatgcttgataccggcgctggcacggaagtcactgccagctcagaccggattatcatcggcacggagactatcctctatccatccgcagatatatcgacgagagtgactcgtggacttattaccgtcaccatcgcgcccgccacctatcctcctccatctttaggaacgagtccagctgaaacccagtcagcaagtctagaaatcctcaaaaactatggcgatgtgggagggagcctgtcagccgcctattggctcttctctaataatttgttaggtttattcatgtcatctgaggagccactgagcgaaagcattccaggcctagtaggcccacaaggtcttttggcggctcttttcgaatcggcagagcagatgaccaaaatctttgagagtccggctgtttctgcgttcaggggctgggcttcgtgggttactggtgcccacgctgcaagcggcgaggacatacccttgatagacttcattactgatatagttggtccaacccctactaacaagaacatcgtcaagaatattggtcggactattcccgatgcgttatccaagatttacaatctctgcaaattcttatcaaaaaaagcctggcgaagcaagggccgattgttagccgttatggagaggaacaggcttgcaatccttggagcggggactgcagtgactcctggaatcgctgtcatagcaggagtatcaattcggtatctttacacagctagctgggaaaaggttacagaccccgataccgaagacaaggtccggcgcaaatggtatgtgaaaaccaaggaaggcaccccatggtggcagttcaaagcgctgatagctttcatcgacggcggcgtgagctaccaggttggaggtggcctaaaaaccccgaatacaggccctgggtacttcactgaacttgacttagtggaaggcaggaccaagatgcaactcattaaaaacacgcgactttgtgtcgattgggtatatatgtaccctaatctagaagagtggcaaaaattatcgccacatgtcgaaacgcggtggtcggcaacgatcaatgacccctcagatatctcatacaatcacaagcgcttgatatcgatgatatcaagcgatcagcgtcccttgcggcagcagcctttccacagacacgacgactctagcggggaaggaattactatatttgtcatggactctggattcgacttgtctggttccatgccggacgaatatcgagttcggggcagggcattatctgatttcgcctacctaccgcctctcaaattgaggttgcctgatatcccacagaatctctggaagctaccggatacgatggacgatgatatttgggtaccgccacagggtgacgaatcgggttactatgatacacacggaacagaaaatgcagcacttgcgggaggcagtacctatagtgtcgctggtaaatcggatctttatttgttgaagctcatggcgctgtaccaagacccagacaaaccaccaggaagttggattaccatgtccggccaaccaggcgctattgacgatgcaatgcacagaatcattgagcatatcaattcacaaatcttattcggtagggcagtcgtgagctattctgcttcgacgaggtggcaagatcccgctactgtttcgttcggcaatgatgaactacgcgacttacatcaagcaaactacgatatctgggagcgctttgcacgtaaattggtgtcttatgggatcttacttgtgacatctgctggcaactcaggactagacccaggcgcagtgccactaggaggctgggtaccacaactactgggaacagacacaaacaacatagtcacggtaggtgctgtgacagagaccggcgtccttgccggattctctactcctgctggaagtctgacgggggtaaacctcgggtcgattactctttatgcccaaggaaccaacgtttttgcccccactcgtgggggtgacccagtgatagtcagtggtacgagtcgagcatgtcctcaggtggcagggctcgtggcatatgctctcgctttgccagagaacagagattcgatgagatggcggggaaacggtcgtgaactcactcaaattgtcaagcgatggctggttcaaacttcatatcgacgcgttttgcttgcggatcagctcccaagatatccgctgaattggccctttgtcatccccagggatgtgaatgttgcatacaacaacgtatcggggccacaaacgccttgcggcgaccataatggttattataatcctgcagacgggcctatgtctgacaaactccacgttatcgggcttcccgacctggtcccccatcataccaacgagctctttttacatggggaccagcagcttgatgttccccagcaggcacacaccgtcccccacgatattgccgcgaacaacaaaaaatga

SEQ ID NO: 14210 - protein, 821 aa, Muscodor strobelii
  misc_feature: SGI Peptide ID NO. 564678
  misc_feature (380)..(723): Pfam Id: PF00082 Pfam Desc: Subtilase family
  misc_feature (391)..(700): NCBI GI: 56201265 Blast Desc: serine protease precursor [Fusarium oxysporum]
  misc_feature (473)..(694): NCBI GI: 169605173 Blast Desc: SNOG_05604 [Phaeosphaeria nodorum SN15] gi|160706719|gb|EAT86668.2| SNOG_05604 [Phaeosphaeria nodorum SN15]
  misc_feature (391)..(700): NCBI GI: 46114268 Blast Desc: FG02976.1 [Gibberella zeae PH-1]
  misc_feature (393)..(692): NCBI GI: 119191019 Blast Desc: CIMG_05557 [Coccidioides immitis RS]
  misc_feature (393)..(692): NCBI GI: 240107403 Blast Desc: subtilisin-like protease, [Coccidioides posadasii C735 delta SOWgp]
  misc_feature (391)..(700): NCBI GI: 10181226 Blast Desc: serine protease precursor [Fusarium oxysporum f. sp. lycopersici]
  misc_feature (443)..(736): NCBI GI: 261351925 Blast Desc: [Verticillium albo-atrum VaMs.102]
  misc_feature (362)..(696): NCBI GI: 46127269 Blast Desc: FG08012.1 [Gibberella zeae PH-1]
  misc_feature (393)..(701): NCBI GI: 7573223 Blast Desc: subtilisin-like protease PR1J [Metarhizium anisopliae var. anisopliae]
  misc_feature (393)..(701): NCBI GI: 6624952 Blast Desc: Subtilisin-like serine protease PR1J [Metarhizium anisopliae var. anisopliae]
MNDSDPMDLMLDTGAGTEVTASSDRIIIGTETILYPSADISTRVTRGLITVTIAPATYPPPSLGTSPAETQSASLEILKNYGDVGGSLSAAYWLFSNNLLGLFMSSEEPLSESIPGLVGPQGLLAALFESAEQMTKIFESPAVSAFRGWASWVTGAHAASGEDIPLIDFITDIVGPTPTNKNIVKNIGRTIPDALSKIYNLCKFLSKKAWRSKGRLLAVMERNRLAILGAGTAVTPGIAVIAGVSIRYLYTASWEKVTDPDTEDKVRRKWYVKTKEGTPWWQFKALIAFIDGGVSYQVGGGLKTPNTGPGYFTELDLVEGRTKMQLIKNTRLCVDWVYMYPNLEEWQKLSPHVETRWSATINDPSDISYNHKRLISMISSDQRPLRQQPFHRHDDSSGEGITIFVMDSGFDLSGSMPDEYRVRGRALSDFAYLPPLKLRLPDIPQNLWKLPDTMDDDIWVPPQGDESGYYDTHGTENAALAGGSTYSVAGKSDLYLLKLMALYQDPDKPPGSWITMSGQPGAIDDAMHRIIEHINSQILFGRAVVSYSASTRWQDPATVSFGNDELRDLHQANYDIWERFARKLVSYGILLVTSAGNSGLDPGAVPLGGWVPQLLGTDTNNIVTVGAVTETGVLAGFSTPAGSLTGVNLGSITLYAQGTNVFAPTRGGDPVIVSGTSRACPQVAGLVAYALALPENRDSMRWRGNGRELTQIVKRWLVQTSYRRVLLADQLPRYPLNWPFVIPRDVNVAYNNVSGPQTPCGDHNGYYNPADGPMSDKLHVIGLPDLVPHHTNELFLHGDQQLDVPQQAHTVPHDIAANNKK

SEQ ID NO: 14211 - DNA, 373 bp, Muscodor strobelii
  misc_feature: SGI EST ID NO. CUFF.33832.0
  misc_feature: Variant of the nucleotide sequence at SEQ ID NO 14209
aaaccaccaggaagttggattaccatgtccggccaaccaggcgctattgacgatgcaatgcacagaatcattgagcatatcaattcacaaatcttattcggtagggcagtcgtgagctattctgcttcgacgaggtggcaagatcccgctactgtttcgttcggcaatgatgaactacgcgacttacatcaagcaaactacgatatctgggagcgctttgcacgtaaattggtgtcttatgggatcttacttgtgacatctgctggcaactcaggactagacccaggcgcagtgccactaggaggctgggtaccacaactactgggaacagacacaaacaacatagtcacggtaggtgctgtgacagagaccg

SEQ ID NO: 14212 - DNA, 540 bp, Muscodor strobelii
  misc_feature: SGI cDNA ID NO. 564679
  misc_feature: Encodes the peptide sequence at SEQ ID NO 14213
atgatggcccaggtactccagttggaaccgctcgctggaggcgttgacccggttactccagttccagttgcagtcggtgctgaggatgtagtacttgactcgactacggattttgatgatgttgtatccgtactatttgacgtaactggtggcgcacttggttcactacttcgaatagtagtcaccgatgaactcggtccagtatggggtggggtagatgacatcgtcgtcggtagctctggaggtacagcagttgacgaactcgtcgaagagcttggaagtacaagagtagtcgaatgtgtcgtcaagcttgaggatgtagggagagacgtaataatcgatgtagtggacaaatccggtggcgcagaatgtgacttagccgttgacggtgtcgggatagggagcatagtggatgaatccggaaatgttggccccttctctgagctgaatgaagaaggtgatgtgacggacgatggtgtagaagatggtgtagaagatggtgtagaagatggtgtagaagatggtgtcaatgacggatga

SEQ ID NO: 14213 - protein, 179 aa, Muscodor strobelii
  misc_feature: SGI Peptide ID NO. 564679
MMAQVLQLEPLAGGVDPVTPVPVAVGAEDVVLDSTTDFDDVVSVLFDVTGGALGSLLRIVVTDELGPVWGGVDDIVVGSSGGTAVDELVEELGSTRVVECVVKLEDVGRDVIIDVVDKSGGAECDLAVDGVGIGSIVDESGNVGPFSELNEEGDVTDDGVEDGVEDGVEDGVEDGVNDG

SEQ ID NO: 14214 - DNA, 1008 bp, Muscodor strobelii
  misc_feature: SGI cDNA ID NO. 564680
  misc_feature: Encodes the peptide sequence at SEQ ID NO 14215
atgccagaggatattcacacgcaccacactcccgtcgacggtctacctaagccggccaagactccagatgatacgacgcatgccaaagaagccaatgcatcatcgataggtcgcaagcgaggatttgatttctcaaacctagatcccgatgagctagaacgcagtcgtaagtgtgctcgagaagctgccgagactccaattgaggaagtcgaggagtatctgctcaactcaacgcgatctcaactcctgaagcactcagaacaagaaaacgccatgttctttctcgagacaacaccagcttcctcgcgaaagggagctagtttccagttcatgcaatgcgaggagaagattcatcagttcgattatcgaattgcagttaacccaggcatgaataattggcatggaaatccagacttctatcacgtcaaatgcttcgaggcattggtagacttctcaaagaccgatgttctgagtcgattcaaaatgctgacaaggcaccgcgagtcttggttagagcgcggtttgggaatgacgtctgttgtcgacggaaaccatttcctggacgccggagcagagagactcgtgttgcactgggttgagtcgatgaatcgccttgttgcacagcgtgacggagcccaccacgcaccactcgaccctgaagtcatcgacctactctataaagccggttcagcgtctttcaccccaaaacaaccccaaagtgtctcggacggtatgtaccgcgctctgtgtggctctctcgcgccgattgagagcgattggcccgacgacacgaaggaatggaaccttttcgatgaatatgtcccattgaaatttgatgccctccaagacctgaaccaaacccatagtttgagttcaatgctggaggcatggagatccgatcagtacctagccacggaagacaacgacgaggcacgagggaaactgggcgagaaggccattcgggccatcaaacgactgtcagtcgtccactctggtttgatgttttaa

SEQ ID NO: 14215 - protein, 335 aa, Muscodor strobelii
  misc_feature: SGI Peptide ID NO. 564680
  misc_feature (88)..(329): NCBI GI: 255935005 Blast Desc: Pc13g00820 [Penicillium chrysogenum Wisconsin 54-1255] gi|211583149|emb|CAP91151.1| Pc13g00820 [Penicillium chrysogenum Wisconsin 54-1255]
  misc_feature (88)..(300): NCBI GI: 159125701 Blast Desc: AFUB_071580 [Aspergillus fumigatus A1163]
  misc_feature (85)..(329): NCBI GI: 67902840 Blast Desc: AN8407.2 [Aspergillus nidulans FGSC A4] gi|40747873|gb|EAA67029.1| [Aspergillus nidulans FGSC A4]
  misc_feature (85)..(297): NCBI GI: 259484341 Blast Desc: TPA: conserved [Aspergillus nidulans FGSC A4]
  misc_feature (93)..(160): NCBI GI: 242761042 Blast Desc: TSTA_062050 [Talaromyces stipitatus ATCC 10500] gi|218723300|gb|EED22717.1| TSTA_062050 [Talaromyces stipitatus ATCC 10500]
MPEDIHTHHTPVDGLPKPAKTPDDTTHAKEANASSIGRKRGFDFSNLDPDELERSRKCAREAAETPIEEVEEYLLNSTRSQLLKHSEQENAMFFLETTPASSRKGASFQFMQCEEKIHQFDYRIAVNPGMNNWHGNPDFYHVKCFEALVDFSKTDVLSRFKMLTRHRESWLERGLGMTSVVDGNHFLDAGAERLVLHWVESMNRLVAQRDGAHHAPLDPEVIDLLYKAGSASFTPKQPQSVSDGMYRALCGSLAPIESDWPDDTKEWNLFDEYVPLKFDALQDLNQTHSLSSMLEAWRSDQYLATEDNDEARGKLGEKAIRAIKRLSVVHSGLMF

SEQ ID NO: 14216 - DNA, 1714 bp, Muscodor strobelii
  misc_feature: SGI EST ID NO. CUFF.33846.0
  misc_feature: Variant of the nucleotide sequence at SEQ ID NO 14214
tatcaacaagcattaacgacaagacgatttctccgacgcatgtcagaccgaattcccgtcaacacgctagacgcaaatccgatcaaaatgccagaggatattcacacgcaccacactcccgtcgacggtctacctaagccggccaagactccagatgatacgacgcatgccaaagaagccaatgcatcatcgataggtcgcaagcgaggatttgatttctcaaacctagatcccgatgagctagaacgcagtcgtaagtgtgctcgagaagctgccgagactccaattgaggaagtcgaggagtatctgctcaactcaacgcgatctcaactcctgaagcactcagaacaagaaaacgccatgttctttctcgagacaacaccagcttcctcgcgaaagggagctagtttccagttcatgcaatgcgaggagaagattcatcagttcgattatcgaattgcagttaacccaggcatgaataattggcatggaaatccagacttctatcacgtcaaatgcttcgaggcattggtagacttctcaaagaccgatgttctgagtcgattcaaaatgctgacaaggcaccgcgagtcttggttagagcgcggtttgggaatgacgtctgttgtcgacggaaaccatttcctggacgccggagcagagagactcgtgttgcactgggttgagtcgatgaatcgccttgttgcacagcgtgacggagcccaccacgcaccactcgaccctgaagtcatcgacctactctataaagccggttcagcgtctttcaccccaaaacaaccccaaagtgtctcggacggtatgtaccgcgctctgtgtggctctctcgcgccgattgagagcgattggcccgacgacacgaaggaatggaaccttttcgatgaatatgtcccattgaaatttgatgccctccaagacctgaaccaaacccatagtttgagttcaatgctggaggcatggagatccgatcagtgtctagtacctagccacggaagacaacgacgaggcacgagggaaactgggcgagaaggccattcgggccatcaaacgactgtcagtcgtccactctggtttgatgttttaaatgatgtaattcttgtaagaaggaatttgctcttcgtgccgatgagatcgtttgaggattgtcacgacagataccgcgtatgttgtcaaacttagctgtagttccgaccctgttctcagtccctgcgttacttcttggtcgccttgcagatttgttttcatcaatacattgctcccataagcccatgctttttgtcatacttctagacaactattgtcaagagagaggttgtcgctagatatctaagcaccaggcatgatgtaggtctagcgcaaaatataatgacctcgctttctacaagccttactcttgttttacatcaccacgcacctcgacacgttcagcagcctctccatttggttctcacaggggcccaacttaagggcagaaaacaggtccagtcctttatgttagcatagatactctgctaccgtctcgggatggcgaacacaatttcatccccatacgaaaaccatcatagtaagagctgaatctgcgggcttagcagcgtaagcaaacttgtatcgactatctgcagtagcgacaagccttttccagtcgtttatctcgcgctcgtgggagttttgaataaccttttgggccagatccgtg

SEQ ID NO: 14217 - DNA, 1266 bp, Muscodor strobelii
  misc_feature: SGI cDNA ID NO. 564681
  misc_feature: Elevated expression when VOC is produced
  misc_feature: Encodes the peptide sequence at SEQ ID NO 14218
atgacgtcgtcctcgcggatcagcgagctctccgcaagaatcgcgctcaatactgcaaaagtcgatgatcacttcatatcacatggtttacctacgccttcctttgacatcaacgcccctacaaagctccacataccagatagtgcacctgagactaaagccgctcgcattacggttatcgatgacactctcgagcttcgtcgactgatgttgggaccaacaggtcatataacaagttattcgaccaacgcgctactatgtcaacaagcaatcatacggtatcgcttggttcacgcaattcctcttggaggagaggcgacattcgcggacattgccaatgcctgtatggctctcacggaatcagacgcccgacagatagtccgacgtgccattgttgatgggatttttaaaattcgtcccggcgttattgcccacaatgcagtatctcgattgctgactgaagacaacttacttcatgactgggttggcgcaaatgtagacgagctatggcctgcagctgcacatatgtgtgacgcgattgataaatggccggcgtccgaagagccaacagagacgggattcggtttggccaataatacgactaaatcaatgtatgacttcttctcagatcaccctgagcgcgctcgacggttcgcaaatgctatgcgagctctcggtgatcgtgccgatcttgactcgtcgcacgcggtcaaggctttcccatggtcagatctaggtgatggtaaaattgtagatatcggcggctcacacggtcacatatcaatcgccattgcccgtgcttacccttctctcacaattgtcgtccaagacctggagcctgtcattgaagaggcgaagaagaatgtcccggatgatgttaaaggtcgcattgagttcatggctcatgatttcttcacatctcagccgattcatgatgctgctgtgtattttttccggtggattttgcataattggacagatcgatatgcgctggatatactgcgaaatctaatcccggccttgaggccgggaacacagatcttgatccaagatgtggtcttgccgactccgggaaatatgtcgaactacgaagaaactcaaatgagaagcacggatctggcccaaaaggttattcaaaactcccacgagcgcgagataaacgactggaaaaggcttgtcgctactgcagatagtcgatacaagtttgcttacgctgctaagcccgcagattcagctcttactatgatggttttcgtatggggatga

SEQ ID NO: 14218 - protein, 421 aa, Muscodor strobelii
  misc_feature: SGI Peptide ID NO. 564681
  misc_feature (138)..(394): Pfam Id: PF00891 Pfam Desc: O-methyltransferase
  misc_feature (250)..(355): Pfam Id: PF00891 Pfam Desc: O-methyltransferase
  misc_feature (6)..(420): NCBI GI: 116192635 Blast Desc: CHGG_06035 [Chaetomium globosum CBS 148.51] gi|88181948|gb|EAQ89416.1| CHGG_06035 [Chaetomium globosum CBS 148.51]
  misc_feature (5)..(420): NCBI GI: 212536596 Blast Desc: O-methyltransferase, [Penicillium marneffei ATCC 18224] gi|210070853|gb|EEA24943.1| O-methyltransferase, [Penicillium marneffei ATCC 18224]
  misc_feature (2)..(420): NCBI GI: 242800307 Blast Desc: O-methyltransferase, [Talaromyces stipitatus ATCC 10500] gi|218716905|gb|EED16326.1| O-methyltransferase, [Talaromyces stipitatus ATCC 10500]
  misc_feature (2)..(420): NCBI GI: 212534482 Blast Desc: O-methyltransferase, [Penicillium marneffei ATCC 18224] gi|210069796|gb|EEA23886.1| O-methyltransferase, [Penicillium marneffei ATCC 18224]
  misc_feature (1)..(420): NCBI GI: 154292573 Blast Desc: BC1G_14810 [Botryotinia fuckeliana B05.10] gi|150845891|gb|EDN21084.1| BC1G_14810 [Botryotinia fuckeliana B05.10]
  misc_feature (2)..(420): NCBI GI: 116206014 Blast Desc: CHGG_02300 [Chaetomium globosum CBS 148.51] gi|88182897|gb|EAQ90365.1| CHGG_02300 [Chaetomium globosum CBS 148.51]
  misc_feature (1)..(420): NCBI GI: 189208266 Blast Desc: sterigmatocystin 8-O-methyltransferase precursor [Pyrenophora tritici-repentis Pt-1C-BFP] gi|187976559|gb|EDU43185.1| sterigmatocystin precursor Pt-1C-BFP]
  misc_feature (1)..(420): NCBI GI: 171681439 Blast Desc: protein product [Podospora anserina] gi|170940678|emb|CAP65906.1| protein product [Podospora anserina]
  misc_feature (3)..(400): NCBI GI: 212545252 Blast Desc: O-methyltransferase, [Penicillium marneffei ATCC 18224] gi|210065749|gb|EEA19843.1| O-methyltransferase, [Penicillium marneffei ATCC 18224]
  misc_feature (3)..(400): NCBI GI: 242815122 Blast Desc: O-methyltransferase, [Talaromyces stipitatus ATCC 10500] gi|218714847|gb|EED14270.1| O-methyltransferase, [Talaromyces stipitatus ATCC 10500]
  misc_feature (69)..(401): SWISSPROT Homolog: EC 2.1.1.110 Sterigmatocystin 8-O-methyltransferase
  misc_feature: Useful for introducing or modulating the production of volatile compounds
MTSSSRISELSARIALNTAKVDDHFISHGLPTPSFDINAPTKLHIPDSAPETKAARITVIDDTLELRRLMLGPTGHITSYSTNALLCQQAIIRYRLVHAIPLGGEATFADIANACMALTESDARQIVRRAIVDGIFKIRPGVIAHNAVSRLLTEDNLLHDWVGANVDELWPAAAHMCDAIDKWPASEEPTETGFGLANNTTKSMYDFFSDHPERARRFANAMRALGDRADLDSSHAVKAFPWSDLGDGKIVDIGGSHGHISIAIARAYPSLTIVVQDLEPVIEEAKKNVPDDVKGRIEFMAHDFFTSQPIHDAAVYFFRWILHNWTDRYALDILRNLIPALRPGTQILIQDVVLPTPGNMSNYEETQMRSTDLAQKVIQNSHEREINDWKRLVATADSRYKFAYAAKPADSALTMMVFVWG

SEQ ID NO: 14219 - DNA, 2023 bp, Muscodor strobelii
  misc_feature: SGI EST ID NO. CUFF.33847.1
  misc_feature: Variant of the nucleotide sequence at SEQ ID NO 14217
cgcggaggttgaaatcgtctcatgtgagtaggtgcagtatttaagactgtgtgttggagatatacatctgcacttcgaacccccttgcttccgcaaggtcttcttatcatttgctcgtcctgttcaatcgtaatctagcatttgatctgatcatctttgacacactgtgggcttggactatccgttctcacttggctattgcattaggtattttgacatgacgtcgtcctcgcggatcagcgagctctccgcaagaatcgcgctcaatactgcaaaagtcgatgatcacttcatatcacatggtttacctacgccttcctttgacatcaacgcccctacaaagctccacataccagatagtgcacctgagactaaagccgctcgcattacggttatcgatgacactctcgagcttcgtcgactgatgttgggaccaacaggtcatataacaagttattcgaccaacgcgctactatgtcaacaagcaatcatacggtatcgcttggttcacgcaattcctcttggaggagaggcgacattcgcggacattgccaatgcctgtatggctctcacggaatcagacgcccgacagatagtccgacgtgccattgttgatgggatttttaaaattcgtcccggcgttattgcccacaatgcagtatctcgattgctgactgaagacaacttacttcatgactgggttggcgcaaatgtagacgagctatggcctgcagctgcacatatgtgtgacgcgattgataaatggccggcgtccgaagagccaacagagacgggattcggtttggccaataatacgactaaatcaatgtatgacttcttctcagatcaccctgagcgcgctcgacggttcgcaaatgctatgcgagctctcggtgatcgtgccgatcttgactcgtcgcacgcggtcaaggctttcccatggtcagatctaggtgatggtaaaattgtagatatcggcggctcacacggtcacatatcaatcgccattgcccgtgcttacccttctctcacaattgtcgtccaagacctggagcctgtcattgaagaggcgaagaagaatgtcccggatgatgttaaaggtcgcattgagttcatggctcatgatttcttcacatctcagccgattcatgatgctgctgtgtattttttccggtggattttgcataattggacagatcgatatgcgctggatatactgcgaaatctaatcccggccttgaggccgggaacacagatcttgatccaagatgtggtcttgccgactccgggaaatatgtcgaactacgaagaaactcaaatgagaagcacggatctggcccaaaaggttattcaaaactcccacgagcgcgagataaacgactggaaaaggcttgtcgctactgcagatagtcgatacaagtttgcttacgctgctaagcccgcagattcagctcttactatgatggttttcgtatggggatgaaattgtgttcgccatcccgagacggtagcagagtatctatgctaacataaaggactggacctgttttctgcccttaagttgggcccctgtgagaaccaaatggagaggctgctgaacgtgtcgaggtgcgtggtgatgtaaaacaagagtaaggcttgtagaaagcgaggtcattatattttgcgctagacctacatcatgcctggtgcttagatatctagcgacaacctctctcttgacaatagttgtctagaagtatgacaaaaagcatgggcttatgggagcaatgtattgatgaaaacaaatctgcaaggcgaccaagaagtaacgcagggactgagaacagggtcggaactacagctaagtttgacaacatacgcggtatctgtcgtgacaatcctcaaacgatctcatcggcacgaagagcaaattccttcttacaagaattacatcatttaaaacatcaaaccagagtggacgactgacagtcgtttgatggcccgaatggccttctcgcccagtttccctcgtgcctcgtcg

SEQ ID NO: 14220 - DNA, 1275 bp, Muscodor strobelii
  misc_feature: SGI cDNA ID NO. 564682
  misc_feature: Encodes the peptide sequence at SEQ ID NO 14221
atgacgtcgtcctcgcggatcagcgagctctccgcaagaatcgcgctcaatactgcaaaagtcgatgatcacttcatatcacatggtttacctacgccttcctttgacatcaacgcccctacaaagctccacataccagatagtgcacctgagactaaagccgctcgcattacggttatcgatgacactctcgagcttcgtcgactgatgttgggaccaacaggtcatataacaagttattcgaccaacgcgctactatgtcaacaagcaatcatacggtatcgcttggttcacgcaattcctcttggaggagaggcgacattcgcggacattgccaatgcctgtatggctctcacggaatcagacgcccgacagatagtccgacgtgccattgttgatgggatttttaaaattcgtcccggcgttattgcccacaatgcagtatctcgattgctgactgaagacaacttacttcatgactgggttggcgcaaatgtagacgagctatggcctgcagctgcacatatgtgtgacgcgattgataaatggccggcgtccgaagagccaacagagacgggattcggtttggccaataatacgactaaatcaatgtatgacttcttctcagatcaccctgagcgcgctcgacggttcgcaaatgctatgcgagctctcggtgatcgtgccgatcttgactcgtcgcacgcggtcaaggctttcccatggtcagatctaggtgatgtcctaaaacgtaggatctataagatcggcggctcacacggtcacatatcaatcgccattgcccgtgcttacccttctctcacaattgtcgtccaagacctggagcctgtcattgaagaggcgaagaagaatgtcccggatgatgttaaaggtcgcattgagttcatggctcatgatttcttcacatctcagccgattcatgatgctgctgtgtattttttccggtggattttgcataattggacagatcgatatgcgctggatatactgcgaaatctaatcccggccttgaggccgggaacacagatcttgatccaagatgtggtcttgccgactccgggaaatatgtcgaactacgaagaaactcaaatgagaagcacggatctggcccaaaaggttattcaaaactcccacgagcgcgagataaacgactggaaaaggcttgtcgctactgcagatagtcgatacaagtttgcttacgctgctaagcccgcagattcagctcttactatgatggttttcgtatggggatga

SEQ ID NO: 14221 - protein, 424 aa, Muscodor strobelii
  misc_feature: SGI Peptide ID NO. 564682
  misc_feature (138)..(397): Pfam Id: PF00891 Pfam Desc: O-methyltransferase
  misc_feature (256)..(358): Pfam Id: PF00891 Pfam Desc: O-methyltransferase
  misc_feature (6)..(423): NCBI GI: 116192635 Blast Desc: CHGG_06035 [Chaetomium globosum CBS 148.51] gi|88181948|gb|EAQ89416.1| CHGG_06035 [Chaetomium globosum CBS 148.51]
  misc_feature (5)..(423): NCBI GI: 212536596 Blast Desc: O-methyltransferase, [Penicillium marneffei ATCC 18224] gi|210070853|gb|EEA24943.1| O-methyltransferase, [Penicillium marneffei ATCC 18224]
  misc_feature (2)..(423): NCBI GI: 242800307 Blast Desc: O-methyltransferase, [Talaromyces stipitatus ATCC 10500] gi|218716905|gb|EED16326.1| O-methyltransferase, [Talaromyces stipitatus ATCC 10500]
  misc_feature (2)..(423): NCBI GI: 212534482 Blast Desc: O-methyltransferase, [Penicillium marneffei ATCC 18224] gi|210069796|gb|EEA23886.1| O-methyltransferase, [Penicillium marneffei ATCC 18224]
  misc_feature (1)..(423): NCBI GI: 154292573 Blast Desc: BC1G_14810 [Botryotinia fuckeliana B05.10] gi|150845891|gb|EDN21084.1| BC1G_14810 [Botryotinia fuckeliana B05.10]
  misc_feature (2)..(423): NCBI GI: 116206014 Blast Desc: CHGG_02300 [Chaetomium globosum CBS 148.51] gi|88182897|gb|EAQ90365.1| CHGG_02300 [Chaetomium globosum CBS 148.51]
  misc_feature (1)..(423): NCBI GI: 189208266 Blast Desc: sterigmatocystin 8-O-methyltransferase precursor [Pyrenophora tritici-repentis Pt-1C-BFP] gi|187976559|gb|EDU43185.1| sterigmatocystin precursor Pt-1C-BFP]
  misc_feature (1)..(423): NCBI GI: 171681439 Blast Desc: protein product [Podospora anserina] gi|170940678|emb|CAP65906.1| protein product [Podospora anserina]
  misc_feature (3)..(403): NCBI GI: 212545252 Blast Desc: O-methyltransferase, [Penicillium marneffei ATCC 18224] gi|210065749|gb|EEA19843.1| O-methyltransferase, [Penicillium marneffei ATCC 18224]
  misc_feature (3)..(403): NCBI GI: 242815122 Blast Desc: O-methyltransferase, [Talaromyces stipitatus ATCC 10500] gi|218714847|gb|EED14270.1| O-methyltransferase, [Talaromyces stipitatus ATCC 10500]
  misc_feature (69)..(404): SWISSPROT Homolog: EC 2.1.1.110 Sterigmatocystin 8-O-methyltransferase
MTSSSRISELSARIALNTAKVDDHFISHGLPTPSFDINAPTKLHIPDSAPETKAARITVIDDTLELRRLMLGPTGHITSYSTNALLCQQAIIRYRLVHAIPLGGEATFADIANACMALTESDARQIVRRAIVDGIFKIRPGVIAHNAVSRLLTEDNLLHDWVGANVDELWPAAAHMCDAIDKWPASEEPTETGFGLANNTTKSMYDFFSDHPERARRFANAMRALGDRADLDSSHAVKAFPWSDLGDVLKRRIYKIGGSHGHISIAIARAYPSLTIVVQDLEPVIEEAKKNVPDDVKGRIEFMAHDFFTSQPIHDAAVYFFRWILHNWTDRYALDILRNLIPALRPGTQILIQDVVLPTPGNMSNYEETQMRSTDLAQKVIQNSHEREINDWKRLVATADSRYKFAYAAKPADSALTMMVFVWG

SEQ ID NO: 14222 - DNA, 2023 bp, Muscodor strobelii; identical to SEQ ID NO: 14219
  misc_feature: SGI EST ID NO. CUFF.33847.1
  misc_feature: Variant of the nucleotide sequence at SEQ ID NO 14220

SEQ ID NO: 14223 - DNA, 870 bp, Muscodor strobelii
  misc_feature: SGI cDNA ID NO. 564683
  misc_feature: Elevated expression when VOC is produced
  misc_feature: Encodes the peptide sequence at SEQ ID NO 14224
atgagatatcttttctccaccgcgggtttcacagcccttttggccaatgcctcaccattagttcagcgtgctgaagttgaccgtgccaacgactgggatggtattctaaatgatgaaagtggcgcaacatgtgcggacctagctgtcatttttgcgagagggacatttgactctggcaacattgggccttgggtcggtggtccattccgagacgccttagttcagcagcacagtagtgttgcgttccaaggtgtcgatactgcagactatgcagccgacttggcgggctatgttaaggaagggtctccccagagctgcgcggactccctaggaaaaacggttcagaaatatcacactgcgtgccccgatgctaaggttgttatctcaggttggagtcaaggcgcattgtgcgctcacaaatccttgggctcgctgggagacgctgctgacagtgtcgtcgcttttactaccttcggtgatcctgtggagatttggtcagacagcataacattcccttcgacaccttccaatgcgaaaatattctcttattgtgaccatacgactccggatcctctttgcacagacccgtctgagagctttccgtccgaccccctcgaattcattgacaagctgaaggatatatgggaagatgcaagctcagttgacatgaccgacgcacaaaagtcggcgctcgcgaacatcattgtcgagcttcctaagcaggctgttaagcaaatcggacagctcacaacggatattttcaacggtcatattcggcgatgggagctgacacctgagcatttctggtatggtaatgatgccatagtacaacaggcggccacagatattgtctcggctttcaacggctag

SEQ ID NO: 14224 - protein, 289 aa, Muscodor strobelii
  misc_feature: SGI Peptide ID NO. 564683
  misc_feature (42)..(288): Pfam Id: PF01083 Pfam Desc: Cutinase
  misc_feature (42)..(197): Pfam Id: PF01083 Pfam Desc: Cutinase
  misc_feature (4)..(163): NCBI GI: 39968417 Blast Desc: MGG_11966 [Magnaporthe grisea 70-15] gi|145014131|gb|EDJ98772.1| MGG_11966 [Magnaporthe grisea 70-15]
  misc_feature (28)..(166): NCBI GI: 256730766 Blast Desc: NECHADRAFT_30450 [Nectria haematococca mpVI 77-13-4]
  misc_feature (36)..(163): NCBI GI: 46109376 Blast Desc: FG01570.1 [Gibberella zeae PH-1]
  misc_feature (41)..(161): NCBI GI: 39943562 Blast Desc: MGG_03792 [Magnaporthe grisea 70-15] gi|145014475|gb|EDJ99043.1| MGG_03792 [Magnaporthe grisea 70-15]
  misc_feature (31)..(161): NCBI GI: 238485224 Blast Desc: cutinase precursor, [Aspergillus flavus NRRL3357] gi|220698729|gb|EED55068.1| cutinase precursor, [Aspergillus flavus NRRL3357]
  misc_feature (31)..(161): NCBI GI: 169772161 Blast Desc: [Aspergillus oryzae RIB40] gi|7209796|dbj|BAA92327.1| triacylglycerol lipase [Aspergillus oryzae] gi|83768409|dbj|BAE58548.1| protein product [Aspergillus oryzae]
  misc_feature (42)..(195): NCBI GI: 169772355 Blast Desc: [Aspergillus oryzae RIB40] gi|83768507|dbj|BAE58644.1| protein product [Aspergillus oryzae]
  misc_feature (38)..(163): NCBI GI: 156033332 Blast Desc: SS1G_13386 [Sclerotinia sclerotiorum 1980] gi|154698789|gb|EDN98527.1| SS1G_13386 [Sclerotinia sclerotiorum 1980]
  misc_feature (38)..(161): NCBI GI: 154310781 Blast Desc: BC1G_06369 [Botryotinia fuckeliana B05.10] gi|150851168|gb|EDN26361.1| BC1G_06369 [Botryotinia fuckeliana B05.10]
  misc_feature (35)..(194): NCBI GI: 156036436 Blast Desc: SS1G_12907 [Sclerotinia sclerotiorum 1980] gi|154698312|gb|EDN98050.1| SS1G_12907 [Sclerotinia sclerotiorum 1980]
  misc_feature: Useful for introducing or modulating the production of volatile compounds
MRYLFSTAGFTALLANASPLVQRAEVDRANDWDGILNDESGATCADLAVIFARGTFDSGNIGPWVGGPFRDALVQQHSSVAFQGVDTADYAADLAGYVKEGSPQSCADSLGKTVQKYHTACPDAKVVISGWSQGALCAHKSLGSLGDAADSVVAFTTFGDPVEIWSDSITFPSTPSNAKIFSYCDHTTPDPLCTDPSESFPSDPLEFIDKLKDIWEDASSVDMTDAQKSALANIIVELPKQAVKQIGQLTTDIFNGHIRRWELTPEHFWYGNDAIVQQAATDIVSAFNG

SEQ ID NO: 14225 - DNA, 1571 bp, Muscodor strobelii
  misc_feature: SGI EST ID NO. CUFF.33869.1
  misc_feature: Variant of the nucleotide sequence at SEQ ID NO 14223
cgtcgaataggtttacaaatgttcgtaaatcttccaaaaactcaagcactctcggagatcagctgggttttagctaatatgtcaaacccgacgagggcgacattcatagtgaactttactgttcgcgttgttccagctacatggattcgtcttccaaactaagggttttcccatgacaaaagtccctagaatatgagggctgtcaggagtgacggcgatcccgaactgagacacttgcaattaatctgcggccatttctagggttattgtataacatgaatacgcatcgatttttcatatatcagacgaaccatggagtgtcacttcgccatcgtaactcttgataacacctgcctactccaacgcgacacgcagcatcattcaagctcaagtcaatatgagatatcttttctccaccgcgggtttcacagcccttttggccaatgcctcaccattagttcagcgtgctgaagttgaccgtgccaacgactgggatggtattctaaatgatgaaagtggcgcaacatgtgcggacctagctgtcatttttgcgagagggacatttgactctgggtgagtttgttggaaaccatatatgagagctttatcgcgaaagtctgggagcgtgcatgcaatttttgctgacacgctacagcaacattgggccttgggtcggtggtccattccgagacgccttagttcagcagcacagtagtgttgcgttccaaggtgtcgatactgcagactatgcagccgacttggcgggctatgttaaggaagggtctccccagagctgcgcggactccctaggaaaaacggttcagaaatatcacactgcgtgccccgatgctaaggttgttatctcaggttggagtcaaggcgcattgtgcgctcacaaatccttgggctcgctgggagacgctgctgacagtgtcgtcgcttttactaccttcggtgatcctgtggagatttggtcagacagcataacattcccttcgacaccttccaatgcgaaaatattctcttattgtgaccatacgactccggatcctctttgcacagacccgtctgagagctttccgtccgaccccctcgaattcattgacaagctgaaggatatatgggaagatgcaagctcagttgacatgaccgacgcacaaaagtcggcgctcgcgaacatcattgtcgagcttcctaagcaggctgttaagcaaatcggacagctcacaacggatattttcaacggtcatattcggcgatgggagctgacacctgagcatttctggtatggtaatgatgccatagtacaacaggcggccacagatattgtctcggctttcaacggctagatgatgaatgacagtgtgtatttcacatgctgaagctagtggctctgttggttaattgattttttcaatgcagactcgtagaaaatagaacacgaaaagcggccttttcgtgacactaagcattgttagtatccagacattgtacaacagtgatgagtgatgcaatagattatgataggctttccttggcgtagaaaatgtttcaaacttaatagattaccg

SEQ ID NO: 14226 - DNA, 315 bp, Muscodor strobelii
  misc_feature: SGI cDNA ID NO. 564684
  misc_feature: Elevated expression when VOC is produced
  misc_feature: Encodes the peptide sequence at SEQ ID NO 14227
atggatttcttgaacaaggtcaccggagggtccaaggatgaggcgaagaaggaagaatctaaccagagcaatggaggtggcttcatggacaagatgaactcgatggcaggtggtggtaaggagagcgagaaaaacgaagatgctctagacaaaggagtcgattgggtgcaggagaatgttcttggccagggagaccagagcaatgagagcgcggccgagcaggccaaagatgaacaaatttcggacttcatccgcggccagtataaatcgtcaactggctcggacattccaattaaagataaggaacgcttctag

SEQ ID NO: 14227 - protein, 104 aa, Muscodor strobelii
  misc_feature: SGI Peptide ID NO. 564684
  misc_feature (1)..(101): NCBI GI: 261353261 Blast Desc: conserved [Verticillium albo-atrum VaMs.102]
  misc_feature (1)..(104): NCBI GI: 226292150 Blast Desc: conserved [Paracoccidioides brasiliensis Pb18]
  misc_feature (1)..(104): NCBI GI: 226282688 Blast Desc: conserved [Paracoccidioides brasiliensis Pb01]
  misc_feature (1)..(104): NCBI GI: 225557500 Blast Desc: HCBG_06050 [Ajellomyces capsulatus G186AR]
  misc_feature (1)..(104): NCBI GI: 240278141 Blast Desc: conserved [Ajellomyces capsulatus H143]
  misc_feature (1)..(101): NCBI GI: 171688154 Blast Desc: protein product [Podospora anserina] gi|170944039|emb|CAP70149.1| protein product [Podospora anserina]
  misc_feature (1)..(102): NCBI GI: 154274866 Blast Desc: [Ajellomyces capsulatus NAm1] gi|150414724|gb|EDN10086.1| [Ajellomyces capsulatus NAm1]
  misc_feature (1)..(103): NCBI GI: 256733694 Blast Desc: NECHADRAFT_78063 [Nectria haematococca mpVI 77-13-4]
  misc_feature (1)..(104): NCBI GI: 239615594 Blast Desc: conserved [Ajellomyces dermatitidis ER-3]
  misc_feature (1)..(104): NCBI GI: 225681145 Blast Desc: [Paracoccidioides brasiliensis Pb03]
  misc_feature: Useful for introducing or modulating the production of volatile compounds
MDFLNKVTGGSKDEAKKEESNQSNGGGFMDKMNSMAGGGKESEKNEDALDKGVDWVQENVLGQGDQSNESAAEQAKDEQISDFIRGQYKSSTGSDIPIKDKERF

SEQ ID NO: 14228 - DNA, 679 bp, Muscodor strobelii
  misc_feature: SGI EST ID NO. CUFF.33860.0
  misc_feature: Variant of the nucleotide sequence at SEQ ID NO 14226
acaaggctcatgctttgtattaaataaaaagaaatttcatatatatatcacccagacttatcagcatccaagattatttcgtatagatcacaacgatcattcattcacatcagcgctgaacaccacaccacaacatcaacaccatggatttcttgaacaaggtcaccggagggtccaaggatgaggcgaagaaggaagaatctaaccagagcaatggaggtggcttcatggacaagatgaactcgatggcaggtggtggtaaggagagcgagaaaaacgaagatgctctagacaaaggagtcgattgggtgcaggagaatgttcttggccagggagaccagagcaatgagagcgcggccgagcaggccaaagatgaacaaatttcggacttcatccgcggccagtataaatcgtcaactggctcggacattccaattaaagataaggaacgcttctagactgagaaagtcttgacagaagtgcgaagataacttcgctaatctcgtttgttgctccatggttgaagaacaaggcgatatagcaatccatacaaatatgagatgctggccaggtgtcaatgatttgagcacccaaaatctcagactttgtaatctagtcctgtcgcgttcttaattgcaatgagaaatgacgaacccaagcctacaactgtagattttca

SEQ ID NO: 14229 - DNA, 1311 bp, Muscodor strobelii
  misc_feature: SGI cDNA ID NO. 564685
  misc_feature: Encodes the peptide sequence at SEQ ID NO 14230
atggcatcagacatgaccaacgcaccagcacgcacaaaagttgccgtcgttggtggtggaatagggggactttgcctcgcgatccacctcctacaatttactcacctcgacgtcgttatttacgaggccgctcacaaattttcggagattggtgcaggcgtggcttttggtccaaatgcggctcgggcaatgcgatgcatcagtcccggcatcgagcaagcttttctgagccaggttactacaaacggatcgccggaatctcagaacacttggtttaaattctactttggagagggcactcaatacggtcagctcatcggtgaggtgctcaatgagactggccaaaccacggtgcatcgtgccaagttcctcgacgaactcgtgaagcttattccaccaggaatcgctcattttggcaagcgtctggagcatcttgtcgagaccgaagacgacgttcaactgcattttcttgatggctctactgccacagcacaatgtgtcattggcgcggacggcgttcatagcgtcatacgcaagcaccttcttggggcagatcatccaaatacgaatgcagttttcacgggttctgtagcatttagaggtctagttccgatggacaaggctgtctcgtctattagcgaagaattcgcgcaaaattctgtcatctgggcaggcaagggaaagttcgttatgatctaccctattgatcatggaaccaccatgaatgttgtggccactaatagtgaggtttctgattggaatgggccctgggttcaaaaggtctcagttgaagatgtcaaatcccagttgaatgggcttggggagattcctcagaagatactcgctcttctagacccaaatgagacatctgcttggtcaatgtgggaccatccacccgcaccaacctatgcaaagggacggattgcgatgatgggtgatgcagcgcacgcttctaccccctttcagggtcaaggcgcgggccaagctatcgaagatgctcttgtcttaggtcatcagcttggtacgatgaggtccgaagccgatctaccattggctctgcaggcttatgatagggtccgtcgcccacgttcgcagcgcatctgtacaaccagtagagaggccggagagctggccgcgctcagacttccgggtgttggcgattcgaaagaagcatttcgtgagaatatagaatggcgtatggattggatctggcatcgcgatgtacaaaatgagtgcatcgaatcagatgtatatttcaagaagttacagagagattggcagagagaacagggtacaatggctagggagtag

SEQ ID NO: 14230 - protein, 436 aa, Muscodor strobelii
  misc_feature: SGI Peptide ID NO. 564685
  misc_feature (11)..(371): Pfam Id: PF01494 Pfam Desc: FAD binding domain
  misc_feature (11)..(435): NCBI GI: 115399700 Blast Desc: conserved [Aspergillus terreus NIH2624] gi|114191116|gb|EAU32816.1| conserved [Aspergillus terreus NIH2624]
  misc_feature (14)..(409): NCBI GI: 46137629 Blast Desc: FG10330.1 [Gibberella zeae PH-1]
  misc_feature (14)..(409): NCBI GI: 154319498 Blast Desc: BC1G_02230 [Botryotinia fuckeliana B05.10] gi|150855888|gb|EDN31080.1| BC1G_02230 [Botryotinia fuckeliana B05.10]
  misc_feature (14)..(408): NCBI GI: 156061635 Blast Desc: SS1G_02963 [Sclerotinia sclerotiorum 1980] gi|154700364|gb|EDO00103.1| SS1G_02963 [Sclerotinia sclerotiorum 1980]
  misc_feature (5)..(420): NCBI GI: 169624993 Blast Desc: mannitol 1-phosphate dehydrogenase [Phaeosphaeria nodorum SN15] gi|50841431|gb|AAT84078.1| mannitol 1-phosphate dehydrogenase [Phaeosphaeria nodorum] gi|111055738|gb|EAT76858.1|
  misc_feature (5)..(420): NCBI GI: 205364084 Blast Desc: mannitol 1-phosphate dehydrogenase 2 [Phaeosphaeria nodorum] gi|205364086|gb|ACI04507.1| mannitol 1-phosphate dehydrogenase 2 [Phaeosphaeria nodorum]
  misc_feature (38)..(423): NCBI GI: 119473825 Blast Desc: salicylate hydroxylase, [Neosartorya fischeri NRRL 181] gi|119406941|gb|EAW16891.1| salicylate hydroxylase, [Neosartorya fischeri NRRL 181]
  misc_feature (5)..(409): NCBI GI: 145251856 Blast Desc: An16g01280 [Aspergillus niger] gi|134082981|emb|CAK42745.1| protein product [Aspergillus niger]
  misc_feature (14)..(420): NCBI GI: 256723415 Blast Desc: NECHADRAFT_42151 [Nectria haematococca mpVI 77-13-4]
  misc_feature (14)..(420): NCBI GI: 256723382 Blast Desc: NECHADRAFT_98246 [Nectria haematococca mpVI 77-13-4]
  misc_feature (3)..(436): SWISSPROT Homolog: EC 1.14.13.1 Salicylate 1-monooxygenase
MASDMTNAPARTKVAVVGGGIGGLCLAIHLLQFTHLDVVIYEAAHKFSEIGAGVAFGPNAARAMRCISPGIEQAFLSQVTTNGSPESQNTWFKFYFGEGTQYGQLIGEVLNETGQTTVHRAKFLDELVKLIPPGIAHFGKRLEHLVETEDDVQLHFLDGSTATAQCVIGADGVHSVIRKHLLGADHPNTNAVFTGSVAFRGLVPMDKAVSSISEEFAQNSVIWAGKGKFVMIYPIDHGTTMNVVATNSEVSDWNGPWVQKVSVEDVKSQLNGLGEIPQKILALLDPNETSAWSMWDHPPAPTYAKGRIAMMGDAAHASTPFQGQGAGQAIEDALVLGHQLGTMRSEADLPLALQAYDRVRRPRSQRICTTSREAGELAALRLPGVGDSKEAFRENIEWRMDWIWHRDVQNECIESDVYFKKLQRDWQREQGTMARE

SEQ ID NO: 14231 - DNA, 1564 bp, Muscodor strobelii
  misc_feature: SGI EST ID NO. CUFF.33876.0
  misc_feature: Variant of the nucleotide sequence at SEQ ID NO 14229
ccagcacgcacaaaagttgccgtcgttggtggtggaatagggggactttgcctcgcgatccacctcctacaatttactcacctcgacgtcgttatttacgaggccgctcacaaattttcggagattggtgcaggcgtggcttttggtccaaatgcggctcgggcaatgcgatgcatcagtcccggcatcgagcaagcttttctgagccaggttactacaaacggatcgccggaatctcagaacacttggtttaaattctactttggagagggcactcaatacggtcagctcatcggtgaggtgctcaatgagactggccaaaccacggtgcatcgtgccaagttcctcgacgaactcgtgaagcttattccaccaggaatcgctcattttggcaagcgtctggagcatcttgtcgagaccgaagacgacgttcaactgcattttcttgatggctctactgccacagcacaatgtgtcattggcgcggacggcgttcatagcgtcatacgcaagcaccttcttggggcagatcatccaaatacgaatgcagttttcacgggttctgtagcatttagaggtctagttccgatggacaaggctgtctcgtctattagcgaagaattcgcgcaaaattctgtcatctgggcaggcaagggaaagttcgttatgatctaccctattgatcatggaaccaccatgaatgttgtggccactaatagtgaggtttctgattggaatgggccctgggttcaaaaggtctcagttgaagatgtcaaatcccagttgaatgggcttggggagattcctcagaagatactcgctcttctagacccaaatgagacatctgcttggtcaatgtgggaccatccacccgcaccaacctatgcaaagggacggattgcgatgatgggtgatgcagcgcacgcttctaccccctttcagggtcaaggcgcgggccaagctatcgaagatgctcttgtcttaggtcatcagcttggtacgatgaggtccgaagccgatctaccattggctctgcaggcttatgatagggtccgtcgcccacgttcgcagcgcatctgtacaaccagtagagaggccggagagctggccgcgctcagacttccgggtgttggcgattcgaaagaagcatttcgtgagaatatagaatggcgtatggattggatctggcatcgcgatgtacaaaatgagtgcatcgaatcagatgtatatttcaagaagttacagagagattggcagagagaacagggtacaatggctagggagtaggattaagaagggcttcgaagccacttagaattcatgattaaaattaaagtaaagatcttcagcaatacaaaaggagacaaccccagagcaaaagccctcacctatttgtatgtctacttgccctcctagcaagcttatcaagtgctgcaagcattccgatccggcggtcaatttccaggtctacagaggtttgaaaatctatttgaatatagtcgatatgttggcgattagagatcaacgcaagatgtttgggtgtggtagtggtagtatgggcggt

SEQ ID NO: 14232 - DNA, 1281 bp, Muscodor strobelii
  misc_feature: SGI cDNA ID NO. 564686
  misc_feature: Encodes the peptide sequence at SEQ ID NO 14233
atggcgacgcagtcttcttctctcatgccagtcaagtcggaatcttttccatctttggccgatatggcccagtcgctggactttgaggtgtctgtgatcaatggaaattcccaggactcggaaagatcggtcatcattagaagcccacagaagaatgcctctcggacactacccggagctcccaagctggtgtcacgagagtttcaggtgcctgcatccaaaagctttgcgttctcaatctctgatctctggcaacctgccaaaaaatcattgctcaattgggtcaacgaactgcctggtcctgccccgcgtcaggaacagacattcaaacccgctcattatcatgctctgaagcacaatctggataatcacaacgagaatgagggcaaggagagtcccacaggtgatgatcatcgtcacaagcgagccaagttctactcgtccactggcagccagccttcctctcgtcgccgcaagctagtaaagtccagccgtggcttggtgcgcagagtgtccaatgcctaccagcgtgttgtcacaccctcgcggcatgagcttctttccaatgactcgaagcgggagtcattcctttcctctcgcgccgatactcctgccccagagcctactccttcgccgggtaccccgagttttgctctcatcgagcgtcccaagatgcgattcgtatttgtcggagattcggcttgtggaaagtctagtatgctccttcgatactataacgattctttcaccctgctctacaagccgactaaatacgaactcttcagcaaagttattattgtgaacgaccaggagatggacctcgagctctgggacacctcaggtgacatcgagaaagagcaactctcgagactcaactatctcgcttgggatgctgtatttctttgtttcgatgtcgcaagcatgagatcttttcacagcgcccgttctcagtggcttggccaaattcgtgttcactgtcccgatgttcctatcatcttcgccgctctccagactgataaacgtgttggtcctggtttgtgggctccgctctaccctaaccttattactcgtgtcactgctactgagggcgctatgaccgccgatatgatcggcgccaacaagtatgtcgagtgttccgcacaaaccggccaaggcatcaacggtgtacttgaagaaggtgtgcgagccgtatttgagcgccgccgtatcaaggaggagaaagatacagacactcgagtcaatcgtcagagacgactgtcaggattgttttgcatgaaatga

SEQ ID NO: 14233 - protein, 426 aa, Muscodor strobelii
  misc_feature: SGI Peptide ID NO. 564686
  misc_feature (226)..(339): Pfam Id: PF08477 Pfam Desc: Miro-like protein
  misc_feature (226)..(399): Pfam Id: PF00071 Pfam Desc: Ras family
  misc_feature (226)..(279): Pfam Id: PF00071 Pfam Desc: Ras family
  misc_feature (297)..(399): Pfam Id: PF00071 Pfam Desc: Ras family
  misc_feature (225)..(407): NCBI GI: 12842616 Blast Desc: protein product [Mus musculus]
  misc_feature (225)..(398): NCBI GI: 256032286 Blast Desc: protein product [Mus musculus]
  misc_feature (225)..(398): NCBI GI: 256032285 Blast Desc: protein product [Mus musculus]
  misc_feature (225)..(398): NCBI GI: 256032284 Blast Desc: protein product [Mus musculus]
  misc_feature (224)..(407): NCBI GI: 268577925 Blast Desc: C. briggsae CBR-MIG-2 protein [Caenorhabditis briggsae] gi|187025806|emb|CAP35003.1| C. briggsae CBR-MIG-2 protein [Caenorhabditis briggsae]
  misc_feature (224)..(410): NCBI GI: 17569065 Blast Desc: abnormal cell MIGration family member (mig-2) [Caenorhabditis elegans] gi|1813700|gb|AAC47729.1| Rac-like GTPase [Caenorhabditis elegans] gi|3874771|emb|CAB01691.1| C. by
  misc_feature (225)..(407): NCBI GI: 26344958 Blast Desc: protein product [Mus musculus]
  misc_feature (225)..(401): NCBI GI: 260789435 Blast Desc: BRAFLDRAFT_128400 [Branchiostoma floridae] gi|229274934|gb|EEN45763.1| BRAFLDRAFT_128400 [Branchiostoma floridae]
  misc_feature (225)..(407): NCBI GI: 209155118 Blast Desc: Ras-related C3 botulinum toxin substrate 1 precursor [Salmo salar] gi|221220518|gb|ACM08920.1| Ras-related C3 botulinum toxin substrate 1 precursor [Salmo salar] Ras-related 1
  misc_feature (225)..(407): NCBI GI: 15826630 Blast Desc: Ras-related C3 botulinum toxin substrate 1 precursor [Salmo salar] gi|221220518|gb|ACM08920.1| Ras-related C3 botulinum toxin substrate 1 precursor [Salmo salar] Ras-related 1
MATQSSSLMPVKSESFPSLADMAQSLDFEVSVINGNSQDSERSVIIRSPQKNASRTLPGAPKLVSREFQVPASKSFAFSISDLWQPAKKSLLNWVNELPGPAPRQEQTFKPAHYHALKHNLDNHNENEGKESPTGDDHRHKRAKFYSSTGSQPSSRRRKLVKSSRGLVRRVSNAYQRVVTPSRHELLSNDSKRESFLSSRADTPAPEPTPSPGTPSFALIERPKMRFVFVGDSACGKSSMLLRYYNDSFTLLYKPTKYELFSKVIIVNDQEMDLELWDTSGDIEKEQLSRLNYLAWDAVFLCFDVASMRSFHSARSQWLGQIRVHCPDVPIIFAALQTDKRVGPGLWAPLYPNLITRVTATEGAMTADMIGANKYVECSAQTGQGINGVLEEGVRAVFERRRIKEEKDTDTRVNRQRRLSGLFCMK

SEQ ID NO: 14234 - DNA, 939 bp, Muscodor strobelii
  misc_feature: SGI cDNA ID NO. 564687
  misc_feature: Encodes the peptide sequence at SEQ ID NO 14235
atgtcggcgcctgccatggcaacgtatcaacaacttcaacgtgatccgaattctcgtgttcttttcagcaacaggattacaacaatgggccacttgtgtcaggttatccttggaggcagctctgcctttatcgcaatcgacaccgagcacgtagccgtcaaaagcacaagtgatcggatacttcatcaagtcggccttgcgtatcttccagctacgtctgtgcccatgatgatagatacctccagttccagtagaccgcggcttgccgactttcacgacaattaccaggttcgatgtttaaccctcaacatagaaataagcgaccagacgagagaggatctgatccgtattcgaggccaagttccaaaacgccgcccgagccgtttcggccatgtacgacgagtcactcttgatagcttagaatccgcgattatcgaatttgtccaatcctgtagtacagagttggttcttattggatttgagatggctgccgagtggaattatctatcgaggaacttcccaaaggctattccgtatttctcatcctggatggacgtgcgtgacgttgggaaagacataacctcagccaaacgtttaccgggacgggtctccatgctcgaaaccttggggtattactggaaagatattagaggcaagcatggccagggtaacgctgacaatgctggagacgatgccgtatcgactttggctacggcaaatgctttcttttaccctcaaaaccgcgagaagttgcgcagccgtatggcccgagaaaacctagagaatctagcggccagcaaaagggtcgcccttttcaagcgtgcacaaaacaccgattctgaagagaagcggcgattaagatatctcaagatgatagagcccccaggtacccgcgagtttgttgacttagggggcacatttatcgacgacatgacgtaa

SEQ ID NO: 14235 - protein, 312 aa, Muscodor strobelii
  misc_feature: SGI Peptide ID NO. 564687
  misc_feature (16)..(226): NCBI GI: 169597907 Blast Desc: SNOG_01746 [Phaeosphaeria nodorum SN15] gi|160707616|gb|EAT91395.2| SNOG_01746 [Phaeosphaeria nodorum SN15]
MSAPAMATYQQLQRDPNSRVLFSNRITTMGHLCQVILGGSSAFIAIDTEHVAVKSTSDRILHQVGLAYLPATSVPMMIDTSSSSRPRLADFHDNYQVRCLTLNIEISDQTREDLIRIRGQVPKRRPSRFGHVRRVTLDSLESAIIEFVQSCSTELVLIGFEMAAEWNYLSRNFPKAIPYFSSWMDVRDVGKDITSAKRLPGRVSMLETLGYYWKDIRGKHGQGNADNAGDDAVSTLATANAFFYPQNREKLRSRMARENLENLAASKRVALFKRAQNTDSEEKRRLRYLKMIEPPGTREFVDLGGTFIDDMT

SEQ ID NO: 14236 - DNA, 1554 bp, Muscodor strobelii
  misc_feature: SGI EST ID NO. CUFF.33897.0
  misc_feature: Variant of the nucleotide sequence at SEQ ID NO 14234
ggggtaggacagaggtacttatcaggaaaccctcattttcgatcgccaacaacgtgtctgcacctaatcaaaacgacgcccgcaatttggcttaccaatcatcaaaaacggtacatgaggtgcatcaatgcccgtcggattcgatacatccgcgccaccacaacgagaacatcttgtaagaattgttcaagtaccttatttcgctgctctgaaatagtcataaacgaaaaacaacttatagaaacgaacagcctcttttcgtctccgacctggttctcgagcctccccgctagattcttgataagcaaacacctcaacacagccagctcgttgacatctacacgttgcagctgacaaggcaaaaatagctagccaacattgtcgctcgcacactatgtcggcgcctgccatggcaacgtatcaacaacttcaacgtgatccgaattctcgtgttcttttcagcaacaggattacaacaatgggccacttgtgtcaggttatccttggaggcagctctgcctttatcgcaatcgacaccgagcacgtagccgtcaaaagcacaagtgatcggatacttcatcaagtcggccttgcgtatcttccagctacgtctgtgcccatgatgatagatacctccagttccagtagaccgcggcttgccgactttcacgacaattaccaggttcgatgtttaaccctcaacatagaaataagcgaccagacgagagaggatctgatccgtattcgaggccaagttccaaaacgccgcccgagccgtttcggccatgtacgacgagtcactcttgatagcttagaatccgcgattatcgaatttgtccaatcctgtagtacagagttggttcttattggatttgagatggctgccgagtggaattatctatcgaggaacttcccaaaggctattccgtatttctcatcctggatggacgtgcgtgacgttgggaaagacataacctcagccaaacgtttaccgggacgggtctccatgctcgaaaccttggggtattactggaaagatattagaggcaagcatggccagggtaacgctgacaatgctggagacgatgccgtatcgactttggctacggcaaatgctttcttttaccctcaaaaccgcgagaagttgcgcagccgtatggcccgagaaaacctagagaatctagcggccagcaaaagggtcgcccttttcaagcgtgcacaaaacaccgattctgaagagaagcggcgattaagatatctcaagatgatagagcccccaggtacccgcgagtttgttgacttagggggcacatttatcgacgacatgacgtaaagcatactctgcgatgagtccagcattctccggtccgacggatctcacggccccggtatgcgccctagtctatactttatggtacagtattttgttaggtgccggaccaacgtcgagtatcgccaagagatcgctactgcactggcgttcggctcgttggatagagaattaaaagaacaaaacggatcaccgagtaataaaataaataaaattggtaaaac

SEQ ID NO: 14237 - DNA, 972 bp, Muscodor strobelii
  misc_feature: SGI cDNA ID NO. 564688
  misc_feature: Encodes the peptide sequence at SEQ ID NO 14238
atgaccgatcccgaacatttcccttggaaagcaacatctcaatgggccaagctcaaggcacagttacatcgctggagagaagatcaggatccgagaatgagatatcctgagactaagatcgcaactcacgcgcatttccgccaaggcgaggtatttgcgtacatcaacttactttactatctcaatataactttcttctgtagagaatacattcctcttctgccgataggcgagaaagggccgcgagggccaatcgatccgcctttctttcctgaaggcgctgcacctcccggttggtggcgacagaatgcagaagagctatttgatgccgcggttcaaatatcatatattatgcgagatctgaacagccttggggtatactcgctaatatctcgtagcattacacttcacacgcctttcactggactctgtgtcttctccgcagcgcttctcaatggctatgctgtggcattcccaaatttcgttgggccccaggaacaagcgctacggaagcaactagcggctgagaacttgggtgatcttgagaagattgcaaagctatggaagctcggagaagagtggtcgcaggtcatcaaaacggcggacaacttgtatgagcgagtaaagaacaaccaagcaaccagctcttcccgcgaagactaccttgaccttgaaagaagtgtacactatgcaccaatcggcggcatgtacggagacagacttggggggcaaactaggaacccagtcacaatatcaattcgtgcattaacaacgccgacgcggaaccagcaacgcacgacacgagcagcgctcgacgtggaaacgaatgtccagcaaccccgattggatgatcaagtatcgaatcccttcgcaggtttcgatgccgatgtcgcaagcgacgactggaggctctggtctttttgggatgatcctcaccttctgtcctgggacgctacgacgatgggtgtctaa

SEQ ID NO: 14238 - protein, 323 aa, Muscodor strobelii
  misc_feature: SGI Peptide ID NO. 564688
  misc_feature (1)..(322): NCBI GI: 256734947 Blast Desc: NECHADRAFT_75718 [Nectria haematococca mpVI 77-13-4]
  misc_feature (1)..(315): NCBI GI: 46138037 Blast Desc: FG10533.1 [Gibberella zeae PH-1]
  misc_feature (1)..(229): NCBI GI: 256732357 Blast Desc: NECHADRAFT_80850 [Nectria haematococca mpVI 77-13-4]
  misc_feature (8)..(316): NCBI GI: 212536642 Blast Desc: fungal specific transcription factor, [Penicillium marneffei ATCC 18224] gi|210070876|gb|EEA24966.1| fungal specific transcription factor, [Penicillium marneffei ATCC 18224]
  misc_feature (1)..(197): NCBI GI: 46105152 Blast Desc: FG00204.1 [Gibberella zeae PH-1]
  misc_feature (1)..(229): NCBI GI: 261360958 Blast Desc: conserved [Verticillium albo-atrum VaMs.102]
  misc_feature (5)..(316): NCBI GI: 242796302 Blast Desc: fungal specific transcription factor, [Talaromyces stipitatus ATCC 10500] gi|218719358|gb|EED18778.1| fungal specific transcription factor, [Talaromyces stipitatus ATCC
  misc_feature (8)..(284): NCBI GI: 169765982 Blast Desc: [Aspergillus oryzae RIB40] gi|83765317|dbj|BAE55460.1| protein product [Aspergillus oryzae]
  misc_feature (74)..(229): NCBI GI: 238500614 Blast Desc: AFLA_123470 [Aspergillus flavus NRRL3357] gi|220691778|gb|EED48125.1| AFLA_123470 [Aspergillus flavus NRRL3357]
  misc_feature (15)..(266): NCBI GI: 255947776 Blast Desc: Pc22g06240 [Penicillium chrysogenum Wisconsin 54-1255] gi|211591672|emb|CAP97912.1| Pc22g06240 [Penicillium chrysogenum Wisconsin 54-1255]
MTDPEHFPWKATSQWAKLKAQLHRWREDQDPRMRYPETKIATHAHFRQGEVFAYINLLYYLNITFFCREYIPLLPIGEKGPRGPIDPPFFPEGAAPPGWWRQNAEELFDAAVQISYIMRDLNSLGVYSLISRSITLHTPFTGLCVFSAALLNGYAVAFPNFVGPQEQALRKQLAAENLGDLEKIAKLWKLGEEWSQVIKTADNLYERVKNNQATSSSREDYLDLERSVHYAPIGGMYGDRLGGQTRNPVTISIRALTTPTRNQQRTTRAALDVETNVQQPRLDDQVSNPFAGFDADVASDDWRLWSFWDDPHLLSWDATTMGV

SEQ ID NO: 14239 - DNA, 1015 bp, Muscodor strobelii
  misc_feature: SGI EST ID NO. CUFF.33936.0
  misc_feature: Variant of the nucleotide sequence at SEQ ID NO 14237
cccccagcaagaccttgttacatattctataccggaggaggctgtgtggtaaccagactcgctaatatctcgtagcattacacttcacacgcctttcactggactctgtgtcttctccgcagcgcttctcaatggctatgctgtggcattcccaaatttcgttgggccccaggaacaagcgctacggaagcaactagcggctgagaacttgggtgatcttgagaagattgcaaagctatggaagctcggagaagagtggtcgcaggtcatcaaaacggcggacaacttgtatgagcgagtaaagaacaaccaagcaaccagctcttcccgcgaagactaccttgaccttgaaagaagtgtacactatgcaccaatcggcggcatgtacggagacagacttggggggcaaactaggaacccagtcacaatatcaattcgtgcattaacaacgccgacgcggaaccagcaacgcacgacacgagcagcgctcgacgtggaaacgaatgtccagcaaccccgattggatgatcaagtatcgaatcccttcgcaggtttcgatgccgatgtcgcaagcgacgactggaggctctggtctttttgggatgatcctcaccttctgtcctgggacgctacgacgatgggtgtctaagagaccaaaaaggaatgagaactcacatcgactcgttcgtcacattaacgaaattttgaagatcacactgcacgtcagctcgacccagatactagcttgggtaggtcatgacaaggcataaacattgagattgatgcacgtcaaacgagactttgccactgccttcaaacggtggtctcttgctgtaaagggtgaccgatagaataacaacttgcctgattgagcttattggctctcgagaaggaatcgcgagtgtggccgagctaacaccgcagccacgattgaagaaatctacaataacatttcagatatgacgttggcatacttagattaatgttgatgaacgatgaaccacccaggttgttt

SEQ ID NO: 14240 - DNA, 1527 bp, Muscodor strobelii
  misc_feature: SGI cDNA ID NO. 564689
  misc_feature: Encodes the peptide sequence at SEQ ID NO 14241
atgacccaagaacttcagtgtcgcgtcacggctccacccactctcagcatcgttcaatgctttctcatcgcggcactctacgaatggggtgaaggcataggatacagtgcttggatgcatgctggaacagcagctcgcatggcacaggtataccgagctatgaaagttgacgcgcaaagcaggcccgatccaaggtcgacttcaatatcgaaccagccgacattgactgaagtagaagtgcgaaccatgtggacatattttagtgtagataagcttctaagctgcgggaaacaacgtccggctatgatgaaaatggaggatatggacgttaggatcccacaaagtgaagaagactttgttttcgggacagagccccgtaagtatcaattcggtgtgcgtcgtacaattctttgcttcgatgatgtgatagatagcgagaatcttcgcaagcggatatcaacttctggctttcatttctgcatacttctacgaggcttagatatctggcacaagatacatagctggatcgtagaaggcgggagaaggctgcctaaaatgaccgatcccgaacatttcccttggaaagcaacatctcaatgggccaagctcaaggcacagttacatcgctggagagaagatcaggatccgagaatgagatatcctgagactaagatcgcaactcacgcgcatttccgccaaggcgaggtatttgcgtacatcaacttactttactatctcaatataactttcttctgtagagaatacattcctcttctgccgataggcgagaaagggccgcgagggccaatcgatccgcctttctttcctgaaggcgctgcacctcccggttggtggcgacagaatgcagaagagctatttgatgccgcggttcaaatatcatatattatgcgagatctgaacagccttggggtatactcgctaatatctcgtagcattacacttcacacgcctttcactggactctgtgtcttctccgcagcgcttctcaatggctatgctgtggcattcccaaatttcgttgggccccaggaacaagcgctacggaagcaactagcggctgagaacttgggtgatcttgagaagattgcaaagctatggaagctcggagaagagtggtcgcaggtcatcaaaacggcggacaacttgtatgagcgagtaaagaacaaccaagcaaccagctcttcccgcgaagactaccttgaccttgaaagaagtgtacactatgcaccaatcggcggcatgtacggagacagacttggggggcaaactaggaacccagtcacaatatcaattcgtgcattaacaacgccgacgcggaaccagcaacgcacgacacgagcagcgctcgacgtggaaacgaatgtccagcaaccccgattggatgatcaagtatcgaatcccttcgcaggtttcgatgccgatgtcgcaagcgacgactggaggctctggtctttttgggatgatcctcaccttctgtcctgggacgctacgacgatgggtgtctaa

SEQ ID NO: 14241 - protein, 508 aa, Muscodor strobelii
  misc_feature: SGI Peptide ID NO. 564689
  misc_feature (1)..(507): NCBI GI: 256734947 Blast Desc: NECHADRAFT_75718 [Nectria haematococca mpVI 77-13-4]
  misc_feature (4)..(500): NCBI GI: 46138037 Blast Desc: FG10533.1 [Gibberella zeae PH-1]
  misc_feature (18)..(501): NCBI GI: 212536642 Blast Desc: fungal specific transcription factor, [Penicillium marneffei ATCC 18224] gi|210070876|gb|EEA24966.1| fungal specific transcription factor, [Penicillium marneffei ATCC 18224]
  misc_feature (15)..(501): NCBI GI: 242796302 Blast Desc: fungal specific transcription factor, [Talaromyces stipitatus ATCC 10500] gi|218719358|gb|EED18778.1| fungal specific transcription factor, [Talaromyces stipitatus ATCC
  misc_feature (9)..(414): NCBI GI: 256732357 Blast Desc: NECHADRAFT_80850 [Nectria haematococca mpVI 77-13-4]
  misc_feature (9)..(382): NCBI GI: 46105152 Blast Desc: FG00204.1 [Gibberella zeae PH-1]
  misc_feature (9)..(414): NCBI GI: 261360958 Blast Desc: conserved [Verticillium albo-atrum VaMs.102]
  misc_feature (44)..(469): NCBI GI: 169765982 Blast Desc: [Aspergillus oryzae RIB40] gi|83765317|dbj|BAE55460.1| protein product [Aspergillus oryzae]
  misc_feature (3)..(451): NCBI GI: 255947776 Blast Desc: Pc22g06240 [Penicillium chrysogenum Wisconsin 54-1255] gi|211591672|emb|CAP97912.1| Pc22g06240 [Penicillium chrysogenum Wisconsin 54-1255]
  misc_feature (3)..(397): NCBI GI: 159123376 Blast Desc: fungal specific transcription factor, [Aspergillus fumigatus A1163]
MTQELQCRVTAPPTLSIVQCFLIAALYEWGEGIGYSAWMHAGTAARMAQVYRAMKVDAQSRPDPRSTSISNQPTLTEVEVRTMWTYFSVDKLLSCGKQRPAMMKMEDMDVRIPQSEEDFVFGTEPRKYQFGVRRTILCFDDVIDSENLRKRISTSGFHFCILLRGLDIWHKIHSWIVEGGRRLPKMTDPEHFPWKATSQWAKLKAQLHRWREDQDPRMRYPETKIATHAHFRQGEVFAYINLLYYLNITFFCREYIPLLPIGEKGPRGPIDPPFFPEGAAPPGWWRQNAEELFDAAVQISYIMRDLNSLGVYSLISRSITLHTPFTGLCVFSAALLNGYAVAFPNFVGPQEQALRKQLAAENLGDLEKIAKLWKLGEEWSQVIKTADNLYERVKNNQATSSSREDYLDLERSVHYAPIGGMYGDRLGGQTRNPVTISIRALTTPTRNQQRTTRAALDVETNVQQPRLDDQVSNPFAGFDADVASDDWRLWSFWDDPHLLSWDATTMGV

SEQ ID NO: 14242 - DNA, 1565 bp, Muscodor strobelii
  misc_feature: SGI EST ID NO. CUFF.33933.0
  misc_feature: Variant of the nucleotide sequence at SEQ ID NO 14240
tttgaaaggatgcggacagcagtagcctgcgagaggtgtaggtatggagttcccttccagctgtagtgtgtttccaaaccagaggcattcccgactttgtccgtcggcgacatgactaaattggttgtctgaaggaagtcaaagatcaagtgtcatcacactggagaagcgccgtgccgtagctgctcgaggagtggcaactctgagacatgctatctcaccgcaactgtggtcacttctcggtctgcgcgctttgtgagaaagcgacagtcatcttcgacatctgctcgaactacgccgaagtcgggagcttcaagtactgtaacccaggcagatcctaaggaccaaagtataagtatccactacagtagtattgatcctactctgttcacacgagctatcactattttccgatcacagtttcccgaatatgggtttctttccccgtccgatctcgagccagtctccggggacatatctgatgatgacaagctcaaacttatttccatccttgccgttagctgtagataccttggcgaagatgcagattcgcgtcgaagcgagcacgctgcggtgatgacccaagaacttcagtgtcgcgtcacggctccacccactctcagcatcgttcaatgctttctcatcgcggcactctacgaatggggtgaaggcataggatacagtgcttggatgcatgctggaacagcagctcgcatggcacaggtataccgagctatgaaagttgacgcgcaaagcaggcccgatccaaggtcgacttcaatatcgaaccagccgacattgactgaagtagaagtgcgaaccatgtggacatattttagtgtagataagcttctaagctgcgggaaacaacgtccggctatgatgaaaatggaggatatggacgttaggatcccacaaagtgaagaagactttgttttcgggacagagccccgtaagtatcaattcggtgtgcgtcgttactcaaagggcatcattacagtggtgggatgttcaaaatcgtaatgattcaaggaaagtgctgaacataataggtacaattctttgcttcgatgatgtgatagatagcgagaatcttcgcaagcggatatcaacttctggctttcatttctgcatacttctacgaggcttagatatctggcacaagatacatagctggatcgtagaaggcgggagaaggctgcctaaaatgaccgatcccgaacatttcccttggaaagcaacatctcaatgggccaagctcaaggcacagttacatcgctggagagaagatcaggatccgagaatgagatatcctgagactaagatcgcaactcacgcgcatttccgccaaggcgaggtatttgcgtacatcaacttactttactatctcaatataactttcttctgtagagaatacattcctcttctgccgataggcgagaaagggccgcgagggccaatcgatccgcctttctttcctgaaggcgctgcacctcccggttggtggcgacagaatgcagaagagctatttgatgccgcggttcaaatatcatatattatgcgag

SEQ ID NO: 14243 - DNA, 864 bp, Muscodor strobelii
  misc_feature: SGI cDNA ID NO. 564690
  misc_feature: Encodes the peptide sequence at SEQ ID NO 14244
atgactttctttgcgacagcttcacgatcttcagctctgcgaaacacaaaatttgcatcgtttgcccgaactcttgcaccatcacgcaccatgcatattcagtcaattcctatgtggacggggagtagtgacaactacgcatatcttgttgttgacgacaagtccaaggatgccgttgtcatcgatcccgcacatcctgaggaagttgcacctgtcttgaaagacgctatccaggccggcaagatcaacctaaaagctatcgtcaatacccatcaccattgggatcactctggagggaacaaaaagctactaggcgagctgggcaacccagatctacctatcattggcggagaaaaatgcgaggccgttaccaagacaccaggcaatggtgaagcatggagtatcggaagcatagcagtaaagggcttgtacacgccttgtcatactcaagacagcatctgctggtttatgcaggatggcgaagacaaggtcgtctttactggagatacgctcttccacggtggttgtggaaagttcttcgaaggaactgcagacgagatgcacacagcactgaataagacccttgcctcgctaccagacgataccaaggtttaccccggccatgaatacacaaaatcaaatgttaaattcgccgtctcagttctgcagaatacggcaatccaaaagttgcagtcttttgctgatagtaacaaggagactcaaggaaagttcacaattggcgatgagaagcaacataatgtattcatgcgggtagatgatcctgagattcaaaagactaccggtaagacggatccagtagaggtcatggcggctctgcgagagatgaagaataacttcaagtga

SEQ ID NO: 14244 - protein, 287 aa, Muscodor strobelii
  misc_feature: SGI Peptide ID NO. 564690
  misc_feature (44)..(208): Pfam Id: PF00753 Pfam Desc: Metallo-beta-lactamase superfamily
  misc_feature (24)..(287): NCBI GI: 145612201 Blast Desc: hydroxyacylglutathione hydrolase, [Magnaporthe grisea 70-15] gi|145019407|gb|EDK03635.1| hydroxyacylglutathione hydrolase, [Magnaporthe grisea 70-15]
  misc_feature (31)..(287): NCBI GI: 164426873 Blast Desc: NCU03749 [Neurospora crassa OR74A] gi|157071512|gb|EAA31860.2| NCU03749 [Neurospora crassa OR74A]
  misc_feature (13)..(287): NCBI GI: 156064565 Blast Desc: SS1G_00290 [Sclerotinia sclerotiorum 1980] gi|154691152|gb|EDN90890.1| SS1G_00290 [Sclerotinia sclerotiorum 1980]
  misc_feature (31)..(287): NCBI GI: 12718326 Blast Desc: hydroxyacylglutathione hydrolase [Neurospora crassa]
  misc_feature (31)..(287): NCBI GI: 256731323 Blast Desc: NECHADRAFT_84686 [Nectria haematococca mpVI 77-13-4]
  misc_feature (31)..(284): NCBI GI: 169779315 Blast Desc: [Aspergillus oryzae RIB40] gi|238499953|ref|XP_002381211.1| hydroxyacylglutathione hydrolase, [Aspergillus flavus NRRL3357] protein product oryzae]
  misc_feature (13)..(286): NCBI GI: 255954291 Blast Desc: Pc21g08590 [Penicillium chrysogenum Wisconsin 54-1255] gi|211589609|emb|CAP95756.1| Pc21g08590 [Penicillium chrysogenum Wisconsin 54-1255]
  misc_feature (31)..(284): NCBI GI: 119478654 Blast Desc: hydroxyacylglutathione hydrolase, [Neosartorya fischeri NRRL 181] gi|119407563|gb|EAW17512.1| hydroxyacylglutathione hydrolase, [Neosartorya fischeri NRRL 181]
  misc_feature (29)..(286): NCBI GI: 145249836 Blast Desc: An14g06340 [Aspergillus niger] gi|134081941|emb|CAK97207.1| protein product [Aspergillus niger]
  misc_feature (31)..(284): NCBI GI: 121713910 Blast Desc: hydroxyacylglutathione hydrolase, [Aspergillus clavatus NRRL 1] gi|119402719|gb|EAW13140.1| hydroxyacylglutathione hydrolase, [Aspergillus clavatus NRRL 1]
  misc_feature (30)..(284): SWISSPROT Homolog: EC 3.1.2.6 Hydroxyacylglutathione hydrolase
MTFFATASRSSALRNTKFASFARTLAPSRTMHIQSIPMWTGSSDNYAYLVVDDKSKDAVVIDPAHPEEVAPVLKDAIQAGKINLKAIVNTHHHWDHSGGNKKLLGELGNPDLPIIGGEKCEAVTKTPGNGEAWSIGSIAVKGLYTPCHTQDSICWFMQDGEDKVVFTGDTLFHGGCGKFFEGTADEMHTALNKTLASLPDDTKVYPGHEYTKSNVKFAVSVLQNTAIQKLQSFADSNKETQGKFTIGDEKQHNVFMRVDDPEIQKTTGKTDPVEVMAALREMKNNFK

SEQ ID NO: 14245 - DNA, 1299 bp, Muscodor strobelii
  misc_feature: SGI EST ID NO. CUFF.34063.3
  misc_feature: Variant of the nucleotide sequence at SEQ ID NO 14243
cgggtcaatcgcattgcattgcatagaatacgtacctcgcgtccaatcgtctcatgagacagcgcccatttgtaagcgaaagtgaagcactcaaccagcatttactcgacgagtcgagcgatttggaacgctcctcatgactttctttgcgacagcttcacgatcttcagctctgcgaaacacaaaatttgcatcgtttgcccgaactcttgcaccatcacgcaccatgcatattcagtcaattcctatgtggacggggagtagtgacaactacgcatatcttgttgttgacgacaagtccaaggatgccgttgtcatcgatcccgcacatcctgaggaagttgcacctgtcttgaaagacgctatccaggccggcaagatcaacctaaaagctatcgtcaatacccatcaccattgggatcactctggagggaacaaaaagctactaggcgagctgggcaacccagatctacctatcattggcggagaaaaatgcgaggccgttaccaagacaccaggcaatggtgaagcatggagtatcggaagcatagcagtaaagggcttgtacacgccttgtcatactcaagacagcatctgctggtttatgcaggatggcgaagacaaggtcgtctttactggagatacgctcttccacggtggttgtggaaagttcttcgaaggaactgcagacgagatgcacacagcactgaataagacccttgcctcgctaccagacgataccaaggtttaccccggccatgaatacacaaaatcaaatgttaaattcgccgtctcagttctgcagaatacggcaatccaaaagttgcagtcttttgctgatagtaacaaggagactcaaggaaagttcacaattggcgatgagaagcaacataatgtattcatgcgggtagatgatcctgagattcaaaagactaccggtaagacggatccagtagaggtcatggcggctctgcgagagatgaagaataacttcaagtgagccaccttcggggagcaaaatgtgaataagatggacaacgaataaatgtgacccacagttccaagcataccgtgaatagggacagccagtatacttatgaactgttcgcaaatccacggtaagaggggagaagtaactttcccatatattcaggggtgactcaagccttatatgtggcttgataggcgagacagatcctcgattgtggtcaattaatgaacctttcagttccatacctcaacagaagcttttgaaagtcccattttaaggtctatcctaaatatgaacctatgttaatc

SEQ ID NO: 14246 - DNA, 1050 bp, Muscodor strobelii
  misc_feature: SGI cDNA ID NO. 564691
  misc_feature: Encodes the peptide sequence at SEQ ID NO 14247
atggttcagtatatccacactccctggcgggaccgggacgagctattacgagtccgtcagcaattttaccctcaagcaagcaccgccaagacgtgcatagagcatgcaccattcgcagctgacggcagaccggatgcgcaagctgtagaagccgaaaagcaacagaggcaggccgtcacacgcgtctccatgtggatgcatcgcggcgactgcccccacttaatcgaggcaacggccttcctcaccgatgccttcctcggcgatgtccacgagaccaggacaagggactactcaaacttcctatctgtccgcttggcctatgctgctgccttcagtcgctttgtcactggcctacttgacagtcagcaagacaaattccgcaagcaaggcatgtacacgatagctaagaacatcggattaccggcaacgttcgtggagcttagacatcgtgcgacccacgagccactcccttcgttgaagaacctgcgaagtggcacacaaaatgcccttgcgtggatttatgacttttactggaaggacataagtccgtcaagcccgtcaagtaggatggctcatgaacttcaaaataacatggcctgtggtccccgaaaagcggtaatgattagatatctcattgaacaggatgaagcgatcagaaaggacttgcaagaacgatgggattcttgggacaaagagactttaatgctaacactgcaagatattgcacattcatctcaagactctacgatgcagctcaaagccttgcggcttttaggggaagttctagaaggaacagcgcccgtgtcggcacagaaccaggccgttactagtcgagacagcgggatgatagggagcatagatgcgattcgagctgaactcgagacgttaaagaatgacttggaccgatccgatttccccaattcagatggcgacgatgtggcaaacgcaatgccaggagacccgcctcctccagcatcttcttggacggctaactggactcggtattcagggtcatggacaactcgacctataggtgaagtttacagataa

SEQ ID NO: 14247 - protein, 349 aa, Muscodor strobelii
  misc_feature: SGI Peptide ID NO. 564691
  misc_feature (6)..(181): Pfam Id: PF04031 Pfam Desc: Las1-like
  misc_feature (1)..(348): NCBI GI: 46125539 Blast Desc: FG07147.1 [Gibberella zeae PH-1]
  misc_feature (1)..(345): NCBI GI: 156059116 Blast Desc: SS1G_03570 [Sclerotinia sclerotiorum 1980] gi|154701357|gb|EDO01096.1| SS1G_03570 [Sclerotinia sclerotiorum 1980]
  misc_feature (1)..(347): NCBI GI: 261355680 Blast Desc: conserved [Verticillium albo-atrum VaMs.102]
  misc_feature (1)..(182): NCBI GI: 154304256 Blast Desc: BC1G_08398 [Botryotinia fuckeliana B05.10] gi|150854200|gb|EDN29392.1| BC1G_08398 [Botryotinia fuckeliana B05.10]
  misc_feature (1)..(181): NCBI GI: 164426871 Blast Desc: NCU11261 [Neurospora crassa OR74A] gi|157071511|gb|EDO65258.1| [Neurospora crassa OR74A]
  misc_feature (1)..(181): NCBI GI: 12718327 Blast Desc: related to LAS1 protein [Neurospora crassa]
  misc_feature (1)..(179): NCBI GI: 116206500 Blast Desc: CHGG_02543 [Chaetomium globosum CBS 148.51] gi|88183140|gb|EAQ90608.1| CHGG_02543 [Chaetomium globosum CBS 148.51]
  misc_feature (1)..(178): NCBI GI: 115387325 Blast Desc: ATEG_01990 [Aspergillus terreus NIH2624] gi|114195252|gb|EAU36952.1| ATEG_01990 [Aspergillus terreus NIH2624]
  misc_feature (1)..(178): NCBI GI: 145249838 Blast Desc: An14g06350 [Aspergillus niger] gi|134081942|emb|CAK97208.1| protein product [Aspergillus niger]
  misc_feature (1)..(178): NCBI GI: 119478652 Blast Desc: NFIA_074310 [Neosartorya fischeri NRRL 181] gi|119407562|gb|EAW17511.1| conserved [Neosartorya fischeri NRRL 181]
MVQYIHTPWRDRDELLRVRQQFYPQASTAKTCIEHAPFAADGRPDAQAVEAEKQQRQAVTRVSMWMHRGDCPHLIEATAFLTDAFLGDVHETRTRDYSNFLSVRLAYAAAFSRFVTGLLDSQQDKFRKQGMYTIAKNIGLPATFVELRHRATHEPLPSLKNLRSGTQNALAWIYDFYWKDISPSSPSSRMAHELQNNMACGPRKAVMIRYLIEQDEAIRKDLQERWDSWDKETLMLTLQDIAHSSQDSTMQLKALRLLGEVLEGTAPVSAQNQAVTSRDSGMIGSIDAIRAELETLKNDLDRSDFPNSDGDDVANAMPGDPPPPASSWTANWTRYSGSWTTRPIGEVYR

SEQ ID NO: 14248 - DNA, 2971 bp, Muscodor strobelii
  misc_feature: SGI EST ID NO. CUFF.33999.1
  misc_feature: Variant of the nucleotide sequence at SEQ ID NO 14246
attcaatccagcagtcgcgatcaatagatacacgtatatttttcagagcgaaaattcggactaccccgtatgcacatgcctgatcgagtttgtagttggcaaattcttcaagtccaaagcaaggactgtatggcaagctgcggtcgctcgtaggcgccgcacctactgatggtgtatggccagtgatgatgtatggagtagatctctgcgaacttccacaagtgaagtcaaggtctctctctacctttgacttggtagacctgccgcataaaatatatcaatgacgatcgtatttatcggcatttgatcagccactgctcacccaccaaggccagacaagcgaccgtatgcagtttggtattaagtcaaatgtggtgcgcataatgctggcattacacttttcaccgctcgcggttgcacctacctcctacgtatttactgtcggaatcacatttcctacatcttattggtattttaagcatactccctgctttgcacttactcatagcgtagagaacgttccatcgtctcaagctagatcagtactatgatgccagaggacagtacttgcagactctattgactgctgacataactgttcatatctcggaaggccaagcctacactgcgttgtccttgtttatggaagatcaggatcaagacgcagcaaaactgacctcagcttaaagtaggtaaagcgatcgacggtcttgtgatataaaatcagagattcgccttagtggacccttaaacatttcggctcttttttatatgagcttccagttaggatttgttgttctagtgtcgcgccggactcgaaggtgatttcaatggccaagtactgtgggaatctagaggtggaaaggggggcaaaaagcaacgtttacagtatttagtcctctaggaagaaatctcttgttgacgagattccgactatttgcggctcccaaccttacagtgctcgggttgatcgagcgcactctgaccttgaaatggaactgatgaagtgctacgtatcttgtattgatatgtgagctgacttagggagcaaattctctgacgaagataccaaatttgcccgagtgatttctcatcgtccgttaggcatcattacttacggatacataaagtacgagctaactttgcacgtcgctagcccgatgaacagctgttccaagttcaatattggaagccaaaggagggactgttagcgattggcatcaaatttacatggcacgtaacagatttcaggacaaaagctttccaagatttgccgtgctgtcacatccctttgttaacaacaattcttacatgttttgaatgcaaaaatggttccatagtgttttaatccttactcaaaatgcgtgcattcgatcctcctatgcagtactggtttacgaatcatacagttatgagttatacgatttttaggagatgctctacgtggtttggaaacaaaaccgctcacgaataatgttggtcaaatttcgtgtcagacgaggctagggcgaacaatatcgataaacgtccaatcgttagagccttacagctatcctactcgtcaggcatcccctcgatttcttctatcttctggttagtgcctggattgcagctgggcacaggcccgcaaagtggcaccgaactgtattgaacaccgtgtttcaatatatttttgtctacatctcgagcagtgaaaagttgttggcgacacatgacacaaacatcgaggcgctctcttacaatcgccagtcaatcttacgaccagcattcctcgctgacaggatggttcagtatatccacactccctggcgggaccgggacgagctattacgagtccgtcagcaattttaccctcaagcaagcaccgccaagacgtgcatagagcatgcaccattcgcagctgacggcagaccggatgcgcaagctgtagaagccgaaaagcaacagaggcaggccgtcacacgcgtctccatgtggatgcatcgcggcgactgcccccacttaatcgaggcaacggccttcctcaccgatgccttcctcggcgatgtccacgagaccaggacaagggactactcaaacttcctatctgtccgcttggcctatgctgctgccttcagtcgctttgtcactggcctacttgacagtcagcaagacaaattccgcaagcaaggcatgtacacgatagctaagaacatcggattaccggcaacgttcgtggagcttagacatcgtgcgacccacgagccactcccttcgttgaagaacctgcgaagtggcacacaaaatgcccttgcgtggatttatgacttttactggaaggacataagtccgtcaagcccgtcaagtaggatggctcatgaacttcaaaataacatggcctgtggtccccgaaaagcggtaatgattagatatctcattgaacaggatgaagcgatcagaaaggacttgcaagaacgatgggattcttgggacaaagagactttaatgctaacactgcaagatattgcacattcatctcaagactctacgatgcagctcaaagccttgcggcttttaggggaagttctagaaggaacagcgcccgtgtcggcacagaaccaggccgttactagtcgagacagcgggatgatagggagcatagatgcgattcgagctgaactcgagacgttaaagaatgacttggaccgatccgatttccccaattcagatggcgacgatgtggcaaacgcaatgccaggagacccgcctcctccagcatcttcttggacggctaactggactcggtattcagggtcatggacaactcgacctataggtgaagtttacagataatagctgagataaacttgatgtcccagacgtgatgatgacccagtgcattagaaaatcatacatgatatggttccaggatatcagatcagcgaatatgagaccatatcttaaagagttacctagctcgccgagacagtag

SEQ ID NO: 14249 - DNA, 1029 bp, Muscodor strobelii
  misc_feature: SGI cDNA ID NO. 564692
  misc_feature: Encodes the peptide sequence at SEQ ID NO 14250
atgatgccctcggtatatggagcggatgttccacacatctcaccaacaacttacaacgacccgattttagaggagttatcgagacagttgatgattccagagccaaatcgtcgaatatcccgcccttacaacggacaacgacaacctggtgctatgcgggtggtcaaacatagcagtgccaacaacagcccacagagtatgattgcaaggaggaggacgctcttgaacgatagcggcattccccgtcgacgacaacatgcccttgaccagacactcttccaacacgtgcaggatgaggcatcctgttatgccactcatcatgatccagtaaaaagaaaccaccgtcctgtcagttggcatcctagttcgcatcatggagatacccatcagatacacatgcagatacctcaggcggatttcagtcaatacatgatgccaatgcccacaccataccaccaaaaggatgtgttttccagctaccagactctgccgccaactccagctatttattcagaacaaacctcgccagtatccgggatctcacctatatcgctccctctcggcactgcaattcattcgacgacggtaccaccatatgttcagttgccatcaaatagtctggtcggtaatgagagtccagatttttctcagtcattctcaacatacaccgatcaaacggcatataactggaacacgtatttagctcagggactacagtcctgcacagcacctccaactcccgatgagttccacaacacacaacaaacgcactcaatatctgaagagtcaataccttatcaaccactagaggaatccgaggatgagggagaaatactggttggcatgggactctacgactcccccagcaagacggatgacgatcctacgttagaccactatcgacgaaccacatcacagctgttaggcacaacatttcgcagtggcaacggatggaagctggaggagtcatgggaacctccagcttctgacgacgacgaaggtgaagaagaagctgaaatagaagaatga

SEQ ID NO: 14250 - protein, 342 aa, Muscodor strobelii
  misc_feature: SGI Peptide ID NO. 564692
  misc_feature (1)..(329): NCBI GI: 46125541 Blast Desc: FG07148.1 [Gibberella zeae PH-1]
  misc_feature (1)..(329): NCBI GI: 256731325 Blast Desc: NECHADRAFT_84688 [Nectria haematococca mpVI 77-13-4]
  misc_feature (22)..(328): NCBI GI: 154304254 Blast Desc: BC1G_08397 [Botryotinia fuckeliana B05.10] gi|150854199|gb|EDN29391.1| BC1G_08397 [Botryotinia fuckeliana B05.10]
  misc_feature (7)..(327): NCBI GI: 145612195 Blast Desc: MGG_08152 [Magnaporthe grisea 70-15] gi|145019404|gb|EDK03632.1| MGG_08152 [Magnaporthe grisea 70-15]
  misc_feature (23)..(329): NCBI GI: 164426867 Blast Desc: NCU03747 [Neurospora crassa OR74A] gi|157071509|gb|EAA31858.2| NCU03747 [Neurospora crassa OR74A]
  misc_feature (23)..(329): NCBI GI: 12718329 Blast Desc: [Neurospora crassa]
  misc_feature (112)..(327): NCBI GI: 156059118 Blast Desc: SS1G_03571 [Sclerotinia sclerotiorum 1980] gi|154701358|gb|EDO01097.1| SS1G_03571 [Sclerotinia sclerotiorum 1980]
  misc_feature (22)..(329): NCBI GI: 171692363 Blast Desc: protein product [Podospora anserina] gi|170946130|emb|CAP72931.1| protein product [Podospora anserina]
  misc_feature (1)..(329): NCBI GI: 116206496 Blast Desc: [Chaetomium globosum CBS 148.51] gi|88183138|gb|EAQ90606.1| [Chaetomium globosum CBS 148.51]
  misc_feature (19)..(186): NCBI GI: 261355681 Blast Desc: conserved [Verticillium albo-atrum VaMs.102]
MMPSVYGADVPHISPTTYNDPILEELSRQLMIPEPNRRISRPYNGQRQPGAMRVVKHSSANNSPQSMIARRRTLLNDSGIPRRRQHALDQTLFQHVQDEASCYATHHDPVKRNHRPVSWHPSSHHGDTHQIHMQIPQADFSQYMMPMPTPYHQKDVFSSYQTLPPTPAIYSEQTSPVSGISPISLPLGTAIHSTTVPPYVQLPSNSLVGNESPDFSQSFSTYTDQTAYNWNTYLAQGLQSCTAPPTPDEFHNTQQTHSISEESIPYQPLEESEDEGEILVGMGLYDSPSKTDDDPTLDHYRRTTSQLLGTTFRSGNGWKLEESWEPPASDDDEGEEEAEIEE

SEQ ID NO: 14251 - DNA, 2160 bp, Muscodor strobelii
  misc_feature: SGI EST ID NO. CUFF.33966.0
  misc_feature: Variant of the nucleotide sequence at SEQ ID NO 14249
cgcgaagtttccgactattgttcccactccgacagccaactttttacatgcacctgtctctccttgatctccaacctcccgcgagccattgtcccacgcgccacgctctggtgagcatggacggaaaaggcaagacgaatgggggccaaggatggctgcttcagcgtctacatgcagggttacttttgagaagctttgtcttttcattcgactggttcgaaacctgttcctttgaccagggactagcgcctactggtctcgctactactaagtcctgacggagtataccttgaatgcgagccatcaaagttgaaagactccttttgcaacctccctagtctagcccgcgacaccaacgctaccatcaccagtccgcccgtccccggccaagggccgtgggcacaatgaaggatccttttctgacctagcaatcttgtctcgtcagatccctgccggaagcatatgacgcagaaagaatgtcccgacgaaccgtcatacaggtgaagcaggcacacgaacacacactcatttgcatacacctgcgaaagcggtcatgtctctgaaaaagtacctctcggccctatcgacccaatataatcatctaaatgccacttcacaacagttcttttgcccaagacctatctgaagtactcttaatataattccacccttgataccatagcatgtggcattcctaggctgagtagtctgagaccttgcctatccatccgtacaaacttataatacataatacctgagtatccggactccttctatcaaccccttcatacgttgccagctttttcgcatctacgagatacccctcgacctaaagaacattcgtgtgtatcatcatcaaccaagacctacttcactagtctggcatcacaagatgatgccctcggtatatggagcggatgttccacacatctcaccaacaacttacaacgacccgattttagaggagttatcgagacagttgatgattccagagccaaatcgtcgaatatcccgcccttacaacggacaacgacaacctggtgctatgcgggtggtcaaacatagcagtgccaacaacagcccacagagtatgattgcaaggaggaggacgctcttgaacgatagcggcattccccgtcgacgacaacatgcccttgaccagacactcttccaacacgtgcaggatgaggcatcctgttatgccactcatcatgatccagtaaaaagaaaccaccgtcctgtcagttggcatcctagttcgcatcatggagatacccatcagatacacatgcagatacctcaggcggatttcagtcaatacatgatgccaatgcccacaccataccaccaaaaggatgtgttttccagctaccagactctgccgccaactccagctatttattcagaacaaacctcgccagtatccgggatctcacctatatcgctccctctcggcactgcaattcattcgacgacggtaccaccatatgttcagttgccatcaaatagtctggtcggtaatgagagtccagatttttctcagtcattctcaacatacaccgatcaaacggcatataactggaacacgtatttagctcagggactacagtcctgcacagcacctccaactcccgatgagttccacaacacacaacaaacgcactcaatatctgaagagtcaataccttatcaaccactagaggaatccgaggatgagggagaaatactggttggcatgggactctacgactcccccagcaagacggatgacgatcctacgttagaccactatcgacgaaccacatcacagctgttaggcacaacatttcgcagtggcaacggatggaagctggaggagtcatgggaacctccagcttctgacgacgacgaaggtgaagaagaagctgaaatagaagaatgatagtagcaaaggaggaggatgccacaagtcgccgccggtattgcagcctggcatgtaaggaaacttcccagtgcttaacttacccatgaaagactctttttcttgtacatctcaagagcgattacatcgacatatcgcaaccaaaaaatagcagaattccctgccagttcgggatgtctctttattgttgcagaagacatttgcccagaacattaggtacgggtaaaaaaaaatgagaa

SEQ ID NO: 14252 - DNA, 984 bp, Muscodor strobelii
  misc_feature: SGI cDNA ID NO. 564693
  misc_feature: Encodes the peptide sequence at SEQ ID NO 14253
atgacaagaaacctcgtgtgcattggcgcatgttatctcgatacaattctaagtgtacctcattacccgggcgaagatgaaaaattacgtgccacgaagcgacaagttcgccgaggcggcaattgcccaaattcgctcgaggttttccaacagctcctccaatctagacaggacgcaggcaacaatggcagaggtattaacctatacctcgtgacatgcttacctgctcgtgatgcaccagcagtaaacgcgatcgttcaatcgttcggtgtaaacacgttggtagacatttccaagtccatatttcgtgatggctatcaggagccggccagttgctacgtcattcggagcgaagcaacggggactcgtacgtcggtgaactacaatgatctacctgacatgacctttgacgaatttgcgaatgctgtcgaagacatggcaggagatacgtggtttcattttgagggtcggaccccgacgacgacgttgcagtgcattcagtggctaaggcgatcaaagccgagcgcaaaagtgagcgtcgagatcgaaaaacctggccgaatggggcttggagaattggcggctgcggcagacgttgtgttctactcacgcagctgggcggaaagcaaggcatacgaaagtgccgaagagtgtctacgtgcccaatcggctcaagcccggaacccagcttatcatctgtgtacttggggctccgagggtgccagcctgtcgaccggtggaaacattttagtttgtccagcgtcacgcccagaaaaagtcatccgcgtaatagacacgatcggggcaggcgatacgttcatcgcggggtcacttttcggctttttgtgccacgatgactgggacgatcaagcgaaacttgactttgccgtggggcttgcaacaaggaaagttcaacaggaggggttcgaaggccttggtcttgacatggctgataccgtggggtggcgcatcacggtagattga

SEQ ID NO: 14253 - protein, 327 aa, Muscodor strobelii
  misc_feature: SGI Peptide ID NO. 564693
  misc_feature (2)..(317): Pfam Id: PF00294 Pfam Desc: pfkB family carbohydrate kinase
  misc_feature (237)..(308): Pfam Id: PF00294 Pfam Desc: pfkB family carbohydrate kinase
  misc_feature (4)..(312): NCBI GI: 119497341 Blast Desc: PfkB family kinase, [Neosartorya fischeri NRRL 181] gi|119413591|gb|EAW23532.1| PfkB family kinase, [Neosartorya fischeri NRRL 181]
  misc_feature (1)..(314): NCBI GI: 242793308 Blast Desc: ketohexokinase, [Talaromyces stipitatus ATCC 10500] gi|218718723|gb|EED18143.1| ketohexokinase, [Talaromyces stipitatus ATCC 10500]
  misc_feature (4)..(312): NCBI GI: 239606971 Blast Desc: conserved [Ajellomyces dermatitidis ER-3]
  misc_feature (4)..(312): NCBI GI: 121703295 Blast Desc: PfkB family kinase, [Aspergillus clavatus NRRL 1] gi|119398055|gb|EAW08486.1| PfkB family kinase, [Aspergillus clavatus NRRL 1]
  misc_feature (5)..(318): NCBI GI: 240108305 Blast Desc: kinase, pfkB family protein [Coccidioides posadasii C735 delta SOWgp]
  misc_feature (5)..(318): NCBI GI: 119187147 Blast Desc: CIMG_03621 [Coccidioides immitis RS]
  misc_feature (4)..(312): NCBI GI: 255950662 Blast Desc: Pc22g22030 [Penicillium chrysogenum Wisconsin 54-1255] gi|211593115|emb|CAP99491.1| Pc22g22030 [Penicillium chrysogenum Wisconsin 54-1255]
  misc_feature (5)..(313): NCBI GI: 259489421 Blast Desc: TPA: conserved [Aspergillus nidulans FGSC A4]
  misc_feature (5)..(316): NCBI GI: 212535498 Blast Desc: ketohexokinase, [Penicillium marneffei ATCC 18224] gi|210070304|gb|EEA24394.1| ketohexokinase, [Penicillium marneffei ATCC 18224]
  misc_feature (3)..(312): NCBI GI: 116206494 Blast Desc: CHGG_02540 [Chaetomium globosum CBS 148.51] gi|88183137|gb|EAQ90605.1| CHGG_02540 [Chaetomium globosum CBS 148.51]
  misc_feature (3)..(312): SWISSPROT Homolog: EC 2.7.1.3 Ketohexokinase
MTRNLVCIGACYLDTILSVPHYPGEDEKLRATKRQVRRGGNCPNSLEVFQQLLQSRQDAGNNGRGINLYLVTCLPARDAPAVNAIVQSFGVNTLVDISKSIFRDGYQEPASCYVIRSEATGTRTSVNYNDLPDMTFDEFANAVEDMAGDTWFHFEGRTPTTTLQCIQWLRRSKPSAKVSVEIEKPGRMGLGELAAAADVVFYSRSWAESKAYESAEECLRAQSAQARNPAYHLCTWGSEGASLSTGGNILVCPASRPEKVIRVIDTIGAGDTFIAGSLFGFLCHDDWDDQAKLDFAVGLATRKVQQEGFEGLGLDMADTVGWRITVD

SEQ ID NO: 14254 - DNA, 4833 bp, Muscodor strobelii
  misc_feature: SGI EST ID NO. CUFF.33992.2
  misc_feature: Variant of the nucleotide sequence at SEQ ID NO 14252
agggaacccgacaagtccctatggtgatacggtattctacgcgccagagggcacgaagaatgcgagctttacgtattttgaggatacgatacaggacatataccaagaccagctggcatcgaacgcttcagccgtgatcgaagaccggaaagtcactttcttcgcaggtccggaagtagcagaacgcgcatacggcacagcgtggggtttcctgacggatatgtcttgcacgccagtcaacccatattcgggattcgaactcctggacgtacactcgatgaataactggacagtcaaaggcgcattcacggactcgaatacatacggcaacaacacaacatcactataccaggcacaataaactggaggtacagaagcagtgttcttcgacatcaacgaaatattcggtatggagtatcaatacgtcatgacgacgaatgcagaccctcttacaggcggagcaagatactcaccacccaataagttgccggtagatggcactcttgaattggctatgtggcagtcttacgtcgcctcctcacccgatgagacgttcaagaaactgtctgatacaccatatgtcgtatcttcgaagtcgatatacgataatgcgacatacctcgggtatggaatccagtgtaaggcaactactaacacaggccgcgccgtgctttcggcgaatctcaacacattctcctctttcgaacaagaagcaccggtcgcgaatagcattttctcgtctagtatagcacaagcaacgggtatcgtgggtttacatacattagtatacacggcatttaccactatgcctctggcgttttttggtggtcctaagtgtcagcccggcgtcaccgtgacgtgcaatggatgggttggcgcaaataaagccacgaacggtgtgcccatttacaagttgaatacttcgtcttaccaatatcctacaatagggccggagagaatggctctggctttgtctaaactctttggagaggcagctgttgctgttatggggcgaggcccagggaattggacatcttctccgaacgctacatcagatttggggctttttggactggagcctgcgaatgaccttgtccctggtcaagttccgtatagagtggttttggttctactttcattgtgggtgcttgtgacgattttaccgcagttgtggccgtctttcttttatggccgaagatggggagaggttctcaacggctttgccatgtttcgattaggggtggagtggaaagaggagatcaataggctagagagtgatgaattctgggccaagggagcggcggcgttgaaaagcataccgggcatgattggagacatgaacgcagcgggtgatgggaggctgcgaaccagcttcgcgcaagggtatggtgatgagggtgtcggctctgtcgggctgagtcttcatcaagctgagacaagcagacgaagatcgtacacttatcgctcggctcgaaagaagggtcaagatacgtaaattgtgtaatcgacggaaatacattacgagagatgaaaggtcatgcatactctgctcgcgtgaaattctgaacgtccaaatctgagccacaatgtgacgtgtcgtaagattgctatgcacggcgcatgtccacgagcaagtcgagtcaatgttgtgtttgcaggacacatttaccagcgacacagcaagctcgtgcgaccgcatgtccagtccgtagatttggtattgttgctgtggagctgtctggctacgcaagctgccataatactaccagcggatccagactcaagcgcgaggctgtgtcaaggcgtcagcatcgaagttgtacgcgatggagctcaaggttcacaaggtggaatgcggaaaactagtagtagaatgtccggccaactgggagacgcgtacgcacgcaagtacatgggcagcatcagaagtgaatggtttttatcgactggttataggtgatcgaagcgaggagcctcactgatgctctctatctaaggtaaggcaggcaggcgatgaactgcagactatttcgtgagtgaccatatttgtgtgtaagttacaatgcaaggaagacattatttatccacagcaaatgcgttcgtgttgcaagtcgtgagcctatagggtagtagtactcgatacaagtagggcaaggcaagtctttgaacgaatacaacaatgtcctgagtgagcatggccgtgaaatgactcattacaccacctccgagctcgtgtgtaagaaagggtattgatcatctggtgcaacgactcccttgaatatcctattaatattacgccatacattatgatcttgcggcttgatcgcacacgttaatcaaatttctcgcttctccgactccaacgagacagtgccgtcgttacatcgacgctcagattccgtctctgtcagcctacggtgtcgatccaagtggaatagtcgtagaagctcgggaagtgatctgatccaccaaaacgggtgtctatccgctcgcgctcggagatctggtgacatgggattggtgtcacattaatcagattgccaaattgctattgacagaacgaaatgacaagaaacctcgtgtgcattggcgcatgttatctcgatacaattctaaggtaagctctcattccatataatgttattggtggaaatgacggcggttcgacttccatgctagacagacgggcttgctcattgcttctgtgcattgtagtgtacctcattacccgggcgaagatgaaaaattacgtgccacgaagcgacaagttcgccgaggcggcaattgcccaaattcgctcgaggttttccaacagctcctccaatctagacaggacgcaggcaacaatggcagaggtattaacctatacctcgtgacatgcttacctgctcgtgatgcaccagcagtaaacgcgatcgttcaatcgttcggtgtaaacacgttggtagacatttccaagtccatatttcgtgatggctatcaggagccggccagttgctacgtcattcggagcgaagcaacggggactcgtacgtcggtgaactacaatgatctacctgacatgacctttgacgaatttgcgaatgctgtcgaagacatggcaggagatacgtggtttcattttgagggtcggaccccgacgacgacgttgcagtgcattcagtggctaaggcgatcaaagccgagcgcaaaagtgagcgtcgagatcgaaaaacctggccgaatggggcttggagaattggcggctgcggcagacgttgtgttctactcacgcagctgggcggaagtgcgtgagcctattttccactcgtgtgctcgccattcacttgcctagatccatggtgttaagcatatcgcgattgatagagcaaggcatacgaaagtgccgaagagtgtctacgtgcccaatcggctcaagcccggaacccgtgagttgcaccgtaccttgtcactgacattgatgatgatgcggtttctgcagtagtcgctgacaatgtcgtgtttgaagagcttatcatctgtgtacttggggctccgagggtgccagcctgtcgaccggtggaaacattttagtttgtccagcgtcacgcccagaaaaagtcatccgcgtaatagagtaggtttcaccagcgtgaaagcgcagactttgatgtccacaccataagcagccaagataccaagttttgtatgtactgtaagacaccgaccatggaaactaacggtgaatcgaatatagcacgatcggggcaggcgatacgttcatcgcggggtcacttttcggctttttgtgccacgatgactgggacgatcaagcgaaacttgactttgccgtggggcttgcaacaaggaaagttcaacaggaggggttcgaaggccttggtcttgacatggctgataccgtggggtggcgcatcacggtagattgatcaagacttgcagttgagcatcaatgcaactgtgcaacagaaaggtttgccattttcagaagtagcgcccaaacttgagcctatacaagcattcgtcggcttctccaccaattcagccatggagcatactacaagttgatcaaatttccttaggctgatgagtgtgagtctcacccaaggaaacgccctgccacttggagattgcagccaaaagggaaggctctagtcaatgaataatgcacgagtgcttcaaagtcgagggtctctcagccccaagagcgacataatagtgatcgggaaggactggccgagacaggaagatcgtcttcgctaggcacgtatgtagatgagaaggagacggtacattgggctctgacaaaaccggataagacccggcaaatcgcaaggcctgatttattcgtaagtaatgtatgttggtgcagaggtggtggtgattagcggtgagactgtggatcagagcacaggcatgataagtacaaagggtagcatcgatgtcctggagtggtgatggcgtgtgcacgtgagaccaaaggaaagcgcccgtatttcatgaagaatcttacacgtacggtactgtacgtatgtagtaggcagattgagctcttctcccggccctgtagtaataataagacagcagatgggttgtatgtgtacataaaatgtgagggagggatagctggcaggggagatgggggcggtggagatggtcgctcgggtttcaaatcgcctgtgcctgcactctatcctctcctctacatccatcccaccgtgcagtagacttccgacggacgttacgtgtccagccatgccgggcaaccctgtgagccaacgcgcacgcttgaaacatccttttcaggacagggacatgacatacgatacaaatcag

SEQ ID NO: 14255 - DNA, 1020 bp, Muscodor strobelii
  misc_feature: SGI cDNA ID NO. 564694
  misc_feature: Elevated expression when VOC is produced
  misc_feature: Encodes the peptide sequence at SEQ ID NO 14256
atgacaagaaacctcgtgtgcattggcgcatgttatctcgatacaattctaagacagacgggcttgctcattgcttctgtgcattgtagtgtacctcattacccgggcgaagatgaaaaattacgtgccacgaagcgacaagttcgccgaggcggcaattgcccaaattcgctcgaggttttccaacagctcctccaatctagacaggacgcaggcaacaatggcagaggtattaacctatacctcgtgacatgcttacctgctcgtgatgcaccagcagtaaacgcgatcgttcaatcgttcggtgtaaacacgttggtagacatttccaagtccatatttcgtgatggctatcaggagccggccagttgctacgtcattcggagcgaagcaacggggactcgtacgtcggtgaactacaatgatctacctgacatgacctttgacgaatttgcgaatgctgtcgaagacatggcaggagatacgtggtttcattttgagggtcggaccccgacgacgacgttgcagtgcattcagtggctaaggcgatcaaagccgagcgcaaaagtgagcgtcgagatcgaaaaacctggccgaatggggcttggagaattggcggctgcggcagacgttgtgttctactcacgcagctgggcggaaagcaaggcatacgaaagtgccgaagagtgtctacgtgcccaatcggctcaagcccggaacccagcttatcatctgtgtacttggggctccgagggtgccagcctgtcgaccggtggaaacattttagtttgtccagcgtcacgcccagaaaaagtcatccgcgtaatagacacgatcggggcaggcgatacgttcatcgcggggtcacttttcggctttttgtgccacgatgactgggacgatcaagcgaaacttgactttgccgtggggcttgcaacaaggaaagttcaacaggaggggttcgaaggccttggtcttgacatggctgataccgtggggtggcgcatcacggtagattga

SEQ ID NO: 14256 - protein, 339 aa, Muscodor strobelii
  misc_feature: SGI Peptide ID NO. 564694
  misc_feature (45)..(329): Pfam Id: PF00294 Pfam Desc: pfkB family carbohydrate kinase
  misc_feature (249)..(320): Pfam Id: PF00294 Pfam Desc: pfkB family carbohydrate kinase
  misc_feature (4)..(324): NCBI GI: 119497341 Blast Desc: PfkB family kinase, [Neosartorya fischeri NRRL 181] gi|119413591|gb|EAW23532.1| PfkB family kinase, [Neosartorya fischeri NRRL 181]
  misc_feature (5)..(328): NCBI GI: 212535498 Blast Desc: ketohexokinase, [Penicillium marneffei ATCC 18224] gi|210070304|gb|EEA24394.1| ketohexokinase, [Penicillium marneffei ATCC 18224]
  misc_feature (1)..(326): NCBI GI: 242793308 Blast Desc: ketohexokinase, [Talaromyces stipitatus ATCC 10500] gi|218718723|gb|EED18143.1| ketohexokinase, [Talaromyces stipitatus ATCC 10500]
  misc_feature (4)..(324): NCBI GI: 121703295 Blast Desc: PfkB family kinase, [Aspergillus clavatus NRRL 1] gi|119398055|gb|EAW08486.1| PfkB family kinase, [Aspergillus clavatus NRRL 1]
  misc_feature (4)..(324): NCBI GI: 239606971 Blast Desc: conserved [Ajellomyces dermatitidis ER-3]
  misc_feature (5)..(330): NCBI GI: 240108305 Blast Desc: kinase, pfkB family protein [Coccidioides posadasii C735 delta SOWgp]
  misc_feature (5)..(330): NCBI GI: 119187147 Blast Desc: CIMG_03621 [Coccidioides immitis RS]
  misc_feature (4)..(324): NCBI GI: 255950662 Blast Desc: Pc22g22030 [Penicillium chrysogenum Wisconsin 54-1255] gi|211593115|emb|CAP99491.1| Pc22g22030 [Penicillium chrysogenum Wisconsin 54-1255]
  misc_feature (5)..(325): NCBI GI: 259489421 Blast Desc: TPA: conserved [Aspergillus nidulans FGSC A4]
  misc_feature (3)..(324): NCBI GI: 116206494 Blast Desc: CHGG_02540 [Chaetomium globosum CBS 148.51] gi|88183137|gb|EAQ90605.1| CHGG_02540 [Chaetomium globosum CBS 148.51]
  misc_feature (20)..(324): SWISSPROT Homolog: EC 2.7.1.3 Ketohexokinase
  misc_feature: Useful for introducing or modulating the production of volatile compounds
MTRNLVCIGACYLDTILRQTGLLIASVHCSVPHYPGEDEKLRATKRQVRRGGNCPNSLEVFQQLLQSRQDAGNNGRGINLYLVTCLPARDAPAVNAIVQSFGVNTLVDISKSIFRDGYQEPASCYVIRSEATGTRTSVNYNDLPDMTFDEFANAVEDMAGDTWFHFEGRTPTTTLQCIQWLRRSKPSAKVSVEIEKPGRMGLGELAAAADVVFYSRSWAESKAYESAEECLRAQSAQARNPAYHLCTWGSEGASLSTGGNILVCPASRPEKVIRVIDTIGAGDTFIAGSLFGFLCHDDWDDQAKLDFAVGLATRKVQQEGFEGLGLDMADTVGWRITVD

SEQ ID NO: 14257 - DNA, 4833 bp, Muscodor strobelii; identical to SEQ ID NO: 14254
  misc_feature: SGI EST ID NO. CUFF.33992.2
  misc_feature: Variant of the nucleotide sequence at SEQ ID NO 14255

SEQ ID NO: 14258 - DNA, 1086 bp, Muscodor strobelii
  misc_feature: SGI cDNA ID NO. 564695
  misc_feature: Encodes the peptide sequence at SEQ ID NO 14259
atggagtatcaatacgtcatgacgacgaatgcagaccctcttacaggcggagcaagatactcaccacccaataagttgccggtagatggcactcttgaattggctatgtggcagtcttacgtcgcctcctcacccgatgagacgttcaagaaactgtctgatacaccatatgtcgtatcttcgaagtcgatatacgataatgcgacatacctcgggtatggaatccagtgtaaggcaactactaacacaggccgcgccgtgctttcggcgaatctcaacacattctcctctttcgaacaagaagcaccggtcgcgaatagcattttctcgtctagtatagcacaagcaacgggtatcgtgggtttacatacattagtatacacggcatttaccactatgcctctggcgttttttggtggtcctaagtgtcagcccggcgtcaccgtgacgtgcaatggatgggttggcgcaaataaagccacgaacggtgtgcccatttacaagttgaatacttcgtcttaccaatatcctacaatagggccggagagaatggctctggctttgtctaaactctttggagaggcagctgttgctgttatggggcgaggcccagggaattggacatcttctccgaacgctacatcagatttggggctttttggactggagcctgcgaatgaccttgtccctggtcaagttccgtatagagtggttttggttctactttcattgtgggtgcttgtgacgattttaccgcagttgtggccgtctttcttttatggccgaagatggggagaggttctcaacggctttgccatgtttcgattaggggtggagtggaaagaggagatcaataggctagagagtgatgaattctgggccaagggagcggcggcgttgaaaagcataccgggcatgattggagacatgaacgcagcgggtgatgggaggctgcgaaccagcttcgcgcaagggtatggtgatgagggtgtcggctctgtcgggctgagtcttcatcaagctgagacaagcagacgaagatcgtacacttatcgctcggctcgaaagaagggtcaagatacgtaa

SEQ ID NO: 14259 - protein, 361 aa, Muscodor strobelii
  misc_feature: SGI Peptide ID NO. 564695
  misc_feature (74)..(309): NCBI GI: 169600471 Blast Desc: SNOG_03071 [Phaeosphaeria nodorum SN15] gi|160705445|gb|EAT89802.2| SNOG_03071 [Phaeosphaeria nodorum SN15]
  misc_feature (74)..(312): NCBI GI: 226292966 Blast Desc: conserved [Paracoccidioides brasiliensis Pb18]
  misc_feature (74)..(312): NCBI GI: 225683623 Blast Desc: [Paracoccidioides brasiliensis Pb03]
  misc_feature (74)..(309): NCBI GI: 261206370 Blast Desc: conserved [Ajellomyces dermatitidis SLH14081] gi|239592981|gb|EEQ75562.1| conserved [Ajellomyces dermatitidis SLH14081] gi|239610843|gb|EEQ87830.1| conserved [Ajellomyces
  misc_feature (211)..(315): NCBI GI: 239606399 Blast Desc: conserved [Ajellomyces dermatitidis ER-3]
  misc_feature (211)..(315): NCBI GI: 261190202 Blast Desc: conserved [Ajellomyces dermatitidis SLH14081] gi|239591339|gb|EEQ73920.1| conserved [Ajellomyces dermatitidis SLH14081]
  misc_feature (228)..(309): NCBI GI: 238840557 Blast Desc: conserved [Microsporum canis CBS 113480]
MEYQYVMTTNADPLTGGARYSPPNKLPVDGTLELAMWQSYVASSPDETFKKLSDTPYVVSSKSIYDNATYLGYGIQCKATTNTGRAVLSANLNTFSSFEQEAPVANSIFSSSIAQATGIVGLHTLVYTAFTTMPLAFFGGPKCQPGVTVTCNGWVGANKATNGVPIYKLNTSSYQYPTIGPERMALALSKLFGEAAVAVMGRGPGNWTSSPNATSDLGLFGLEPANDLVPGQVPYRVVLVLLSLWVLVTILPQLWPSFFYGRRWGEVLNGFAMFRLGVEWKEEINRLESDEFWAKGAAALKSIPGMIGDMNAAGDGRLRTSFAQGYGDEGVGSVGLSLHQAETSRRRSYTYRSARKKGQDT

SEQ ID NO: 14260 - DNA, 4833 bp, Muscodor strobelii; identical to SEQ ID NO: 14254
  misc_feature: SGI EST ID NO. CUFF.33992.2
  misc_feature: Variant of the nucleotide sequence at SEQ ID NO 14258

SEQ ID NO: 14261 - DNA, 1182 bp, Muscodor strobelii
  misc_feature: SGI cDNA ID NO. 564696
  misc_feature: Encodes the peptide sequence at SEQ ID NO 14262
atgtatgatcttgcgccgtacggagaagttgatctatcatcatacaattacacgacctcgcctcgaaactggtccgctgtctctctatcgtctcctttccaagactcaacccaagcgtactacaacgataaagatgacctcgtcaaagagtcgcaaacctcttataatagactaccacgcctagataccgaagatgacggcaccggcctacttcaaccaagagctcgatatcatttcaaacgctacatcttccgttcaattctcaacacgcttggacctatactcgtcctacttttctatatattcatcgttgttgagtatctacgtcgacctacggagcatggcataatacctactcgcacactagatgctaatacagtgttctttgcgtggttgatattaagtatcttcgtcctagattgggctcgttcaggcatcgctgggttcgaagcaacggcgctcatgagaccttcgctggcacccagagatgcacgccagctcatgtggcacgctgaccgtgcttggagctctgtaagcgggtggtgtagggttctcgtcatgggttcagagtacctcacccagaaattgaagggcagaggcagatccgttgaatggcgtggtccggggtcgttgtggttttacctcgcactctcgagcatcatgttctacgtcactgtgccgttatctggcctcagtttgaaccccgagagcgcattgcaactaagtaaaaggcaagtagtcatcaccggtgtgaatcagtcgacgttcgacgcaagagcatcgaatgatcttgcggagactgcggatagtaggtggaggcaagggaacccgacaagtccctatggtgatacggtattctacgcgccagagggcacgaagaatgcgagctttacgtattttgaggatacgatacaggacatataccaagaccagctggcatcgaacgcttcagccgtgatcgaagaccggaaagtcactttcttcgcaggtccggaagtagcagaacgcgcatacggcacagcgtggggtttcctgacggatatgtcttgcacgccagtcaacccatattcgggattcgaactcctggacgtacactcgatgaataactggacagtcaaaggcgcattcacggactcgaatacatacggcaacaacacaacatcactataccaggcacaataa

SEQ ID NO: 14262 - protein, 393 aa, Muscodor strobelii
  misc_feature: SGI Peptide ID NO. 564696
  misc_feature (72)..(382): NCBI GI: 226294739 Blast Desc: conserved [Paracoccidioides brasiliensis Pb18]
  misc_feature (72)..(382): NCBI GI: 225678551 Blast Desc: [Paracoccidioides brasiliensis Pb03]
  misc_feature (77)..(362): NCBI GI: 169600471 Blast Desc: SNOG_03071 [Phaeosphaeria nodorum SN15] gi|160705445|gb|EAT89802.2| SNOG_03071 [Phaeosphaeria nodorum SN15]
  misc_feature (77)..(380): NCBI GI: 261190915 Blast Desc: conserved [Ajellomyces dermatitidis SLH14081] gi|239590910|gb|EEQ73491.1| conserved [Ajellomyces dermatitidis SLH14081]
  misc_feature (77)..(380): NCBI GI: 239613183 Blast Desc: conserved [Ajellomyces dermatitidis ER-3]
  misc_feature (55)..(378): NCBI GI: 261190202 Blast Desc: conserved [Ajellomyces dermatitidis SLH14081] gi|239591339|gb|EEQ73920.1| conserved [Ajellomyces dermatitidis SLH14081]
  misc_feature (71)..(378): NCBI GI: 239606399 Blast Desc: conserved [Ajellomyces dermatitidis ER-3]
  misc_feature (124)..(363): NCBI GI: 225554718 Blast Desc: conserved [Ajellomyces capsulatus G186AR]
  misc_feature (124)..(363): NCBI GI: 240276904 Blast Desc: conserved [Ajellomyces capsulatus H143]
  misc_feature (77)..(362): NCBI GI: 226292966 Blast Desc: conserved [Paracoccidioides brasiliensis Pb18]
MYDLAPYGEVDLSSYNYTTSPRNWSAVSLSSPFQDSTQAYYNDKDDLVKESQTSYNRLPRLDTEDDGTGLLQPRARYHFKRYIFRSILNTLGPILVLLFYIFIVVEYLRRPTEHGIIPTRTLDANTVFFAWLILSIFVLDWARSGIAGFEATALMRPSLAPRDARQLMWHADRAWSSVSGWCRVLVMGSEYLTQKLKGRGRSVEWRGPGSLWFYLALSSIMFYVTVPLSGLSLNPESALQLSKRQVVITGVNQSTFDARASNDLAETADSRWRQGNPTSPYGDTVFYAPEGTKNASFTYFEDTIQDIYQDQLASNASAVIEDRKVTFFAGPEVAERAYGTAWGFLTDMSCTPVNPYSGFELLDVHSMNNWTVKGAFTDSNTYGNNTTSLYQAQ

SEQ ID NO: 14263 - DNA, 4833 bp, Muscodor strobelii; identical to SEQ ID NO: 14254
  misc_feature: SGI EST ID NO. CUFF.33992.2
  misc_feature: Variant of the nucleotide sequence at SEQ ID NO 14261

SEQ ID NO: 14264 - DNA, 1341 bp, Muscodor strobelii
  misc_feature: SGI cDNA ID NO. 564697
  misc_feature: Encodes the peptide sequence at SEQ ID NO 14265
atgtcgacaacacagacagtgacgacggagggacctcaatcctttcccttgaccgagctacaccagtcccatccagctaaagatccagaagcctcatccaggcaagatgcagttgacaatgaggccgttgagtgcgaagccgcaacaccatttcacaaactcgctgtagccggatattcattcttctgtgccggtgtcaacgacggatttttaggtcctctcatcccctatatcttatccacgttcagcattggtacgggtgaagtcgcagccatttatttctcaacgttcgcaggctggctcttagctgcggtaacaaaccccattctcacagctcatctaacactcggccaactcctacaacttggtgcctttctccagctcatctcccaattcatgagagtctggggcccattgccgttattcatcgtatcattcttcatacaatctctcgggatggcatatcaagactcccactccaacaccttcgtcagcagcttgaagaatgtgccccatcgatggctgggattcatccatgcttgttatgcgttgggtacgttcatcggaccacttatcgctactgctattgcgaatagtgagaatacgctgtctattgctggttggaagaggtcctatttcgtgctgattggcatctttttcctggacgtcgttggagttgcgtatacgttcagggatacgctgttcaccagattgaatacggatgaggcgaaaggtcagaagaggagtaggacggcactcatggatatggcgagacttttgaagtcgaagacgctttggttgttgagtatatactacttctttgaactaggcgccgttttcacggcgggcggttgggtcgtcgaatacttgacaacagtcaggggaggggacttggcgaaagtcgggtatgttccgactggcttctacggtggtttgttagcgggcagattactgcttcctgaaccgacatatcgatttggtgagcaaagaatggtgctggtctaccatgtatttgctgtggcacttcaactcgtcttctggttgcaacccaatatcatcggaagtgccatcgcgctcagcttcattgggttcttcattggtcctttctttgctactggtatgtcagtcgcctctaaattattccctcgcgcatctcaaccggcagcactaggcttcatcttcgtcatcgctcaagccggatctgctctgtttccatcaatcacaggcttgatcgctagaggttcagacgtgggtgtgctgcagcctattgtgctcgcgctatttgtggctggcgggatcatttggtggatgatacccaatgtcccggctcgcgatgaatga

SEQ ID NO: 14265 - protein, 446 aa, Muscodor strobelii
  misc_feature: SGI Peptide ID NO. 564697
  misc_feature (57)..(405): Pfam Id: PF07690 Pfam Desc: Major Facilitator Superfamily
  misc_feature (50)..(446): NCBI GI: 46126725 Blast Desc: FG07740.1 [Gibberella zeae PH-1]
  misc_feature (38)..(440): NCBI GI: 238502373 Blast Desc: MFS transporter, [Aspergillus flavus NRRL3357] gi|220691230|gb|EED47578.1| MFS transporter, [Aspergillus flavus NRRL3357]
  misc_feature (22)..(446): NCBI GI: 189190720 Blast Desc: conserved [Pyrenophora tritici-repentis Pt-1C-BFP] gi|187973305|gb|EDU40804.1| conserved [Pyrenophora tritici-repentis Pt-1C-BFP]
  misc_feature (30)..(440): NCBI GI: 255937419 Blast Desc: Pc13g13220 [Penicillium chrysogenum Wisconsin 54-1255] gi|211584356|emb|CAP92391.1| Pc13g13220 [Penicillium chrysogenum Wisconsin 54-1255]
  misc_feature (53)..(440): NCBI GI: 256727973 Blast Desc: NECHADRAFT_104936 [Nectria haematococca mpVI 77-13-4]
  misc_feature (38)..(440): NCBI GI: 169775733 Blast Desc: [Aspergillus oryzae RIB40] gi|83771068|dbj|BAE61200.1| protein product [Aspergillus oryzae]
  misc_feature (41)..(446): NCBI GI: 119482347 Blast Desc: MFS transporter, [Neosartorya fischeri NRRL 181] gi|119409356|gb|EAW19305.1| MFS transporter, [Neosartorya fischeri NRRL 181]
  misc_feature (53)..(439): NCBI GI: 116179276 Blast Desc: CHGG_00266 [Chaetomium globosum CBS 148.51] gi|88184563|gb|EAQ92031.1| CHGG_00266 [Chaetomium globosum CBS 148.51]
  misc_feature (22)..(390): NCBI GI: 145612189 Blast Desc: MGG_12295 [Magnaporthe grisea 70-15] gi|145019401|gb|EDK03629.1| MGG_12295 [Magnaporthe grisea 70-15]
  misc_feature (2)..(439): NCBI GI: 256722091 Blast Desc: NECHADRAFT_51245 [Nectria haematococca mpVI 77-13-4]
MSTTQTVTTEGPQSFPLTELHQSHPAKDPEASSRQDAVDNEAVECEAATPFHKLAVAGYSFFCAGVNDGFLGPLIPYILSTFSIGTGEVAAIYFSTFAGWLLAAVTNPILTAHLTLGQLLQLGAFLQLISQFMRVWGPLPLFIVSFFIQSLGMAYQDSHSNTFVSSLKNVPHRWLGFIHACYALGTFIGPLIATAIANSENTLSIAGWKRSYFVLIGIFFLDVVGVAYTFRDTLFTRLNTDEAKGQKRSRTALMDMARLLKSKTLWLLSIYYFFELGAVFTAGGWVVEYLTTVRGGDLAKVGYVPTGFYGGLLAGRLLLPEPTYRFGEQRMVLVYHVFAVALQLVFWLQPNIIGSAIALSFIGFFIGPFFATGMSVASKLFPRASQPAALGFIFVIAQAGSALFPSITGLIARGSDVGVLQPIVLALFVAGGIIWWMIPNVPARDE

SEQ ID NO: 14266 - DNA, 1951 bp, Muscodor strobelii
  misc_feature: SGI EST ID NO. CUFF.33996.0
  misc_feature: Variant of the nucleotide sequence at SEQ ID NO 14264
cttttggccagatcgatgttcacgacctgcgttcattggcaaatgctcagtcccgagaattattaattctagaaggggatcgatattgtgagatctttcagattgatctaccaatttcagttgttgtgtagactatataagcatctggaaaccccgacattctgcccatacccaaaagatgacctccgacaagttctatcagatcgtgcagagcttcgtggtgacccctgacatacccagcttctccataccacgcccgcattctacggaacaggagcgccgttgcatccccggccatctgcagtctccatcatttgatcctctgccgaatttttaccgacaatgttagttgtagtcctgtatataaaagaattctcgccaaaagttttgattatcgtttgatcgtgttgtgataaccatgttctttaatgggtttcgttttcaagtacagcggaatccagcatgtcgacaacacagacagtgacgacggagggacctcaatcctttcccttgaccgagctacaccagtcccatccagctaaagatccagaagcctcatccaggcaagatgcagttgacaatgaggccgttgagtgcgaagccgcaacaccatttcacaaactcgctgtagccggatattcattcttctgtgccggtgtcaacgacggatttttaggtcctctcatcccctatatcttatccacgttcagcattggtacgggtgaagtcgcagccatttatttctcaacgttcgcaggctggctcttagctgcggtaacaaaccccattctcacagctcatctaacactcggccaactcctacaacttggtgcctttctccagctcatctcccaattcatgagagtctggggcccattgccgttattcatcgtatcattcttcatacaatctctcgggatggcatatcaagactcccactccaacaccttcgtcagcagcttgaagaatgtgccccatcgatggctgggattcatccatgcttgttatgcgttgggtacgttcatcggaccacttatcgctactgctattgcgaatagtgagaatacgctgtctattgctggttggaagaggtcctatttcgtgctgattggcatctttttcctggacgtcgttggagttgcgtatacgttcagggatacgctgttcaccagattgaatacggatgaggcgaaaggtcagaagaggagtaggacggcactcatggatatggcgagacttttgaagtcgaagacgctttggttgttgagtatatactacttctttgaactaggcgccgttttcacggcgggcggttgggtcgtcgaatacttgacaacagtcaggggaggggacttggcgaaagtcgggtatgttccgactggcttctacggtggtttgttagcgggcagattactgcttcctgaaccgacatatcgatttggtgagcaaagaatggtgctggtctaccatgtatttgctgtggcacttcaactcgtcttctggttgcaacccaatatcatcggaagtgccatcgcgctcagcttcattgggttcttcattggtcctttctttgctactggtatgtcagtcgcctctaaattattccctcgcgcatctcaaccggcagcactaggcttcatcttcgtcatcgctcaagccggatctgctctgtttccatcaatcacaggcttgatcgctagaggttcagacgtgggtgtgctgcagcctattgtgctcgcgctatttgtggctggcgggatcatttggtggatgatacccaatgtcccggctcgcgatgaatgaacttgttaaagtctcatagcaaggttgcacgtcctacgtcgcaataccgtcggcaaggagactggtgatataattgttaaatgcattcgtgtgcgagaaagaaatagcgcaagtagtaatgtccaccgaagctgaatctcaacccttc

SEQ ID NO: 14267 - DNA, 2649 bp, Muscodor strobelii
  misc_feature: SGI cDNA ID NO. 564698
  misc_feature: Encodes the peptide sequence at SEQ ID NO 14268
atgggtgccagtgattccaagctcgtcttcaagaagggcatcttcaggctgtccgaggagcggcacattcccgccgacgatccctactggacctctttctgggagctgcccgaatcctccgacgatgtcttcagtctcttctcgacggccgacatccgccgcactcgcgatagggcaatagagaacctcgagacactgatactggctgtcacctcgcgcctcttcatactgcgacaccacccatccttccccgattccgagtttgcgcccgagcgggacgccctcaactgcatccgcgtgctcacccgcatactgccctatctctacgaagccgaccacctgcaaggctgggaggacaagttcttctggggcacgaggaggaaacgcacaagaaaatcagctattgctaatgaagtactgttcgatggagctcaggagtctgaggtcgactccaaggcgcccgtcgacgagttcgaggatgcgaagccccttgctgaggaactcatagacacactgatcgacctgctcttcttctccgacctatcggtgcccagacagcctcatggaaagcccaaggtcacctatgccatctggcagagcggcgtcggctgcaataccgctgtgcccacgacaaaggagtacgagagcaaccgttgtgagatcctgcgcctgctcttgaccttgacaagccagagcatgtacatgtctcccgctctgctccccaccaaaggaacaaaggccttgacatatatctgcacgtgtccggacaagcagaccgtgctctccgtgctatgctctttgctgaataccacattgaagtataatcccgcgagttggcgagttccgatcaataccctcgtcttcaaagaccccaaggaggttctcatcacatatactctccactttctcttggtcattttgctatatcctatacccgaaccgccaacagggcctacacccaagaattactaccgccatttcctcggacgtcttcaccggcctcaagactttcagttcattgttgatggcatgacacgaatactcaaccagcccatacaagccaatgcctcctatatacctggcactcaggctacagcgagattctcaccagagattatcatgctattctgggaggtcacccaatgcaataagcgctttaggtcgtacatgatcgacacaaatcgcgcccacgactttgtcattctcatcctcttctatgctaccgagtacaagctggatgcctcgaagcagggcgtcgtacgaatgtgtgccttcctcttacagaccctgagtgtcgagaagaattttggcatcaatctcaataagagctttgacaaccaggataccttgcctccagtcatcaggatcccgggtttcaaggggacttatgctgacttccttatccagtccatctataatctcatcacaagaagccagggcaagctctctgctatatacccagcactgttagcggtggtaaacaatgtctcggcctatctggaaggcatcagcaggacatcatgttcaaagttgctgcagttgttcaactcgatgtcctctccttcatttttactagcgaacgatagtaatcatgttttgttgagctcgctcttagagtccatgaatgctattatcgagcatcaatatgggaaaaatcccaatttcatttactttgttctgaagaataagaaacgtttcgaggcattacggagtttcacgttagagagcggacaagaagaactagaacgacgaaaccgtctcagaaaagaaaatggacagccagtcgatccattcgacaatagttcaaggcgaagctctgtcgagagcttgcgcagtccgactgcagcaacggcaccgaaaccaccagctctcagcaatgtaccggaagaggacgacacctttgctatcggcgatgatgaagatgaggacagtgacgaagatgaacaaccgactccagcccagtcaagccccagcgagaacccttcacgtgcctcatccgtagcagacgtcgatgatgctgttccaccacagctgaggggtatgtcggaaaaggctcgaggcaagcgtcctgctggcatgccggcattttccagacagaacagcactacaagcttaggaggctactccgcagccggcgggtccacctctggagtattcgagccatccgcggattggatagagacatggctcccggaacttcctctccatacaatactcacagtcatccaacaactcaccgttctcatcgaccgtcaaggtctcagtgcggacgttcccacaccagctacgctccaagccattcgagacgcggatctcgttgccattgagccatcgccagtccgagtccaaatatttgagtggtctcctctcgcactaggctggtacgagtcgctcctctggagcttcgcattcgctagcgagatgcaggtcgcgaagggcacggtcggcatatggaatggcactgctatcaaactattcagagtccaggagacggctcccgagggcccgaccctgacctcgccacgaggcgctgtggatgcggttggtagtaatattgtgaaccgaatcggatcaattaatctacgtggtgcgcctggaacgcccggttcgcctagtttggcaccgcagcggcctgctcctggcgcttag

SEQ ID NO: 14268 - protein, 882 aa, Muscodor strobelii
  misc_feature: SGI Peptide ID NO. 564698
  misc_feature (1)..(862): NCBI GI: 256731025 Blast Desc: NECHADRAFT_48617 [Nectria haematococca mpVI 77-13-4]
  misc_feature (1)..(878): NCBI GI: 116199169 Blast Desc: CHGG_07740 [Chaetomium globosum CBS 148.51] gi|88179019|gb|EAQ86487.1| CHGG_07740 [Chaetomium globosum CBS 148.51]
  misc_feature (1)..(862): NCBI GI: 171694061 Blast Desc: protein product [Podospora anserina] gi|170946979|emb|CAP73783.1| protein product [Podospora anserina]
  misc_feature (1)..(863): NCBI GI: 189210052 Blast Desc: conserved [Pyrenophora tritici-repentis Pt-1C-BFP] gi|187977451|gb|EDU44077.1| conserved [Pyrenophora tritici-repentis Pt-1C-BFP]
  misc_feature (1)..(864): NCBI GI: 238504982 Blast Desc: AFLA_098470 [Aspergillus flavus NRRL3357] gi|220689834|gb|EED46184.1| AFLA_098470 [Aspergillus flavus NRRL3357]
  misc_feature (1)..(861): NCBI GI: 261202370 Blast Desc: conserved [Ajellomyces dermatitidis SLH14081] gi|239590496|gb|EEQ73077.1| conserved [Ajellomyces dermatitidis SLH14081]
  misc_feature (1)..(861): NCBI GI: 239612223 Blast Desc: conserved [Ajellomyces dermatitidis ER-3]
  misc_feature (1)..(870): NCBI GI: 242792787 Blast Desc: conserved [Talaromyces stipitatus ATCC 10500] gi|218718615|gb|EED18035.1| conserved [Talaromyces stipitatus ATCC 10500]
  misc_feature (1)..(863): NCBI GI: 212535332 Blast Desc: conserved [Penicillium marneffei ATCC 18224] gi|210070221|gb|EEA24311.1| conserved [Penicillium marneffei ATCC 18224]
  misc_feature (1)..(873): NCBI GI: 255949188 Blast Desc: Pc22g14370 [Penicillium chrysogenum Wisconsin 54-1255] gi|211592378|emb|CAP98725.1| Pc22g14370 [Penicillium chrysogenum Wisconsin 54-1255]
MGASDSKLVFKKGIFRLSEERHIPADDPYWTSFWELPESSDDVFSLFSTADIRRTRDRAIENLETLILAVTSRLFILRHHPSFPDSEFAPERDALNCIRVLTRILPYLYEADHLQGWEDKFFWGTRRKRTRKSAIANEVLFDGAQESEVDSKAPVDEFEDAKPLAEELIDTLIDLLFFSDLSVPRQPHGKPKVTYAIWQSGVGCNTAVPTTKEYESNRCEILRLLLTLTSQSMYMSPALLPTKGTKALTYICTCPDKQTVLSVLCSLLNTTLKYNPASWRVPINTLVFKDPKEVLITYTLHFLLVILLYPIPEPPTGPTPKNYYRHFLGRLHRPQDFQFIVDGMTRILNQPIQANASYIPGTQATARFSPEIIMLFWEVTQCNKRFRSYMIDTNRAHDFVILILFYATEYKLDASKQGVVRMCAFLLQTLSVEKNFGINLNKSFDNQDTLPPVIRIPGFKGTYADFLIQSIYNLITRSQGKLSAIYPALLAVVNNVSAYLEGISRTSCSKLLQLFNSMSSPSFLLANDSNHVLLSSLLESMNAIIEHQYGKNPNFIYFVLKNKKRFEALRSFTLESGQEELERRNRLRKENGQPVDPFDNSSRRSSVESLRSPTAATAPKPPALSNVPEEDDTFAIGDDEDEDSDEDEQPTPAQSSPSENPSRASSVADVDDAVPPQLRGMSEKARGKRPAGMPAFSRQNSTTSLGGYSAAGGSTSGVFEPSADWIETWLPELPLHTILTVIQQLTVLIDRQGLSADVPTPATLQAIRDADLVAIEPSPVRVQIFEWSPLALGWYESLLWSFAFASEMQVAKGTVGIWNGTAIKLFRVQETAPEGPTLTSPRGAVDAVGSNIVNRIGSINLRGAPGTPGSPSLAPQRPAPGA

SEQ ID NO: 14269 - DNA, 3241 bp, Muscodor strobelii
  misc_feature: SGI EST ID NO. CUFF.34011.0
  misc_feature: Variant of the nucleotide sequence at SEQ ID NO 14267
ctgaaattgcatgctaccgaataaccccccatgtatcgataagaccgtgttcatgaatgtgccattccattcatcgatgcgaaagtagatctggcatcttgttgctgttgctattgctgatgatcactgccctacgtgacacgataagcccccgctgctacagtcactgtggtgtatctgagcgctggtctgaaagctgaggctccccggtcagggttctggcccagcccaacactgcacctaccgtgttatcttggtatatatctgccacgcaacgacgagataccttgagtctcacctagtcgactctcgtagcgcgaggcagcaatggtgtgatctgcccgcgatgggtgccagtgattccaagctcgtcttcaagaagggcatcttcaggctgtccgaggagcggcacattcccgccgacgatccctactggacctctttctgggagctgcccgaatcctccgacgatgtcttcagtctcttctcgacggccgacatccgccgcactcgcgatagggcaatagagaacctcgagacactgatactggctgtcacctcgcgcctcttcatactgcgacaccacccatccttccccgattccgagtttgcgcccgagcgggacgccctcaactgcatccgcgtgctcacccgcatactgccctatctctacgaagccgaccacctgcaaggctgggaggacaagttcttctggggcacgaggaggaaacgcacaagaaaatcagctattgctaatgaagtactgttcgatggagctcaggagtctgaggtcgactccaaggcgcccgtcgacgagttcgaggatgcgaagccccttgctgaggaactcatagacacactgatcgacctgctcttcttctccgacctatcggtgcccagacagcctcatggaaagcccaaggtcacctatgccatctggcagagcggcgtcggctgcaataccgctgtgcccacgacaaaggagtacgagagcaaccgttgtgagatcctgcgcctgctcttgaccttgacaagccagagcatgtacatgtctcccgctctgctccccaccaaaggaacaaaggccttgacatatatctgcacgtgtccggacaagcagaccgtgctctccgtgctatgctctttgctgaataccacattgaagtataatcccgcgagttggcgagttccgatcaataccctcgtcttcaaagaccccaaggaggttctcatcacatatactctccactttctcttggtcattttgctatatcctatacccgaaccgccaacagggcctacacccaagaattactaccgccatttcctcggacgtcttcaccggcctcaagactttcagttcattgttgatggcatgacacgaatactcaaccagcccatacaagccaatgcctcctatatacctggcactcaggctacagcgagattctcaccagagattatcatgctattctgggaggtcacccaatgcaataagcgctttaggtcgtacatgatcgacacaaatcgcgcccacgactttgtcattctcatcctcttctatgctaccgagtacaagctggatgcctcgaagcagggcgtcgtacgaatgtgtgccttcctcttacagaccctgagtgtcgagaagaattttggcatcaatctcaataagagctttgacaaccaggataccttgcctccagtcatcaggatcccgggtttcaaggggacttatgctgacttccttatccagtccatctataatctcatcacaagaagccagggcaagctctctgctatatacccagcactgttagcggtggtaaacaatgtctcggcctatctggaaggcatcagcaggacatcatgttcaaagttgctgcagttgttcaactcgatgtcctctccttcatttttactagcgaacgatagtaatcatgttttgttgagctcgctcttagagtccatgaatgctattatcgagcatcaatatgggaaaaatcccaatttcatttactttgttctgaagaataagaaacgtttcgaggcattacggagtttcacgttagagagcggacaagaagaactagaacgacgaaaccgtctcagaaaagaaaatggacagccagtcgatccattcgacaatagttcaaggcgaagctctgtcgagagcttgcgcagtccgactgcagcaacggcaccgaaaccaccagctctcagcaatgtaccggaagaggacgacacctttgctatcggcgatgatgaagatgaggacagtgacgaagatgaacaaccgactccagcccagtcaagccccagcgagaacccttcacgtgcctcatccgtagcagacgtcgatgatgctgttccaccacagctgaggggtatgtcggaaaaggctcgaggcaagcgtcctgctggcatgccggcattttccagacagaacagcactacaagcttaggaggctactccgcagccggcgggtccacctctggagtattcgagccatccgcggattggatagagacatggctcccggaacttcctctccatacaatactcacagtcatccaacaactcaccgttctcatcgaccgtcaaggtctcagtgcggacgttcccacaccagctacgctccaagccattcgagacgcggatctcgttgccattgagccatcgccagtccgagtccaaatatttgagtggtctcctctcgcactaggctggtacgagtcgctcctctggagcttcgcattcgctagcgagatgcaggtcgcgaagggcacggtcggcatatggaatggcactgctatcaaactattcagagtccaggagacggctcccgagggcccgaccctgacctcgccacgaggcgctgtggatgcggttggtagtaatattgtgaaccgaatcggatcaattaatctacgtggtgcgcctggaacgcccggttcgcctagtttggcaccgcagcggcctgctcctggcgcttagggtgtctttggatggggtgatgtgcataaagtgcacgacgaggagtctgaagttcgagctgctttgcactttgctgtctggtgatactggggatgtgggagtttggtgatttatgtgcatgagaggcattggcgtagttggagtatttagctggaggagttgcataatattactactacttcatattttgagaaattcttgatatttgtgtccgtatattaaacgactgatgttgttatgatgctg

SEQ ID NO: 14270 - DNA, 1695 bp, Muscodor strobelii
  misc_feature: SGI cDNA ID NO. 564699
  misc_feature: Encodes the peptide sequence at SEQ ID NO 14271
atggatgatgccatcagcgctctactgaacgaaggaatatcagtgctgaagattggcgacaaggaatacgagcgctctgtggcagcttcaaacctgctataccgattctttaggcccggctgcgtagtgcagcccacgcagatctccgaggttcaaaatgtcatccgtgttgccaaatctcacggaatcgccgtaacaatcaagaacggcggccactcgtacacggggtcctctatcgcaaaagacggcgtctctctcgacctgtccagactaaacaacgtcaccgtcaacatggacaccgagaccatgattctgcagggcggtgcactctgggcccatgcgtacaaagccctcgtcaacggcagtcacagcggctaccttgtcaacggtgggcgatgtcccaccgtgggagtcagcggctttattctcggaggcggcttgggtccattcactagaagtttcggcatgggctgcgatgctctcaaagaagcgaccatagttaccgctgacgcgcaggtagtgaaagtgcgggataccgacaagcgcagcatgaaggagggacggcttttctgggctctctgcggtgctggaggtggcaactttggcgtcgtggtcgaaatgaaactcaagcttcaaaggttgtcagacgacggtggtatcgtagtttcgggtcagtatacctggtatccgaagctggacaacgcggcaatgcaagagtttatggacaccatggatgatttctattccacagactggcctgaccagctcacgattgacactatctggaggtgcgaaccgtcacggactaacagcgagctaggcgtcgcattcttcgtccattatgacgggggcaagatagccttcgatcagctgattgacagctcaatccatcaagccgatctcgccaaacagcttaaacgccgctctctcgcggaagattctactctttacttacacgagtcccttgtgacgcaatggtcagaagagactactcgggcgtttcccacaaacccatcctacaggatctactgctcgtttgtgttcgatcaggccaaagacacagtctcgaaggttacgtctaccatccgtgaggaggtaaaggcgtttcgggagcaatttcccgacgaacagatcttgctagaagtcacgtggatccatggaggaggaaaggcaactaagaaacgggccgccaacgccaccgccttcccgtggcgcgagggtgtctatttcgtgtatgccatgatccggtggcaagataagtggctggagcacgacatgcgacagttcctacggcaatttcgcacaaagctccgaccatactctataaacgggctggcggcgttcgttaacttccccgacgagactctgtgtgagcacgtatacgagcgcgcctactatggcgacaatcatgtcgagctgagacgcgtgaagcgcctttgggataaagatgagttcttcagatgggatcagggcgtcttgttaccccagccctatcctgatactggcgcggctgcgcgtgatcaaggaacaaatcagcgtgacgatatcacgcattgcgacgacattataccactagattcacgtgcaggaaggcaatgggaatatttcgagccacctccagcgctggagatccccaacttggacgtcacaagagggatacggatggttcgaacgttaactgacttgggattttag

SEQ ID NO: 14271 - protein, 564 aa, Muscodor strobelii
  misc_feature: SGI Peptide ID NO. 564699
  misc_feature (447)..(493): Pfam Id: PF08031 Pfam Desc: Berberine and berberine like
  misc_feature (39)..(177): Pfam Id: PF01565 Pfam Desc: FAD binding domain
  misc_feature (5)..(564): NCBI GI: 238503005 Blast Desc: conserved [Aspergillus flavus NRRL3357] gi|220691546|gb|EED47894.1| conserved [Aspergillus flavus NRRL3357]
  misc_feature (5)..(564): NCBI GI: 85106124 Blast Desc: NCU07970 [Neurospora crassa OR74A] gi|28923698|gb|EAA32867.1| conserved [Neurospora crassa OR74A]
  misc_feature (13)..(496): NCBI GI: 256726988 Blast Desc: NECHADRAFT_12886 [Nectria haematococca mpVI 77-13-4]
  misc_feature (8)..(488): NCBI GI: 169764263 Blast Desc: [Aspergillus oryzae RIB40] gi|83764457|dbj|BAE54601.1| protein product [Aspergillus oryzae]
  misc_feature (8)..(488): NCBI GI: 238504516 Blast Desc: conserved [Aspergillus flavus NRRL3357] gi|220690960|gb|EED47309.1| conserved [Aspergillus flavus NRRL3357]
  misc_feature (1)..(517): NCBI GI: 116198609 Blast Desc: CHGG_07460 [Chaetomium globosum CBS 148.51] gi|88178739|gb|EAQ86207.1| CHGG_07460 [Chaetomium globosum CBS 148.51]
  misc_feature (1)..(464): NCBI GI: 171692621 Blast Desc: protein product [Podospora anserina] gi|170946259|emb|CAP73060.1| protein product [Podospora anserina]
  misc_feature (1)..(312): NCBI GI: 169762938 Blast Desc: [Aspergillus oryzae RIB40] gi|83770397|dbj|BAE60530.1| protein product [Aspergillus oryzae]
  misc_feature (1)..(312): NCBI GI: 238488753 Blast Desc: 6-hydroxy-D-nicotine oxidase, [Aspergillus flavus NRRL3357] gi|220698002|gb|EED54342.1| 6-hydroxy-D-nicotine oxidase, [Aspergillus flavus NRRL3357]
  misc_feature (15)..(504): NCBI GI: 46116112 Blast Desc: FG03898.1 [Gibberella zeae PH-1]
MDDAISALLNEGISVLKIGDKEYERSVAASNLLYRFFRPGCVVQPTQISEVQNVIRVAKSHGIAVTIKNGGHSYTGSSIAKDGVSLDLSRLNNVTVNMDTETMILQGGALWAHAYKALVNGSHSGYLVNGGRCPTVGVSGFILGGGLGPFTRSFGMGCDALKEATIVTADAQVVKVRDTDKRSMKEGRLFWALCGAGGGNFGVVVEMKLKLQRLSDDGGIVVSGQYTWYPKLDNAAMQEFMDTMDDFYSTDWPDQLTIDTIWRCEPSRTNSELGVAFFVHYDGGKIAFDQLIDSSIHQADLAKQLKRRSLAEDSTLYLHESLVTQWSEETTRAFPTNPSYRIYCSFVFDQAKDTVSKVTSTIREEVKAFREQFPDEQILLEVTWIHGGGKATKKRAANATAFPWREGVYFVYAMIRWQDKWLEHDMRQFLRQFRTKLRPYSINGLAAFVNFPDETLCEHVYERAYYGDNHVELRRVKRLWDKDEFFRWDQGVLLPQPYPDTGAAARDQGTNQRDDITHCDDIIPLDSRAGRQWEYFEPPPALEIPNLDVTRGIRMVRTLTDLGF

SEQ ID NO: 14272 - DNA, 1393 bp, Muscodor strobelii
  misc_feature: SGI EST ID NO. CUFF.34005.0
  misc_feature: Variant of the nucleotide sequence at SEQ ID NO 14270
aagtttcggcatgggctgcgatgctctcaaagaagcgaccatagttaccgctgacgcgcaggtagtgaaagtgcgggataccgacaagcgcagcatgaaggagggacggcttttctgggctctctgcggtgctggaggtggcaactttggcgtcgtggtcgaaatgaaactcaagcttcaaaggttgtcagacgacggtggtatcgtagtttcgggtcagtatacctggtatccgaagctggacaacgcggcaatgcaagagtttatggacaccatggatgatttctattccacagactggcctgaccagctcacgattgacactatctggaggtgcgaaccgtcacggactaacagcgagctaggcgtcgcattcttcgtccattatgacgggggcaagatagccttcgatcagctgattgacagctcaatccatcaagccgatctcgccaaacagcttaaacgccgctctctcgcggaagattctactctttacttacacgagtcccttgtgacgcaatggtcagaagagactactcgggcgtttcccacaaacccatcctacaggatctactgctcgtttgtgttcgatcaggccaaagacacagtctcgaaggttacgtctaccatccgtgaggaggtaaaggcgtttcgggagcaatttcccgacgaacagatcttgctagaagtcacgtggatccatggaggaggaaaggcaactaagaaacgggccgccaacgccaccgccttcccgtggcgcgagggtgtctatttcgtgtatgccatgatccggtggcaagataagtggctggagcacgacatgcgacagttcctacggcaatttcgcacaaagctccgaccatactctataaacgggctggcggcgttcgttaacttccccgacgagactctgtgtgagcacgtatacgagcgcgcctactatggcgacaatcatgtcgagctgagacgcgtgaagcgcctttgggataaagatgagttcttcagatgggatcagggcgtcttgttaccccagccctatcctgatactggcgcggctgcgcgtgatcaaggaacaaatcagcgtgacgatatcacgcattgcgacgacattataccactagattcacgtgcaggaaggcaatgggaatatttcgagccacctccagcgctggagatccccaacttggacgtcacaagagggatacggatggttcgaacgttaactgacttgggattttagttaaagaaaagacttaactaaataaactagacttataatgtattatggcttaatcgaaatgcgtgtgggatgcgtacgcattcgacctatatatatagtagtggttatgtagttctgacaacataggtatagtagtatgaagttcattcaaaa

SEQ ID NO: 14273 - DNA, 729 bp, Muscodor strobelii
  misc_feature: SGI cDNA ID NO. 564700
  misc_feature: Encodes the peptide sequence at SEQ ID NO 14274
atggccatcgaatcctttacagggcccttgacagcgggggcaatatcggactggttaagcagatgcgaagaggacttcgaggcgtacgtcgatgcaaaccccaatacaagcctgaccagcaagcagaagatccacaaagccatggcatcagtctcgcgcactcatgaagattcaaagcgcatttccacatggtacacccagaaccgtcggactctcgacaatgacaagtgggatactttccgggacaaggtcaaagagcatgccctgggtaaaggatggcgcatcaaagtgttgcaagatttctacacctactatcaagggagcgcgagtctttcggattatatcgacaagttcgaggagctgagatatactgtcgcccgaacaagcaacctgacagaggtggataatatggcgtacaagtgccaccttcttttccacagtcggcccgagttggtccaaaaattcatacacgaaaaaaagaatgatcaacaattcatcgactacgacgttggtgacatcacagccgcgcttcaggacttcgacgccgaggtcccgtgcccaacaccgacgcctgcaccaacgcctgcgaacacatctacgtcaaactcctcgacagccccagcgcaggtcgacgttcctccaacagccgctagtataggatcgtacatgacaagcggtctctttgggaccacttcttggacatctgacaaccgtcaattgctactataa

SEQ ID NO: 14274 - protein, 242 aa, Muscodor strobelii
  misc_feature: SGI Peptide ID NO. 564700
  misc_feature (1)..(161): NCBI GI: 242816786 Blast Desc: conserved [Talaromyces stipitatus ATCC 10500] gi|218713281|gb|EED12705.1| conserved [Talaromyces stipitatus ATCC 10500]
MAIESFTGPLTAGAISDWLSRCEEDFEAYVDANPNTSLTSKQKIHKAMASVSRTHEDSKRISTWYTQNRRTLDNDKWDTFRDKVKEHALGKGWRIKVLQDFYTYYQGSASLSDYIDKFEELRYTVARTSNLTEVDNMAYKCHLLFHSRPELVQKFIHEKKNDQQFIDYDVGDITAALQDFDAEVPCPTPTPAPTPANTSTSNSSTAPAQVDVPPTAASIGSYMTSGLFGTTSWTSDNRQLLL

SEQ ID NO: 14275 - DNA, 1648 bp, Muscodor strobelii
  misc_feature: SGI EST ID NO. CUFF.34082.1
  misc_feature: Variant of the nucleotide sequence at SEQ ID NO 14273
aatcaataggtcaatatacggctgcgcatgcggggttttggattgcgctgggcctaatgtaaccttcctcgccagattcaatggctgtgtaggtggcctcgtatgcagcgattctgatcttagtcttgggcattaacgaaagcggtggaagctgaagaagtaaaattttcagctgctgtttgaacgtcttacgcactttttataatagaggttctcctacgtttcccggcacgtgttggcatttggagtcgaactcagcaactatatagtatatctgcatctgtctctgttttctcgtatctcagacaacgcgacacatccgggccactaaagatctcattaagcatggccatcgaatcctttacagggcccttgacagcgggggcaatatcggactggttaagcagatgcgaagaggacttcgaggcgtacgtcgatgcaaaccccaatacaagcctgaccagcaagcagaagatccacaaagccatggcatcagtctcgcgcactcatgaagattcaaagcgcatttccacatggtacacccagaaccgtcggactctcgacaatgacaagtgggatactttccgggacaaggtcaaagagcatgccctgggtaaaggatggcgcatcaaagtgttgcaagatttctacacctactatcaagggagcgcgagtctttcggattatatcgacaagttcgaggagctgagatatactgtcgcccgaacaagcaacctgacagaggtggataatatggcgtacaagtgccaccttcttttccacagtcggcccgagttggtccaaaaattcatacacgaaaaaaagaatgatcaacaattcatcgactacgacgttggtgacatcacagccgcgcttcaggacttcgacgccgaggtcccgtgcccaacaccgacgcctgcaccaacgcctgcgaacacatctacgtcaaactcctcgacagccccagcgcaggtcgacgttcctccaacagccgctagtataggatcgtacatgacaagcggtctctttgggaccactgtcagtactagtgggaccgataccgtgttctcctgcttggagcatatgccaacctcgtccaccagtcttggacatctgacaaccgtcaattgctactataacaacgaaagtaccaagccccaaattcagttgatttatacggtcgttgccaacatttccggtcactattatcctcgggattatcacgatactagagccagcaagaccatcacccttacaacaggggaatatctgacccaggtaatcatgacgcgagacaattccctttctgctgttacctctatcagacttataacatctctggacaaatcgctgttcctgggcgttacaaaaggagaaacgatggctttcacagcacccgagaattggcggattgttggttttcatggtacagctgggtcctccatgacggaggcaggtgtgactcgttacccaatcactaagcttggggtaatttatgcgccaattccgtcatgattaccttcatacatgtcgttttgaatcgtattgccttagggcgccggggttactcgaggttctataaatatagaaaatattaagctctagatttatacagcatgaaattagactcaacttcttagctgcccct

SEQ ID NO: 14276 - DNA, 1050 bp, Muscodor strobelii
  misc_feature: SGI cDNA ID NO. 564701
  misc_feature: Encodes the peptide sequence at SEQ ID NO 14277
atgcctgtcaaatctgcgtacgatcctaaggacatgcagttccgccaccttggaccaactggtctcaaggtctcggttctgtccctcggcggctggctcacttacggtggcacacagaagggcgagatcgtcaagaagtgtctcgagacggcctggagccatggaatcaacaccttcgacacggctgagacgtatgccgccggcgagtctgagatcgagatgggtcaagcactcaaggagcttgactggccccgcgatgagtatgtcctgaccaccaagatcttcttcggtaccggccgtaaggagcccaacactcgcggtcttagccgtaagcacgtcgtcgagggcctcaagagctcgcttgagcgtctgcagcaaccctatgtcgatgtcgtttttgctcatcggcctgactatgctacgcccatgcgtgagattgtggaggggtttacacaggtcatccgaaacctcaaccttgcatactactggggcacttcggagtggagcgctgtccagatcatggaggcaacgcagattgctgagaagtacaacctcatcgcacctgttgtagagcaaccgcagtacaatgctttccaccgccagcgattcgaggtcgagtatgcacctctctacgaccagtttaagtacggcacgaccatctggtcgccccttgcttcgggcctgttgaccggcaagtacaacaacggcgtccctgagggctcgcgtttcgccaaccatggcgatttcttcgacagcaccatcaagtctctgcaaaccgaggagggcaaggccaacatcgagaaggtcaagaagctgacgtctatcgctgagcgtctgggcggttcgatggcatctctggcactagcttggacaatcaagaaccccaacgtctctaccgtcatcctaggtgccacaaaggtcgagcagatcgaggacaatgttaaggctttgaagcttgcggagaagatcacgcctgagattatggaggagatcgagaagattcttgacaataccccggccaagcctgctgcctttggacgtgagcgatag

SEQ ID NO: 14277 - protein, 349 aa, Muscodor strobelii
  misc_feature: SGI Peptide ID NO. 564701
  misc_feature (18)..(336): Pfam Id: PF00248 Pfam Desc: Aldo/keto reductase family
  misc_feature (1)..(349): NCBI GI: 261360429 Blast Desc: voltage-gated potassium channel subunit beta-3 [Verticillium albo-atrum VaMs.102]
  misc_feature (1)..(349): NCBI GI: 46115248 Blast Desc: FG03466.1 [Gibberella zeae PH-1]
  misc_feature (3)..(349): NCBI GI: 85119118 Blast Desc: voltage-gated potassium channel beta-2 subunit [Neurospora crassa OR74A] gi|28927380|gb|EAA36333.1| voltage-gated potassium channel beta-2 subunit [Neurospora crassa
  misc_feature (1)..(349): NCBI GI: 171694776 Blast Desc: protein product [Podospora anserina] gi|170947630|emb|CAP59792.1| protein product [Podospora anserina]
  misc_feature (3)..(347): NCBI GI: 116182766 Blast Desc: conserved [Chaetomium globosum CBS 148.51] gi|88186308|gb|EAQ93776.1| conserved [Chaetomium globosum CBS 148.51]
  misc_feature (3)..(339): NCBI GI: 189203973 Blast Desc: voltage-gated potassium channel subunit beta-1 channel subunit beta-1 [Pyrenophora tritici-repentis Pt-1C-BFP] gi|187985421|gb|EDU50909.1| voltage-gated potassium channel
  misc_feature (1)..(339): NCBI GI: 169602781 Blast Desc: SNOG_04393 [Phaeosphaeria nodorum SN15] gi|160706253|gb|EAT88153.2| SNOG_04393 [Phaeosphaeria nodorum SN15]
  misc_feature (7)..(347): NCBI GI: 58271448 Blast Desc: Voltage-gated potassium channel beta-2 subunit [Cryptococcus neoformans var. neoformans JEC21] gi|57229139|gb|AAW45573.1| Voltage-gated potassium channel beta-2
  misc_feature (7)..(347): NCBI GI: 134115166 Blast Desc: CNBH3330 [Cryptococcus neoformans var. neoformans B-3501A] gi|50256509|gb|EAL19234.1| CNBH3330 [Cryptococcus neoformans var. neoformans B-3501A]
  misc_feature (7)..(347): NCBI GI: 71024437 Blast Desc: UM06301.1 [Ustilago maydis 521] gi|46097697|gb|EAK82930.1| UM06301.1 [Ustilago maydis 521]
  misc_feature (13)..(329): SWISSPROT Homolog: EC 1.1.1.91 Aryl-alcohol dehydrogenase (NADP(+))
MPVKSAYDPKDMQFRHLGPTGLKVSVLSLGGWLTYGGTQKGEIVKKCLETAWSHGINTFDTAETYAAGESEIEMGQALKELDWPRDEYVLTTKIFFGTGRKEPNTRGLSRKHVVEGLKSSLERLQQPYVDVVFAHRPDYATPMREIVEGFTQVIRNLNLAYYWGTSEWSAVQIMEATQIAEKYNLIAPVVEQPQYNAFHRQRFEVEYAPLYDQFKYGTTIWSPLASGLLTGKYNNGVPEGSRFANHGDFFDSTIKSLQTEEGKANIEKVKKLTSIAERLGGSMASLALAWTIKNPNVSTVILGATKVEQIEDNVKALKLAEKITPEIMEEIEKILDNTPAKPAAFGRER

SEQ ID NO: 14278 - DNA, 1635 bp, Muscodor strobelii
  misc_feature: SGI EST ID NO. CUFF.34017.0
  misc_feature: Variant of the nucleotide sequence at SEQ ID NO 14276
gttgcgatttgctaattattaatgcctaccacgaataatgggtctagcgcgtcatacatggagcaacccatgttattgcctctatcacccctcaacgttcctgcagctataaggtaaaaaagctcccgcggcggggaagagcgcctgagacatgatcggtggttgcttaaggtagcaagtagataaatagagtcgtgcactcccgtctctttctgttttcatgtatcgctctgcccgcactctcatcgccaacctacccaaaaccaaaattcaagtacacaccatcagaactatcaccatgcctgtcaaatctgcgtacgatcctaaggacatgcagttccgccaccttggaccaactggtctcaaggtctcggttctgtccctcggcggctggctcacttacggtggcacacagaagggcgagatcgtcaagaagtgtctcgagacggcctggagccatggaatcaacaccttcgacacggctgagacgtatgccgccggcgagtctgagatcgagatgggtcaagcactcaaggagcttgactggccccgcgatgagtatgtcctgaccaccaagatcttcttcggtaccggccgtaaggagcccaacactcgcggtcttagccgtaagcacgtcgtcgagggcctcaagagctcgcttgagcgtctgcagcaaccctatgtcgatgtcgtttttgctcatcggcctgactatgctacgcccatgcgtgagattgtggaggggtttacacaggtcatccgaaacctcaaccttgcatactactggggcacttcggagtggagcgctgtccagatcatggaggcaacgcagattgctgagaagtacaacctcatcgcacctgttgtagagcaaccgcagtacaatgctttccaccgccagcgattcgaggtcgagtatgcacctctctacgaccagtttaagtacggcacgaccatctggtcgccccttgcttcgggcctgttgaccggcaagtacaacaacggcgtccctgagggctcgcgtttcgccaaccatggcgatttcttcgacagcaccatcaagtctctgcaaaccgaggagggcaaggccaacatcgagaaggtcaagaagctgacgtctatcgctgagcgtctgggcggttcgatggcatctctggcactagcttggacaatcaagaaccccaacgtctctaccgtcatcctaggtgccacaaaggtcgagcagatcgaggacaatgttaaggctttgaagcttgcggagaagatcacgcctgagattatggaggagatcgagaagattcttgacaataccccggccaagcctgctgcctttggacgtgagcgatagagggtttcactcttatgtcggctcggtcggggaacgggtgctaggctcggtcagtaataaaatagacgacaaagacggatatgaagatagtaatcctgagaccagacaaggagagcctcaagtaatgaagtaaaacgagcgaaagaaaaactacaatgcttacacttaataattgcatttcgtgcttattaagtcgattactcggtttgtagattgcaacgctgcttgcctttagtatgtatgtaatcaggctgtccatcttggcaacggaaacagctcaaatgtga

SEQ ID NO: 14279 - DNA, 1152 bp, Muscodor strobelii
  misc_feature: SGI cDNA ID NO. 564702
  misc_feature: Encodes the peptide sequence at SEQ ID NO 14280
atggagaacacacctccacctcagaaatcaccctcacatctctctccgcccgaagagcccggtcataggagacgaagtagtagtggctcggggagcatcctatccagaatcccattcctacgcacctcggacagcaaatcgagcctcaaagaatcgcaatcctcctcatcatcctctacaccaagccgcccaaccacagccgacggttcttctctaaatactcaaccaaaagcactggcagcagccatgtcccagcaaacaaagacacgcagacgtaagggctcactgcgcaaggtcgccctgctgggtcgaggcgcagcgagagaaaagcgagaacagaaagcccagtcgcaacaacagacactctccctcgacacatcgcagattctccagaaacagcaccaggtttcccctctctcacaagagcaataccgcagcccagaggaagtctcaaaaagcagcttaggcattggcctcggtctctccgacgacaacacaccacgcccttcgatggaaggtttcgcatcccacggcgcatccgtaataccatcaaccaacccatccacttcgtccttagacctcgaccaggccccaagcccaacaatatcctacacctcaacaacagacgaagaagacggcctcaccatgcccatgcccctacatgtcccatcgccattacgcccagacctcgcatctctctcctccggctcagaatcctacttccacaccccgtcacacctccgcgccccctccccaggcggatccctccaacgacgccgctcaacaagcaaacagcagcgcgctaaatctcccctagccctctccgggctcacgacaggatcaccggccctagcactagaggaagcagaccacgactacagcgagacagagtggtgggggtgggtaatactaatcgtgacctggttcgtcttcacgctgggcatgggctcatgcttaaatatctggtcatgggcctgggacgtcggatcaacgccttacgcaccgcccgaactagaagatgaccctaccttacctattgtcgggtattaccccgcgctcatgatacttacgagtatcatggcatgggtctgggtcgttattgcgtgggtgggcatgaagtattttagacatgccaagattagtggtgactaa

SEQ ID NO: 14280 - protein, 383 aa, Muscodor strobelii
  misc_feature: SGI Peptide ID NO. 564702
  misc_feature (17)..(383): NCBI GI: 154290232 Blast Desc: BC1G_15718 [Botryotinia fuckeliana B05.10] gi|150847822|gb|EDN23015.1| BC1G_15718 [Botryotinia fuckeliana B05.10]
  misc_feature (77)..(383): NCBI GI: 156041156 Blast Desc: SS1G_11557 [Sclerotinia sclerotiorum 1980] gi|154695940|gb|EDN95678.1| SS1G_11557 [Sclerotinia sclerotiorum 1980]
  misc_feature (17)..(379): NCBI GI: 116206550 Blast Desc: CHGG_02568 [Chaetomium globosum CBS 148.51] gi|88183165|gb|EAQ90633.1| CHGG_02568 [Chaetomium globosum CBS 148.51]
  misc_feature (10)..(383): NCBI GI: 171692095 Blast Desc: protein product [Podospora anserina] gi|170945996|emb|CAP72797.1| protein product [Podospora anserina]
  misc_feature (1)..(363): NCBI GI: 256731263 Blast Desc: NECHADRAFT_96067 [Nectria haematococca mpVI 77-13-4]
  misc_feature (83)..(383): NCBI GI: 261351493 Blast Desc: conserved [Verticillium albo-atrum VaMs.102]
  misc_feature (23)..(383): NCBI GI: 85098122 Blast Desc: NCU01253 [Neurospora crassa OR74A] gi|28922069|gb|EAA31337.1| NCU01253 [Neurospora crassa OR74A] gi|28950315|emb|CAD70845.1| [Neurospora crassa]
  misc_feature (33)..(364): NCBI GI: 46126155 Blast Desc: FG07455.1 [Gibberella zeae PH-1]
  misc_feature (207)..(383): NCBI GI: 67517823 Blast Desc: AN1091.2 [Aspergillus nidulans FGSC A4] gi|40747053|gb|EAA66209.1| AN1091.2 [Aspergillus nidulans FGSC A4]
  misc_feature (207)..(383): NCBI GI: 259488598 Blast Desc: TPA: conserved [Aspergillus nidulans FGSC A4]
MENTPPPQKSPSHLSPPEEPGHRRRSSSGSGSILSRIPFLRTSDSKSSLKESQSSSSSSTPSRPTTADGSSLNTQPKALAAAMSQQTKTRRRKGSLRKVALLGRGAAREKREQKAQSQQQTLSLDTSQILQKQHQVSPLSQEQYRSPEEVSKSSLGIGLGLSDDNTPRPSMEGFASHGASVIPSTNPSTSSLDLDQAPSPTISYTSTTDEEDGLTMPMPLHVPSPLRPDLASLSSGSESYFHTPSHLRAPSPGGSLQRRRSTSKQQRAKSPLALSGLTTGSPALALEEADHDYSETEWWGWVILIVTWFVFTLGMGSCLNIWSWAWDVGSTPYAPPELEDDPTLPIVGYYPALMILTSIMAWVWVVIAWVGMKYFRHAKISGD

SEQ ID NO: 14281 - DNA, 1669 bp, Muscodor strobelii
  misc_feature: SGI EST ID NO. CUFF.34020.0
  misc_feature: Variant of the nucleotide sequence at SEQ ID NO 14279
gaaaaggtcaagttgagatgtgataatggagctggaaataaagttgcatgcaagggggccaggggatcgacagggcaccacgccgcactaaaagcacggccaatgggcgctagaagcgcgtcccattacgacatgcattgtcctttcacggtaaactttatatcatccttaccttcaccaatcttcggaacaacaatcgccaagctgttcgcaatacctgtctgacggcttctcgctgataacgagtacaagagctatgatacggctatagtgtctttccaatcgcctcctaaaacgacacccacgcagagacctaacatagcacgatgcggatcgccgccgcactacctttccatcctccccaagatctgcgcattacagcgacgatatgacgatggagaacacacctccacctcagaaatcaccctcacatctctctccgcccgaagagcccggtcataggagacgaagtagtagtggctcggggagcatcctatccagaatcccattcctacgcacctcggacagcaaatcgagcctcaaagaatcgcaatcctcctcatcatcctctacaccaagccgcccaaccacagccgacggttcttctctaaatactcaaccaaaagcactggcagcagccatgtcccagcaaacaaagacacgcagacgtaagggctcactgcgcaaggtcgccctgctgggtcgaggcgcagcgagagaaaagcgagaacagaaagcccagtcgcaacaacagacactctccctcgacacatcgcagattctccagaaacagcaccaggtttcccctctctcacaagagcaataccgcagcccagaggaagtctcaaaaagcagcttaggcattggcctcggtctctccgacgacaacacaccacgcccttcgatggaaggtttcgcatcccacggcgcatccgtaataccatcaaccaacccatccacttcgtccttagacctcgaccaggccccaagcccaacaatatcctacacctcaacaacagacgaagaagacggcctcaccatgcccatgcccctacatgtcccatcgccattacgcccagacctcgcatctctctcctccggctcagaatcctacttccacaccccgtcacacctccgcgccccctccccaggcggatccctccaacgacgccgctcaacaagcaaacagcagcgcgctaaatctcccctagccctctccgggctcacgacaggatcaccggccctagcactagaggaagcagaccacgactacagcgagacagagtggtgggggtgggtaatactaatcgtgacctggttcgtcttcacgctgggcatgggctcatgcttaaatatctggtcatgggcctgggacgtcggatcaacgccttacgcaccgcccgaactagaagatgaccctaccttacctattgtcgggtattaccccgcgctcatgatacttacgagtatcatggcatgggtctgggtcgttattgcgtgggtgggcatgaagtattttagacatgccaagattagtggtgactaagattaaaggtatgagtggtaaagggggtgacgaggtctcgcctgctttagctaatgatatgagtaatgataatgagtatatttaccttgatcaatcgatcaaattgaaaatagcttgcatttg

SEQ ID NO: 14282 - DNA, 2103 bp, Muscodor strobelii
  misc_feature: SGI cDNA ID NO. 564703
  misc_feature: Elevated expression when VOC is produced
  misc_feature: Encodes the peptide sequence at SEQ ID NO 14283
atgccctttgatcctgcatggctggaggacctccagggacggccggagcacgccgtttcggctcacagttggctccttggtcaacaagacggacatgtgccgctaggtgagcacccgaatatctcacttgtcgacacatcgaagccttatgagtatgagccactcgaagactcgagcgaatggatccgcatactataccttctaccacctagagatgatgacgatagccttcgcgcggttctcatgccggtcaaacatagtcaggtccctgtatcagtcgagtacgagccagtatcctacgcgtggggcacggaggaccctatatccctattatacctcagcgaccctaagaaagaccgcttcttctgcttcccaattcgtcccaacctagagcacatgttacgagtcttccgcgaggagaaagaattacctttcctttggatcgatgctctctgcatagaccaaggccacaacaaggagaaggggttccaggttcagcatatggaccgtgtctatcgagaccgatacctacgaatttggctaggcggctcctcacaaactactaatcttgcccttgaaatcattaacgagagctgccgtcagctgaaagcaagggatgaccaagaacataggaaagtatggattgatctgagcggagatgacagatggtttaagcactggcaggcgatatgggacctattcggacgtccctggttctcacgccgctggattatccaggagctggtcttatgccggtctgcagagacctacataggccagcagcatttcccatgggcgtgcatctacggttttgccatcaacttgagccgtactaagcacgactggcaatctactgatctgttcgacccattcaatattagtcgaagtgaggctgtttttcgactggacttttgcgcgagaggagacttgtccaaactgacacttcaagttctcatcgaccgcttctcgcaatgcctagtcacagatccccgggacggtatttactcgcttttgcctttggcagccgacattgatcaatcggatcccaagtggttcccaagctattctagttcgaggcttgcagcagatatctttgaagaggttttctggcatgtcgtacgcacgacccgaagccttgacgtcatgtgtcgcagtataccagagagaagtcaagaggagacttattgtacctggcttccgtggtttggcggcccgaaaatggaggcgcagtctcgaagaattattcccacgtacataaaccgttctctgaccagttttagggaagctgattggatattccctttggccaaaacgtatagcgcgtcaggttcgcattcgcaaccgtttgcgagacgaatatggccttccggtatcgaagaggtcgaagaggaagtagagaaaggcataccgcgttttctgtgtcttagaggttgggtggttgatcaagttaaggcgatcggtcctcctatgattatggagcgaatcaatggccgggaagtacctttcattccatactcatggatcgaaatgatgggtcttgaacctccacaagatcttgataaggtgccagatgccttctgcaggtcaatcacaggcaaccgcatcaccaagatcagggcagcgtcgagaggcgccacaagagtaccacaaagctggccagatactgtcagggacttcgtgaagtcgatgaattcgaattctccactaagcgcgaactacagtcgatcgatggatgaatttcggtcaatggatgaagttcgggaagcaatgaaattcatggggtcgaactatcgcagatttgccattacggaaacatctatgggatttgtaccattttacgcagagactggcgacaagatttgcatattagacgggttctccgtgccggttgttcttcgacagatcggggatgaatctataggcctgactgcatctttgctggagcaatttgtttcggtatctcagggtccttggactatcgtggaagaaaagccgccgaatttcttcgttggcgaatgttacgttgatggattcatggaaggggagtttatggtagagattgacgaacatccaaggcctcgggagatatttgtggtcctttaa

SEQ ID NO: 14283 - protein, 700 aa, Muscodor strobelii
  misc_feature: SGI Peptide ID NO. 564703
  misc_feature (95)..(247): Pfam Id: PF06985 Pfam Desc: Heterokaryon incompatibility protein (HET)
  misc_feature (129)..(247): Pfam Id: PF06985 Pfam Desc: Heterokaryon incompatibility protein (HET)
  misc_feature (50)..(343): NCBI GI: 242799835 Blast Desc: Ankyrin and HET domain protein [Talaromyces stipitatus ATCC 10500] gi|218716807|gb|EED16228.1| Ankyrin and HET domain protein [Talaromyces stipitatus ATCC 10500]
  misc_feature (95)..(343): NCBI GI: 212541046 Blast Desc: Ankyrin and HET domain protein [Penicillium marneffei ATCC 18224] gi|210067977|gb|EEA22069.1| Ankyrin and HET domain protein [Penicillium marneffei ATCC 18224]
  misc_feature (47)..(684): NCBI GI: 238498684 Blast Desc: conserved [Aspergillus flavus NRRL3357] gi|220693851|gb|EED50196.1| conserved [Aspergillus flavus NRRL3357]
  misc_feature (52)..(682): NCBI GI: 154292443 Blast Desc: BC1G_14540 [Botryotinia fuckeliana B05.10] gi|150846126|gb|EDN21319.1| BC1G_14540 [Botryotinia fuckeliana B05.10]
  misc_feature (39)..(684): NCBI GI: 39976177 Blast Desc: MGG_05985 [Magnaporthe grisea 70-15] gi|145011741|gb|EDJ96397.1| MGG_05985 [Magnaporthe grisea 70-15]
  misc_feature (94)..(638): NCBI GI: 169594972 Blast Desc: SNOG_00218 [Phaeosphaeria nodorum SN15] gi|111070593|gb|EAT91713.1| SNOG_00218 [Phaeosphaeria nodorum SN15]
  misc_feature (95)..(343): NCBI GI: 67538426 Blast Desc: AN5383.2 [Aspergillus nidulans FGSC A4] gi|40743353|gb|EAA62543.1| AN5383.2 [Aspergillus nidulans FGSC A4] gi|259485174|tpe|CBF82002.1| TPA: conserved [Aspergillus FGSC
  misc_feature (98)..(679): NCBI GI: 256724488 Blast Desc: [Nectria haematococca mpVI 77-13-4]
  misc_feature (47)..(406): NCBI GI: 226287224 Blast Desc: conserved [Paracoccidioides brasiliensis Pb18]
  misc_feature (47)..(400): NCBI GI: 225683598 Blast Desc: [Paracoccidioides brasiliensis Pb03]
  misc_feature: Useful for introducing or modulating the production of volatile compounds
MPFDPAWLEDLQGRPEHAVSAHSWLLGQQDGHVPLGEHPNISLVDTSKPYEYEPLEDSSEWIRILYLLPPRDDDDSLRAVLMPVKHSQVPVSVEYEPVSYAWGTEDPISLLYLSDPKKDRFFCFPIRPNLEHMLRVFREEKELPFLWIDALCIDQGHNKEKGFQVQHMDRVYRDRYLRIWLGGSSQTTNLALEIINESCRQLKARDDQEHRKVWIDLSGDDRWFKHWQAIWDLFGRPWFSRRWIIQELVLCRSAETYIGQQHFPWACIYGFAINLSRTKHDWQSTDLFDPFNISRSEAVFRLDFCARGDLSKLTLQVLIDRFSQCLVTDPRDGIYSLLPLAADIDQSDPKWFPSYSSSRLAADIFEEVFWHVVRTTRSLDVMCRSIPERSQEETYCTWLPWFGGPKMEAQSRRIIPTYINRSLTSFREADWIFPLAKTYSASGSHSQPFARRIWPSGIEEVEEEVEKGIPRFLCLRGWVVDQVKAIGPPMIMERINGREVPFIPYSWIEMMGLEPPQDLDKVPDAFCRSITGNRITKIRAASRGATRVPQSWPDTVRDFVKSMNSNSPLSANYSRSMDEFRSMDEVREAMKFMGSNYRRFAITETSMGFVPFYAETGDKICILDGFSVPVVLRQIGDESIGLTASLLEQFVSVSQGPWTIVEEKPPNFFVGECYVDGFMEGEFMVEIDEHPRPREIFVVL

SEQ ID NO: 14284 - DNA, 2636 bp, Muscodor strobelii
  misc_feature: SGI EST ID NO. CUFF.34023.0
  misc_feature: Variant of the nucleotide sequence at SEQ ID NO 14282
gtcgtcatatcttgtgggtggctgggctttagtcatcccccgcacttcggtggcagtgtcttccacgtgcatatcgttgattctgacaagaagttttagctttgattcacgcttatcgtccatggaggcctctcgcataatataaggttctgttcctagcgccttgttactcctatcagacagtctatcccatcactgagctcgaagcaaagaggcttaatctttgatcgaatactgcacatgccgtggatatgccctttgatcctgcatggctggaggacctccagggacggccggagcacgccgtttcggctcacagttggctccttggtcaacaagacggacatgtgccgctaggtgagcacccgaatatctcacttgtcgacacatcgaagccttatgagtatgagccactcgaagactcgagcgaatggatccgcatactataccttctaccacctagagatgatgacgatagccttcgcgcggttctcatgccggtcaaacatagtcaggtccctgtatcagtcgagtacgagccagtatcctacgcgtggggcacggaggaccctatatccctattatacctcagcgaccctaagaaagaccgcttcttctgcttcccaattcgtcccaacctagagcacatgttacgagtcttccgcgaggagaaagaattacctttcctttggatcgatgctctctgcatagaccaaggccacaacaaggagaaggggttccaggttcagcatatggaccgtgtctatcgagaccgatacctacgaatttggctaggcggctcctcacaaactactaatcttgcccttgaaatcattaacgagagctgccgtcagctgaaagcaagggatgaccaagaacataggaaagtatggattgatctgagcggagatgacagatggtttaagcactggcaggcgatatgggacctattcggacgtccctggttctcacgccgctggattatccaggagctggtcttatgccggtctgcagagacctacataggccagcagcatttcccatgggcgtgcatctacggttttgccatcaacttgagccgtactaagcacgactggcaatctactgatctgttcgacccattcaatattagtcgaagtgaggctgtttttcgactggacttttgcgcgagaggagacttgtccaaactgacacttcaagttctcatcgaccgcttctcgcaatgcctagtcacagatccccgggacggtatttactcgcttttgcctttggcagccgacattgatcaatcggatcccaagtggttcccaagctattctagttcgaggcttgcagcagatatctttgaagaggttttctggcatgtcgtacgcacgacccgaagccttgacgtcatgtgtcgcagtataccagagagaagtcaagaggagacttattgtacctggcttccgtggtttggcggcccgaaaatggaggcgcagtctcgaagaattattcccacgtacataaaccgttctctgaccagttttagggaagctgattggatattccctttggccaaaacgtatagcgcgtcaggttcgcattcgcaaccgtttgcgagacgaatatggccttccggtatcgaagaggtcgaagaggaagtagagaaaggcataccgcgttttctgtgtcttagaggttgggtggttgatcaagttaaggcgatcggtcctcctatgattatggagcgaatcaatggccgggaagtacctttcattccatactcatggatcgaaatgatgggtcttgaacctccacaagatcttgataaggtgccagatgccttctgcaggtcaatcacaggcaaccgcatcaccaagatcagggcagcgtcgagaggcgccacaagagtaccacaaagctggccagatactgtcagggacttcgtgaagtcgatgaattcgaattctccactaagcgcgaactacagtcgatcgatggatgaatttcggtcaatggatgaagttcgggaagcaatgaaattcatggggtcgaactatcgcagatttgccattacggaaacatctatgggatttgtaccattttacgcagagactggcgacaagatttgcatattagacgggttctccgtgccggttgttcttcgacagatcggggatgaatctataggcctgactgcatctttgctggagcaatttgtttcggtatctcagggtccttggactatcgtggaagaaaagccgccgaatttcttcgttggcgaatgttacgttgatggattcatggaaggggagtttatggtagagattgacgaacatccaaggcctcgggagatatttgtggtcctttaaatcgactgaacttcttggtgaggaaggtacttgaatcaaatttgagattgtgatagacgtgctatgatgtattctatcggctgcaagttcttggtttatacttgcacgtccaatgtatcatcaagcaaatccacatccaaggatgaaggcatcacatgagttcgctctcgtcgaatttcaatagtcacgatagactagatccttgtaagatttcgttgtcgagtaactggcgttctctcatttttgtatattgtttcacgtttataaataaaacgattgaga

SEQ ID NO: 14285 - DNA, 1536 bp, Muscodor strobelii
  misc_feature: SGI cDNA ID NO. 564704
  misc_feature: Encodes the peptide sequence at SEQ ID NO 14286
atggctcctttcagtagcagccagattccacctccaatatccattattcccaccatcgagacgcccgacgagcacgacgacaacgacaacgacaacgacgacggctacaactaccacgacgaccacaatcacttgaactaccaacagaacaacaataatctctacgcgccaccaaacgcctgggcaggcgacaggcacaacgttcgttacagctccaaaagcctctcgcccgtcgccccgactttcccaagccacacctctctcctgaaccccaggatgtcttccaccgatgacttctctcaggagaacgaaaacgcgaaccccgcgccgaatccattcaatttccagacacaagtcatatccaccgctcccataagacctaatgtcggacagcgccgcggccacaaatacaaacactcgtccgtgtccgcgcaacaccagatcttccaagaaccgcccccacggccgcctcttgcgctccctcgcgatctgcccataccgacactcaaagaaacatggggctccatgtccaaagaccagcgcaatcgcctgtactggtgtctctgccacgccctcatcgctgtagttctgtttctctccgcccatggctcactgaccatgaccgcgctctcccacctcgtgttcttcgacgtcgggagcgccttgatctgcgtagccgttgacgtgttgggaaatttcgaggtttggaagcgcagctcgatccgctaccccttcggtcttgaacgcgccgaggtcttagccggcttcgcgatgagcatatttctcatattcggtggctttgaccttgtttcccacaacgtgaagcacatcctcgagggtcacggtccgcacgaggatcattctgcccacggccatacgcacgagcacgatgagccgaggataccaatggggagcctggatctggtgagctgtgctgccatcgtggccacgcttgtcagtgcgtatgggctgaggaaccattaccgcataagcagggtcatgcgcgtcagttatttggcgagcctgccgagtattctgagcaacccttttcacttcctgaccctttcgacttcggcactgttggtgctattgccgctgctggagattaagctccatatcctcctcgacagcgcgatttgtgccgtaatcgccatctccatgttctccctcggcgtccgacttgcggttgcccagggactcatgttgctcatgagttatggcggcagaccctcgcaggttcagggcaaggtcaaagaatttggcgtctcggacgtgcttagagagatcgagacggagccgagtgttgagagggtggaagaggctcagttttggcaggtccattatggtctttgtatggccaatttgaaactcagcgtgaacaagggatgtgacgatgccacattgagtagggtgaggatcagaattcaaaatctgatccagaatcgtctgggagaaggatatgggaggggaagtagtctgaggtgggaggtcagtctgcagatggggagtcatggggcgggtgttggtgggttatag

SEQ ID NO: 14286 - protein, 511 aa, Muscodor strobelii
  misc_feature: SGI Peptide ID NO. 564704
  misc_feature (197)..(491): Pfam Id: PF01545 Pfam Desc: Cation efflux family
  misc_feature (242)..(295): Pfam Id: PF01545 Pfam Desc: Cation efflux family
  misc_feature (64)..(506): NCBI GI: 46126153 Blast Desc: FG07454.1 [Gibberella zeae PH-1]
  misc_feature (97)..(506): NCBI GI: 256730889 Blast Desc: NECHADRAFT_48976 [Nectria haematococca mpVI 77-13-4]
  misc_feature (107)..(503): NCBI GI: 145606222 Blast Desc: MGG_11903 [Magnaporthe grisea 70-15] gi|145013938|gb|EDJ98579.1| MGG_11903 [Magnaporthe grisea 70-15]
  misc_feature (107)..(503): NCBI GI: 145616891 Blast Desc: MGG_14431 [Magnaporthe grisea 70-15] gi|145022570|gb|EDK06519.1| MGG_14431 [Magnaporthe grisea 70-15]
  misc_feature (104)..(503): NCBI GI: 28950314 Blast Desc: conserved [Neurospora crassa]
  misc_feature (104)..(503): NCBI GI: 164426088 Blast Desc: NCU01254 [Neurospora crassa OR74A] gi|157071194|gb|EAA31338.2| NCU01254 [Neurospora crassa OR74A]
  misc_feature (80)..(503): NCBI GI: 171692097 Blast Desc: protein product [Podospora anserina] gi|170945997|emb|CAP72798.1| protein product [Podospora anserina]
  misc_feature (74)..(505): NCBI GI: 116206548 Blast Desc: CHGG_02567 [Chaetomium globosum CBS 148.51] gi|88183164|gb|EAQ90632.1| CHGG_02567 [Chaetomium globosum CBS 148.51]
  misc_feature (109)..(501): NCBI GI: 156041158 Blast Desc: SS1G_11558 [Sclerotinia sclerotiorum 1980] gi|154695941|gb|EDN95679.1| SS1G_11558 [Sclerotinia sclerotiorum 1980]
  misc_feature (65)..(500): NCBI GI: 119495535 Blast Desc: cation efflux family protein family [Neosartorya fischeri NRRL 181] gi|119412712|gb|EAW22653.1| cation efflux family protein family [Neosartorya fischeri NRRL 181]
MAPFSSSQIPPPISIIPTIETPDEHDDNDNDNDDGYNYHDDHNHLNYQQNNNNLYAPPNAWAGDRHNVRYSSKSLSPVAPTFPSHTSLLNPRMSSTDDFSQENENANPAPNPFNFQTQVISTAPIRPNVGQRRGHKYKHSSVSAQHQIFQEPPPRPPLALPRDLPIPTLKETWGSMSKDQRNRLYWCLCHALIAVVLFLSAHGSLTMTALSHLVFFDVGSALICVAVDVLGNFEVWKRSSIRYPFGLERAEVLAGFAMSIFLIFGGFDLVSHNVKHILEGHGPHEDHSAHGHTHEHDEPRIPMGSLDLVSCAAIVATLVSAYGLRNHYRISRVMRVSYLASLPSILSNPFHFLTLSTSALLVLLPLLEIKLHILLDSAICAVIAISMFSLGVRLAVAQGLMLLMSYGGRPSQVQGKVKEFGVSDVLREIETEPSVERVEEAQFWQVHYGLCMANLKLSVNKGCDDATLSRVRIRIQNLIQNRLGEGYGRGSSLRWEVSLQMGSHGAGVGGL

SEQ ID NO: 14287 - DNA, 2249 bp, Muscodor strobelii
  misc_feature: SGI EST ID NO. CUFF.34032.0
  misc_feature: Variant of the nucleotide sequence at SEQ ID NO 14285
taaaggcacagattgcggggaagatgggtttgccgccattcctgaaggaggcacggtggaacatgacgaccactgaagtcacccgcatgtgggagtgcctcccgcgcattgttttgagacatatgcaccgttgcggcgactcaggacacaccaacggcctcgatatctgtgcaaccatagattccacagtcaaaccacccgtctctgtttgcaattggcaatctttttggcatgcaactcatttcatttatcttgtaacgagccaattgatttgacccttagtcattgattcgtctcttttgggtaagcgccaagatcttgcttagtgtggcatggctcctttcagtagcagccagattccacctccaatatccattattcccaccatcgagacgcccgacgagcacgacgacaacgacaacgacaacgacgacggctacaactaccacgacgaccacaatcacttgaactaccaacagaacaacaataatctctacgcgccaccaaacgcctgggcaggcgacaggcacaacgttcgttacagctccaaaagcctctcgcccgtcgccccgactttcccaagccacacctctctcctgaaccccaggatgtcttccaccgatgacttctctcaggagaacgaaaacgcgaaccccgcgccgaatccattcaatttccagacacaagtcatatccaccgctcccataagacctaatgtcggacagcgccgcggccacaaatacaaacactcgtccgtgtccgcgcaacaccagatcttccaagaaccgcccccacggccgcctcttgcgctccctcgcgatctgcccataccgacactcaaagaaacatggggctccatgtccaaagaccagcgcaatcgcctgtactggtgtctctgccacgccctcatcgctgtagttctgtttctctccgcccatggctcactgaccatgaccgcgctctcccacctcgtgttcttcgacgtcgggagcgccttgatctgcgtagccgttgacgtgttgggaaatttcgaggtttggaagcgcagctcgatccgctaccccttcggtcttgaacgcgccgaggtcttagccggcttcgcgatgagcatatttctcatattcggtggctttgaccttgtttcccacaacgtgaagcacatcctcgagggtcacggtccgcacgaggatcattctgcccacggccatacgcacgagcacgatgagccgaggataccaatggggagcctggatctggtgagctgtgctgccatcgtggccacgcttgtcagtgcgtatgggctgaggaaccattaccgcataagcagggtcatgcgcgtcagttatttggcgagcctgccgagtattctgagcaacccttttcacttcctgaccctttcgacttcggcactgttggtgctattgccgctgctggagattaagctccatatcctcctcgacagcgcgatttgtgccgtaatcgccatctccatgttctccctcggcgtccgacttgcggttgcccagggactcatgttgctcatgagttatggcggcagaccctcgcaggttcagggcaaggtcaaagaatttggcgtctcggacgtgcttagagagatcgagacggagccgagtgttgagagggtggaagaggctcagttttggcaggtccattatggtctttgtatggccaatttgaaactcagcgtgaacaagggatgtgacgatgccacattgagtagggtgaggatcagaattcaaaatctgatccagaatcgtctgggagaaggatatgggaggggaagtagtctgaggtgggaggtcagtctgcagatggggagtcatggggcgggtgttggtgggttatagacatgggagtccggggttcggggtgcgttcggggtgtggccagaagggtacttctggatgagacgagggggtggtgagcatggcgtggcatgcatgacttgatatggcatttactggcgttggattactgttactgagtacgtacatgcttctatgtgtttgctggcgtcttcatttgagatatacccgttgttgagcataggcgtgcgggtgtagggggtgatatggagttgggatatggtataccgcatgtacatatggctctcctttagagtatgggaatgggaatattattgtataacaccaacagtcttgacttcacgtatgtatatgtctaatggtttgttcttcgcacattgtgttttgtgtggtcttaaatcg

SEQ ID NO: 14288 - DNA, 1962 bp, Muscodor strobelii
  misc_feature: SGI cDNA ID NO. 564705
  misc_feature: Encodes the peptide sequence at SEQ ID NO 14289
atgggaacctatcagtacttaccattacgcccagaggagatccgaatacttaagctagccccaggaaacgcggatgccgaattgcgatgtgaactaatacacttagaccagccttctggaggcgtaggtaaaagggtgagctccacggagcgtagtatggcgaaacagacatctagagatcttatcaaagaatctttaaaaagaggatatcaaggcctctggcgtttcgtacctcaaacttgggctataaaacataacactactaaacctattgagggtttcgctaatggcactcctacctacattgctctctcatacacttggggaggggatgagaagactcactccatcaagattgcagacacggagttacttatcacggctaatcttcacgaggcactttcacatttgagacatgcccagttcccacgtttcatctgggctgatgcaatttgcatcaaccagaacgacatcccagaacgaaacgagcaagtcaagaagatgtcacagatctactcaaatgcaatagaagtcatcatctggctcggtccggaagaagacgacgtctctctcgccatcaaccagatcgagcaagccgattctgccatctctaaatacaaggagaaatatgtagcgaactaccatgtattattcggcatcaaggctcccaacataccaaccatcgacgcctcctccagacttagcttcagtgctctgaccgagcgaccttggtttgagagaacatgggtgattcaagaagcaatgttagcgaaacgagcaacgataacgtgcggaaacttgtctttgccttttcacaagctcctgagagtattcgagcattggcaccggaaagggttcaggaatatcatcgggatctcggcatctcgccccttatttgcgatgatcaagatacaagagggagtcaaagacgcaaatttgtcgctgctcgacctcctttaccagaccatcgggtctgactcatcagaccctcgtgatagagttttcggcctcatgaatctcgtctcaaaagagtcggatcttggtttcgaggttgactatcatatgaaatgcgaagcactgtatacgcgtgtagcaggttatcagatgacacatcataagagacttcgcttcctcagcatggctgggatggcactctcttcgggggatcttgatctacccacatgggtggctgactggagcaaatgtgatcacatctacatgaacctggatggtccatctcatttcaatgccgggggcgacttagggccggttctgcgccttaaagacccggatgttcttgaactctctgccattttccttgataaaatcacagacgtgggaaccgagatgctggtacccaacgacccagtgagtaaggacatctcttcaaaaagaggacacaattggttcaaagatatttctcgcgagactgacgtacaagatatgttcaacgatctggatcgtcttaccaagaacctcgcttcctaccccacagaggaagagatagagcatgtaattgtacgaactgttctatttgacttccacggcaaggaagacagcgatggctggctgtacgaatacctgtccgtgcatacgtcatgtcgagccgatcctagcttcaccttcatgcccgtcatatacagcccaagctccgatgagtcggatggcttcaatgaacttacccattttgatgagcgaaaggagaaatacctgagtgtcatttctgactggacccgctgccgcattctctgttcgactgagaagggatcccttggctgggtgccagatatcgcaaaggttggagatgctgttatcgtcgttctcggcgccaaggtcccctttgtggttcgttcagttggggacgggacttacaagcttgtgggtgaatgctatattcatggggtcatgtatggagaggcgctcaaagatggtagcaaggagaaaactatccatcttgtttga

SEQ ID NO: 14289 - protein, 653 aa, Muscodor strobelii
  misc_feature: SGI Peptide ID NO. 564705
  misc_feature (101)..(253): Pfam Id: PF06985 Pfam Desc: Heterokaryon incompatibility protein (HET)
  misc_feature (91)..(642): NCBI GI: 261360716 Blast Desc: ankyrin and HET domain-containing protein [Verticillium albo-atrum VaMs.102]
  misc_feature (101)..(642): NCBI GI: 256721216 Blast Desc: NECHADRAFT_101059 [Nectria haematococca mpVI 77-13-4]
  misc_feature (98)..(642): NCBI GI: 145246728 Blast Desc: An12g05450 [Aspergillus niger] gi|134080334|emb|CAK46256.1| protein product [Aspergillus niger]
  misc_feature (96)..(652): NCBI GI: 119179507 Blast Desc: CIMG_08498 [Coccidioides immitis RS]
  misc_feature (1)..(641): NCBI GI: 256719970 Blast Desc: NECHADRAFT_98482 [Nectria haematococca mpVI 77-13-4]
  misc_feature (1)..(449): NCBI GI: 154311024 Blast Desc: BC1G_06630 [Botryotinia fuckeliana B05.10] gi|150851034|gb|EDN26227.1| BC1G_06630 [Botryotinia fuckeliana B05.10]
  misc_feature (66)..(653): NCBI GI: 256731925 Blast Desc: NECHADRAFT_80792 [Nectria haematococca mpVI 77-13-4]
  misc_feature (99)..(643): NCBI GI: 46114550 Blast Desc: FG03117.1 [Gibberella zeae PH-1]
  misc_feature (99)..(643): NCBI GI: 256721799 Blast Desc: NECHADRAFT_53281 [Nectria haematococca mpVI 77-13-4]
  misc_feature (98)..(646): NCBI GI: 226287224 Blast Desc: conserved [Paracoccidioides brasiliensis Pb18]
MGTYQYLPLRPEEIRILKLAPGNADAELRCELIHLDQPSGGVGKRVSSTERSMAKQTSRDLIKESLKRGYQGLWRFVPQTWAIKHNTTKPIEGFANGTPTYIALSYTWGGDEKTHSIKIADTELLITANLHEALSHLRHAQFPRFIWADAICINQNDIPERNEQVKKMSQIYSNAIEVIIWLGPEEDDVSLAINQIEQADSAISKYKEKYVANYHVLFGIKAPNIPTIDASSRLSFSALTERPWFERTWVIQEAMLAKRATITCGNLSLPFHKLLRVFEHWHRKGFRNIIGISASRPLFAMIKIQEGVKDANLSLLDLLYQTIGSDSSDPRDRVFGLMNLVSKESDLGFEVDYHMKCEALYTRVAGYQMTHHKRLRFLSMAGMALSSGDLDLPTWVADWSKCDHIYMNLDGPSHFNAGGDLGPVLRLKDPDVLELSAIFLDKITDVGTEMLVPNDPVSKDISSKRGHNWFKDISRETDVQDMFNDLDRLTKNLASYPTEEEIEHVIVRTVLFDFHGKEDSDGWLYEYLSVHTSCRADPSFTFMPVIYSPSSDESDGFNELTHFDERKEKYLSVISDWTRCRILCSTEKGSLGWVPDIAKVGDAVIVVLGAKVPFVVRSVGDGTYKLVGECYIHGVMYGEALKDGSKEKTIHLV

SEQ ID NO: 14290 - DNA, 2667 bp, Muscodor strobelii
  misc_feature: SGI EST ID NO. CUFF.34036.0
  misc_feature: Variant of the nucleotide sequence at SEQ ID NO 14288
atctttctctatctaaatgatgaaaatcatgggaacctatcagtacttaccattacgcccagaggagatccgaatacttaagctagccccaggaaacgcggatgccgaattgcgatgtgaactaatacacttagaccagccttctggaggcgtaggtaaaagggtgagctccacggagcgtagtatggcgaaacagacatctagagatcttatcaaagaatctttaaaaagaggatatcaaggcctctggcgtttcgtacctcaaacttgggctataaaacataacactactaaacctattgagggtttcgctaatggcactcctacctacattgctctctcatacacttggggaggggatgagaagactcactccatcaagattgcagacacggagttacttatcacggctaatcttcacgaggcactttcacatttgagacatgcccagttcccacgtttcatctgggctgatgcaatttgcatcaaccagaacgacatcccagaacgaaacgagcaagtcaagaagatgtcacagatctactcaaatgcaatagaagtcatcatctggctcggtccggaagaagacgacgtctctctcgccatcaaccagatcgagcaagccgattctgccatctctaaatacaaggagaaatatgtagcgaactaccatgtattattcggcatcaaggctcccaacataccaaccatcgacgcctcctccagacttagcttcagtgctctgaccgagcgaccttggtttgagagaacatgggtgattcaagaagcaatgttagcgaaacgagcaacgataacgtgcggaaacttgtctttgccttttcacaagctcctgagagtattcgagcattggcaccggaaagggttcaggaatatcatcgggatctcggcatctcgccccttatttgcgatgatcaagatacaagagggagtcaaagacgcaaatttgtcgctgctcgacctcctttaccagaccatcgggtctgactcatcagaccctcgtgatagagttttcggcctcatgaatctcgtctcaaaagagtcggatcttggtttcgaggttgactatcatatgaaatgcgaagcactgtatacgcgtgtagcaggttatcagatgacacatcataagagacttcgcttcctcagcatggctgggatggcactctcttcgggggatcttgatctacccacatgggtggctgactggagcaaatgtgatcacatctacatgaacctggatggtccatctcatttcaatgccgggggcgacttagggccggttctgcgccttaaagacccggatgttcttgaactctctgccattttccttgataaaatcacagacgtgggaaccgagatgctggtacccaacgacccagtgagtaaggacatctcttcaaaaagaggacacaattggttcaaagatatttctcgcgagactgacgtacaagatatgttcaacgatctggatcgtcttaccaagaacctcgcttcctaccccacagaggaagagatagagcatgtaattgtacgaactgttctatttgacttccacggcaaggaagacagcgatggctggctgtacgaatacctgtccgtgcatacgtcatgtcgagccgatcctagcttcaccttcatgcccgtcatatacagcccaagctccgatgagtcggatggcttcaatgaacttacccattttgatgagcgaaaggagaaatacctgagtgtcatttctgactggacccgctgccgcattctctgttcgactgagaagggatcccttggctgggtgccagatatcgcaaaggttggagatgctgttatcgtcgttctcggcgccaaggtcccctttgtggttcgttcagttggggacgggacttacaagcttgtgggtgaatgctatattcatggggtcatgtatggagaggcgctcaaagatggtagcaaggagaaaactatccatcttgtttgattatctccccaggaaaattcgtcgatgaggagacgacctgggttgatacagcaagttttgctttatcccagggtcttgctttcatacaccgagacaagactaagtatgctcaacgggactgaatatgacattgccaaagccggcgatgactacaacctgctataagaaatcgcagcgaatgccgaacgggtgttaatgacagagccaagggttcgatggatggatagaacaaccccactcaaccacaagtctttgcgaagcaaatccatatactcgcttgagcaacaaaatagagtatcttaaggcttccatagcttattcctcggcttatctcgctgtttattcgatctgtcctgcatgaagagatcgagacccacagaggaaggtaatgatcagcataatgttgcacagcgacatgctcctctcctgactcaatgaaactcatccctatggcttctcacctgcaaaacttaatatccaccgcagtgacatcagacaattcccagattgacccttaggcctaggcgtcataatctgcgggcagccttgtccgcatatacagactacgctgcattgcccttctagtaatttatttctaactgcgcagctgtagcagacacatcgaggagtcgaggatttgagcgcatttaatatactgctctcttgactaaactgac

SEQ ID NO: 14291 - DNA, 1881 bp, Muscodor strobelii
  misc_feature: SGI cDNA ID NO. 564706
  misc_feature: Reduced expression when VOC is produced
  misc_feature: Encodes the peptide sequence at SEQ ID NO 14292
atgagggaggtcaacttcagtatccccaatgtcaacaaggcatcggtgggcatcaccaccgccctgtatgatcgtcgtgccctcgactgcacatccaccttgccactcatcaactctctgaaccatctcgcctacctcaccacctcgtctgctcgcatccgagacatcctaacggtggacggtggtatcgagaggctagtatgtatcctcaagcagggacgtagcaaggatatgatggacatgtggaagtggaacctggcttttcagtgtgtggttaacataggagttcgtggtaccgagaacgtgaggacgcgggtcgtcgaggccgacatggtccccgtcatcgcgaccattctgaacaattacatcaaggtcatcgagaagtgtcgtgaaaaggccgaggaggccaagcagaaacagatccaggagcaccgtcatcgaagccacagccaccgagatgcctccaaatccacgtctttcaccaccttcaccaaccgcaccagccggctagagctcgagcagagacccttcaggagacaagctccgccgccttccattgatgtgtctgccgccggctttgcctcgacctctgctgcggccgagcagagcaatgccgaggctggtccatccgcacccctcttcaccaatacttcgccctcggaccggccagcctttgccgtccatcgccatcaccatcaccaccaccaccatcatcatcaccgccacgaaaaccgacagcccgtccctaccagccgacagcagccctcgacctcttcagtccctaccatggaggccgtcgatggtttcatcagacctgtgcgtgatattgatcggctgccctccatggtcccggtctatcagcccagcgcggcgtctcaaccggcctctccgaccacgccgttgcctccgtctcagatccggccaccgaccatccgcaccacctcggtcttgggccccaatgctcgttcccgccgccgaccatccatccgccaccagaactcgactacggatacggatgatctgaacacggacagcatggcatcagacggctcccaagacgccgatatgtctggcaccgctgatgttacgccagctgtcggcttccaagatatcgccatggaggaaggtgacagtgcccttgctggaactgccctcaacctcaccacgcccaccgtctccgagatacccgatgttgatgctggcactttcaacatcacccaccgggccccattagacggaagcatccccaataccacgcccccgcctggccctaccggcatcttatcgcccaaccgacccatggtccccactccgcagccttcgcttcccaaccatacaagtcttcctcgatatctcctagaccgccctcttcctccccatccccagatgctcgcggccatgccgagggaggaagacgtgctgatgtctctccaactgcttgcctatgtttccaagtactgcaaccttcgaacttacttccagcaaagtcatctcgtgcctcggctcaagatcggaaaagaactgcaactactggacggagatgatgtccccatggagtcactcagcaaccaagaatacgaggaagaatacctcctccctaacgatttcaatatcttccctctcgtggagaaattcacagtcagataccacagtactgatatgcaatactgggctggcgtggtcatgagaaacctgtgccgcaaagacgatacgagaggtggcattagacaatgcgcctactaccaatgcggcaaatgggaagaattcacgcggcaatttgccaagtgtcgtcgatgccgccgcaccaagtactgcagcaaggaatgccagaagagtgcctgggctttccatcgtcactggtgtgttgccgctacccaatag

SEQ ID NO: 14292 - protein, 626 aa, Muscodor strobelii
  misc_feature: SGI Peptide ID NO. 564706
  misc_feature (581)..(621): Pfam Id: PF01753 Pfam Desc: MYND finger
  misc_feature (1)..(626): NCBI GI: 116206554 Blast Desc: CHGG_02570 [Chaetomium globosum CBS 148.51] gi|88183167|gb|EAQ90635.1| CHGG_02570 [Chaetomium globosum CBS 148.51]
  misc_feature (1)..(626): NCBI GI: 171692093 Blast Desc: protein product [Podospora anserina] gi|170945995|emb|CAP72796.1| protein product [Podospora anserina]
  misc_feature (1)..(624): NCBI GI: 39968723 Blast Desc: MGG_02454 [Magnaporthe grisea 70-15] gi|145013942|gb|EDJ98583.1| MGG_02454 [Magnaporthe grisea 70-15]
  misc_feature (1)..(625): NCBI GI: 85098706 Blast Desc: NCU01252 [Neurospora crassa OR74A] gi|12718251|emb|CAC28640.1| related to samB [Neurospora crassa] gi|28922167|gb|EAA31419.1| NCU01252 [Neurospora crassa OR74A]
  misc_feature (1)..(626): NCBI GI: 156041138 Blast Desc: SS1G_11548 [Sclerotinia sclerotiorum 1980] gi|154695931|gb|EDN95669.1| SS1G_11548 [Sclerotinia sclerotiorum 1980]
  misc_feature (1)..(616): NCBI GI: 261351492 Blast Desc: MYND-type zinc finger protein MUB1 [Verticillium albo-atrum VaMs.102]
  misc_feature (1)..(598): NCBI GI: 256731262 Blast Desc: NECHADRAFT_96066 [Nectria haematococca mpVI 77-13-4]
  misc_feature (1)..(588): NCBI GI: 46126157 Blast Desc: FG07456.1 [Gibberella zeae PH-1]
  misc_feature (1)..(621): NCBI GI: 226294126 Blast Desc: SamB protein [Paracoccidioides brasiliensis Pb18]
  misc_feature (1)..(621): NCBI GI: 225684470 Blast Desc: MYND domain protein (SamB) [Paracoccidioides brasiliensis Pb03]
  misc_feature: Useful for introducing or modulating the production of volatile compounds
MREVNFSIPNVNKASVGITTALYDRRALDCTSTLPLINSLNHLAYLTTSSARIRDILTVDGGIERLVCILKQGRSKDMMDMWKWNLAFQCVVNIGVRGTENVRTRVVEADMVPVIATILNNYIKVIEKCREKAEEAKQKQIQEHRHRSHSHRDASKSTSFTTFTNRTSRLELEQRPFRRQAPPPSIDVSAAGFASTSAAAEQSNAEAGPSAPLFTNTSPSDRPAFAVHRHHHHHHHHHHHRHENRQPVPTSRQQPSTSSVPTMEAVDGFIRPVRDIDRLPSMVPVYQPSAASQPASPTTPLPPSQIRPPTIRTTSVLGPNARSRRRPSIRHQNSTTDTDDLNTDSMASDGSQDADMSGTADVTPAVGFQDIAMEEGDSALAGTALNLTTPTVSEIPDVDAGTFNITHRAPLDGSIPNTTPPPGPTGILSPNRPMVPTPQPSLPNHTSLPRYLLDRPLPPHPQMLAAMPREEDVLMSLQLLAYVSKYCNLRTYFQQSHLVPRLKIGKELQLLDGDDVPMESLSNQEYEEEYLLPNDFNIFPLVEKFTVRYHSTDMQYWAGVVMRNLCRKDDTRGGIRQCAYYQCGKWEEFTRQFAKCRRCRRTKYCSKECQKSAWAFHRHWCVAATQ

SEQ ID NO: 14293 - DNA, 4633 bp, Muscodor strobelii
  misc_feature: SGI EST ID NO. CUFF.34053.0
  misc_feature: Variant of the nucleotide sequence at SEQ ID NO 14291
tgagggtcctttgaagagtggtgtccaaataaatcgtccagacactgaagctgatttggattgcgaaatgaccaaagggtactccgttggggtccacaccttaaacagcggtcccatcgccacagcgtcattcgccgctctcacctcataatgcaatgcgaacgaggttgactgctgagaattgcttggacaagtatctaacttagtaatcacaggattctcaacagttcttgctgttgaattcctgtcctacatgtggagatgtattcgctggtattcttgtgtttgcttcacattgctcctggccaaatacctaccttatgtcgggatgcgggtggttggagtgcgtttctcggtggagaggagacgcgtgaatggcgaaagggtggttggattggaaattggaaatatgctggatctgatttgtaaggggagctggaacgaagacgggcgaaagcagcagccgtctgccgcgagttcaagctttgatttattgcatcgtcaaaatagagtagcacgtctacgtaagcagcaaatgaatctccaggatggtcatgaccgtcgactctcgagtctgtacatctcgagatgggattcgggagtgccgcatctcgtgtgctgtccaaactgacgagattgaacctgttcctgtggcttgctttggttcttgcagctgagacctcgaccctagcagatagatgaattgggggctggccatgcagtgagagattgtctccagcgtctcgagagcgctgtaaaaattggatgcgatggaaagcgccaagcagaatagcatggcgtgcctgctctctgcctgctgaaaggagtgctgcggatgctgggggtgttggggatggacttgtagggcctctgctagggctgtatagcaggctttgggggttgctcgtgggtgagaggcagacgacagtggatggatgtgggagagtgggaggaggcagaacaggccccacaagtatcatacccagcggattcaatgccaaccatcctctcgcttccatcccgacccgacatggaaactcctctcctatcctctcccatcgcaacccaaatccctactgcaccaccgccatcacctcctacgtgagccaccggatggggatatttctgttgacgtagacgtccgccgcgctggagatacgggcctccaaatactcattcatcgtctccctcgtcgttcgccctgctccgtcgtcgacgaccgtcctgcggcatttggcatttgcatcgtcttttcgagtcaccgtctcgtttcatgtcctgatccgcacccgcaaaccgcacgcacgcacatactctccaacgcatctcgtgcatgaccatcgaaagtaaaccttcagtcttctcttcaaccatcgccgccgccgtcacatacatcgaaagcatataggttccatctcgcaacacatacctgcctgcgtcgttgtgcgtctcctttctccgagtccgagtcgtcgctcgcgcgctagcatccacgaaacgtgcaattttattctgcattgttggaggtcaccagcttcgaaccaggacccccgcctcgctgctgctgctgctgctgctgctgcacctccgttgcatgacatctccgcatccgttctcaaacacgtaaatcaatcagcatcttcaagtttccccgtgtcttttctcttcgtcggcggccctatatactatatccactccgccctccgcctcgccgtcccgaccctgtgccgcaccggggtctggtgagtctggtgagcatctcgttgggccaccgtccctttccgacaccgcttctcatccatccatatcatattggccatcatgagggaggtcaacttcagtatccccaatgtcaacaaggcatcggtgggcatcaccaccgccctgtatgatcgtcgtgccctcgactgcacatccaccttgccactcatcaactctctgaaccatctcgcctacctcaccacctcgtctgctcgcatccgagacatcctaacggtggacggtggtatcgagaggctagtatgtatcctcaagcagggacgtagcaaggatatgatggacatgtggaagtggaacctggcttttcagtgtgtggttaacataggagttcgtggtaccgagaacgtgaggacgcgggtcgtcgaggccgacatggtccccgtcatcgcgaccattctgaacaattacatcaaggtcatcgagaagtgtcgtgaaaaggccgaggaggccaagcagaaacagatccaggagcaccgtcatcgaagccacagccaccgagatgcctccaaatccacgtctttcaccaccttcaccaaccgcaccagccggctagagctcgagcagagacccttcaggagacaagctccgccgccttccattgatgtgtctgccgccggctttgcctcgacctctgctgcggccgagcagagcaatgccgaggctggtccatccgcacccctcttcaccaatacttcgccctcggaccggccagcctttgccgtccatcgccatcaccatcaccaccaccaccatcatcatcaccgccacgaaaaccgacagcccgtccctaccagccgacagcagccctcgacctcttcagtccctaccatggaggccgtcgatggtttcatcagacctgtgcgtgatattgatcggctgccctccatggtcccggtctatcagcccagcgcggcgtctcaaccggcctctccgaccacgccgttgcctccgtctcagatccggccaccgaccatccgcaccacctcggtcttgggccccaatgctcgttcccgccgccgaccatccatccgccaccagaactcgactacggatacggatgatctgaacacggacagcatggcatcagacggctcccaagacgccgatatgtctggcaccgctgatgttacgccagctgtcggcttccaagatatcgccatggaggaaggtgacagtgcccttgctggaactgccctcaacctcaccacgcccaccgtctccgagatacccgatgttgatgctggcactttcaacatcacccaccgggccccattagacggaagcatccccaataccacgcccccgcctggccctaccggcatcttatcgcccaaccgacccatggtccccactccgcagccttcgcttcccaaccatacaagtcttcctcgatatctcctagaccgccctcttcctccccatccccagatgctcgcggccatgccgagggaggaagacgtgctgatgtctctccaactgcttgcctatgtttccaagtactgcaaccttcgaacttacttccagcaaagtcatctcgtgcctcggctcaagatcggaaaagaactgcaactactggacggagatgatgtccccatggagtcactcagcaaccaagaatacgaggaagaatacctcctccctaacgatttcaatatcttccctctcgtggagaaattcacagtcagataccacagtactgatatgcaatactgggctggcgtggtcatgagaaacctgtgccgcaaagacgatacgagaggtggcattagacaatgcgcctactaccaatgcggcaaatgggaagaattcacgcggcaatttgccaagtgtcgtcgatgccgccgcaccaagtactgcagcaaggaatgccagaagagtgcctgggctttccatcgtcactggtgtgttgccgctacccaatagacaccggcactagcaccacgcctcttacttggtcctttcctcgcatcacgttctactcggcgtttctgcataatgtttactcgattcattgaattcgttcatgacctgaactgcatggcgaagcaagcatatcacgaaccggcgtctgcgctctgataccactggttttttctttttctttcttgtcctttctactcttttagcatgatcgctttcctttgtctttattggtcgggttatacatcatgaagggcgacgcgaaaatgcctggacatcatactgcatcatgcatacacccgagtcaacaaacttctctaccgggagagattcatggtgtaacaatctgggtactgcctggattgcttcgcaacgaaaaatggtgctattgtcagcaactattcacttgtgtcttgcgggacgcatctgtcgagacactttgggttgctctcctgcaccctctttgcttttaattggagaccagctctctttttgctacttgggtgatgtacgttgggcagtttgcgcttgagcggctacagcctaatggtcgacgtgcgttttcctgtgtttgacctccgaggccatacacgattgtcactctcagacaatgctacgatgggtacggtgaactcaaaggtggaggtgaaaaggagaatgggagacttgaaagtcctgttctttcattgtaggatatgggaacggataaatcgacgacactcctgtgatcgggctacttggggttttgctgacttgcaaaacagtaaggccattttatttcacgacagcacatacagctaagatggtgactctttgggacagtgggtagatggcgctacacaaaagtgtcttttctactatgcatatcccgaaatactaccatttgtatctctagacaaatccaaaaaagatcaacgaaaacccctggatgcat

SEQ ID NO: 14294 - DNA, 669 bp, Muscodor strobelii
  misc_feature: SGI cDNA ID NO. 564707
  misc_feature: Encodes the peptide sequence at SEQ ID NO 14295
atgtatagagaccaaggccttacattgcaggaagtcaaaaacgagatggacaactacggttttgtcgctacagaacggcagtactacgaccgcctcaagaaatggggtctaacaaaaaacattcgaggcgaagagacgtccataatgtacaggaagatgcttcaacgaaaggcaactgaggataaggaaactgacttcctgagacatggtcagccagttgaccttaagaaaatcattcggttcttaaagcgcaataaaccatcactgtctaagctacccacgcgctcaacccctcttcacatcttggcccttacacccgaggctgggcaattgcacgcaagagtccggtttccttggaacatgtcgccgcacaagcgattcttgcaaataaagaagaatgaactgcaccatggctcaccggcacgtaccgatgacttatacgatttggactggcttgatgagcaggcaaccggggagcttgatggtttcgactctccctttggcgccgagacagtggatacctaccgcactattgaaagcacatttgaagatctgttaagaaatattgtgcctgtccagaacgacagtgaagcagttgtcaccggtactattgccccaggcctgccagatccgctgtgggatatcgagctggtagaaactgacatgtaa

SEQ ID NO: 14295 - protein, 222 aa, Muscodor strobelii
  misc_feature: SGI Peptide ID NO. 564707
  misc_feature (1)..(84): NCBI GI: 121719850 Blast Desc: ACLA_058590 [Aspergillus clavatus NRRL 1] gi|119404835|gb|EAW15197.1| ACLA_058590 [Aspergillus clavatus NRRL 1]
  misc_feature (1)..(84): NCBI GI: 115491217 Blast Desc: [Aspergillus terreus NIH2624] gi|114197096|gb|EAU38796.1| [Aspergillus terreus NIH2624]
  misc_feature (1)..(84): NCBI GI: 255945625 Blast Desc: Pc20g10910 [Penicillium chrysogenum Wisconsin 54-1255] gi|211588315|emb|CAP86420.1| Pc20g10910 [Penicillium chrysogenum Wisconsin 54-1255]
  misc_feature (1)..(84): NCBI GI: 238483115 Blast Desc: conserved [Aspergillus flavus NRRL3357] gi|220700846|gb|EED57184.1| conserved [Aspergillus flavus NRRL3357]
  misc_feature (1)..(84): NCBI GI: 195972729 Blast Desc: [Aspergillus oryzae]
  misc_feature (1)..(115): NCBI GI: 145605984 Blast Desc: MGG_06762 [Magnaporthe grisea 70-15] gi|145013719|gb|EDJ98360.1| MGG_06762 [Magnaporthe grisea 70-15]
  misc_feature (1)..(86): NCBI GI: 156041192 Blast Desc: SS1G_11575 [Sclerotinia sclerotiorum 1980] gi|154695958|gb|EDN95696.1| SS1G_11575 [Sclerotinia sclerotiorum 1980]
  misc_feature (7)..(86): NCBI GI: 171690994 Blast Desc: protein product [Podospora anserina] gi|170945445|emb|CAP71557.1| protein product [Podospora anserina]
  misc_feature (22)..(111): NCBI GI: 145253088 Blast Desc: An16g07580 [Aspergillus niger] gi|134083615|emb|CAL00530.1| protein product [Aspergillus niger]
  misc_feature (1)..(105): NCBI GI: 46109918 Blast Desc: FG01841.1 [Gibberella zeae PH-1]
MYRDQGLTLQEVKNEMDNYGFVATERQYYDRLKKWGLTKNIRGEETSIMYRKMLQRKATEDKETDFLRHGQPVDLKKIIRFLKRNKPSLSKLPTRSTPLHILALTPEAGQLHARVRFPWNMSPHKRFLQIKKNELHHGSPARTDDLYDLDWLDEQATGELDGFDSPFGAETVDTYRTIESTFEDLLRNIVPVQNDSEAVVTGTIAPGLPDPLWDIELVETDM

SEQ ID NO: 14296 - DNA, 2181 bp, Muscodor strobelii
  misc_feature: SGI EST ID NO. CUFF.34060.0
  misc_feature: Variant of the nucleotide sequence at SEQ ID NO 14294
agtgaacacggcacaagatatccagtactcggtgattccatgaggcacgcgatctagacaaccattattaaccaaagacaccagcttacttcctgccatggctagtgtcttgaacgaagccgtaaatacttgctttcttctggccaatcgcttaatctctgggtcagataccgatggtacctggcatgagagcaattggtatgttgagccttttgagacaatccctgggagcgaggctggagaagtgatcttggcgcctctcaaccagagcagaccccgctgccgaattattcggttcatagacacgtcagatttgggaagcaatgatattatggtagcaagagaaaatgaaaccgggaaatacaccacacaatatggaccatccaacgagcccttgttgttagaagactggcatatctctatcataggacagtcttgggtacccaatactcaatcatcttcttttcaatcctcattgcacctggatcaattgatcggcgtgatatctcacacgcagaagcgacttccctgctggtcagagttcggctcagattcattttacttccagtcgtgcgagtatcgaagcccaagagttaggacatcatatctcgcgcttcaggagggagaaactcaatctccgactcaccacggtgcttggccaagcgttctcgtcacaggtcgtgtttacatggagctggcagtacacttaagccattatgttgacagcgatatccgtattattcaatcatccactaaaccgattttgacaggcttgagtccattgaccattgggcctatcgatgagctacgtcaagagtccaaccttctcaagagagacggatttacgtttggctctggcagacacatctgcgccggcccccattactcaaaacagatctgggaggacaataagactataattgcacacatgtatagagaccaaggccttacattgcaggaagtcaaaaacgagatggacaactacggttttgtcgctacagaacggcagtactacgaccgcctcaagaaatggggtctaacaaaaaacattcgaggcgaagagacgtccataatgtacaggaagatgcttcaacgaaaggcaactgaggataaggaaactgacttcctgagacatggtcagccagttgaccttaagaaaatcattcggttcttaaagcgcaataaaccatcactgtctaagctacccacgcgctcaacccctcttcacatcttggcccttacacccgaggctgggcaattgcacgcaagagtccggtttccttggaacatgtcgccgcacaagcgattcttgcaaataaagaagaatgaactgcaccatggctcaccggcacgtaccgatgacttatacgatttggactggcttgatgagcaggcaaccggggagcttgatggtttcgactctccctttggcgccgagacagtggatacctaccgcactattgaaagcacatttgaagatctgttaagaaatattgtgcctgtccagaacgacagtgaagcagttgtcaccggtactattgccccaggcctgccagatccgctgtgggatatcgagctggtagaaactgacatgtaatactctccaagaacgtgtaatcttacgggatgctagagccgacactgtattcaaatatccatggaagcaaataactagccattagctatttgcgaagagcgtgaatttcactttacgtcattatgcggttttccttatctgaaatgcgtgcacactcgaccctcttctcagatatagtagtcgaccatacgttttaggacatatgacgaccttgaatttaagtcaccctggaatgtcaagtaactggcaaagaaattaaagaaaacccgaccaagttcacacacacacgaaaagactgatacggactagaattggacaaaaaaagtccattgtccggtgcgaggatcgaactcgcgatcttcggataactcaagctacgcttgatcataatgctgatttttatgagaccgacgctctaaccagctaagccaaccagacaggagcaccgcaataccgaagcatcacgtgattgttgagatttggccattctgtccgatcttatatagaaaagtttgtgggtgcggggttgcactaattgcaccagttgcaccacattagatcgtgtggcactcaattagtagaag

SEQ ID NO: 14297 - DNA, 1581 bp, Muscodor strobelii
  misc_feature: SGI cDNA ID NO. 564708
  misc_feature: Encodes the peptide sequence at SEQ ID NO 14298
atggaagagactaagcaagtcgcaatggctgacatctggaaccaagccgtaaatgactgtttccaaagggccgtttccatgatctcatacggcaccgagacatggacagcacacaattggtatacggaaactttgggaacgatccgtacatgcagtttcgaggacgattctctcctgccaagcagccaggccttaccacagtgtcggatcattcgatacattgacactgcaacactatcacccgacgaaattctaatattgaagcatttcaatggtgaacgcaaaaccattaaagggccatttaacgggccgcttatcttagaggattggctcatttcggtagtaggacaacctcagatcctaagcaataagtcatcaaccgaacagccatcgctagacatgaagaaattcactggcgggatagctcagcaacaaatgggctgcgcaaatgattcagcaatttgctcggcctctaggcatctatcagagtcacgcaaagtacatatcgtaacaaagtgcatggcaattggtgatagtgacttcgagacttcgtttccgatgcatttctttgtaaagactacaggaatgtcagtcgtgcaaggtggcgtctggctcaaattgggatccatccgaacttaccaaacctacgaagattctgtcgagagcgaaaatatacccagtctaccgttctcccagaacctgcaagcagcaaagtcggaccctgaggtagcaagccaggtgaaccgaaatcccgccacataccctgaaatcaacaaggacccaattgcattggatagtagcaatgcacaacaggaatcagaagaaccctctgagtgcacggacttgcaatttgaaatcatgtttgatgacggtcaaaatttgcgacctcagattcatgaggctcaaggagccgtgagatcaaatcgtagacgcaggaagagcgtaccatatcccatcgagcatatcacaggatcactcgtcgacagggaattgcgtagtccaggaacgcagagagcgaaccactcgaagcagagctgggacgataatcggccaatgatagagaaactatacagggaagatgatcttaccttgagacaagtcaaggatattatggacaaacgcggatttatagccaccgaaagagagtactggcctcgtctgaagcaatggggccttacaaagaacattcaaagcgatgaaatgtccatcatgtatcggaagatgatcgaacggaaagttgtggaagacaaagagacaaaattcactttgcatggtcgaccagttgatgataagaggatccatcgcttcgtgaagcgtgtaaatttgacaccttcacagatacccgaaaaagagactccagccttcattctcgcgtacacgcccagcagcccttcgaaacgtggacccgcgactttcccctggtctcaatcgccgcacaagcacttcttgcgaattgctgagtccaagcatattgaatctatgctgatgcacgactcgccagaaagagacagctcaagcaagaaaaatgacctatacgatttaagctggcttgagaatatggacatatggcggccttggtga

SEQ ID NO: 14298 - protein, 526 aa, Muscodor strobelii
  misc_feature: SGI Peptide ID NO. 564708
  misc_feature (346)..(478): NCBI GI: 255945625 Blast Desc: Pc20g10910 [Penicillium chrysogenum Wisconsin 54-1255] gi|211588315|emb|CAP86420.1| Pc20g10910 [Penicillium chrysogenum Wisconsin 54-1255]
  misc_feature (294)..(462): NCBI GI: 156041192 Blast Desc: SS1G_11575 [Sclerotinia sclerotiorum 1980] gi|154695958|gb|EDN95696.1| SS1G_11575 [Sclerotinia sclerotiorum 1980]
  misc_feature (346)..(481): NCBI GI: 238483115 Blast Desc: conserved [Aspergillus flavus NRRL3357] gi|220700846|gb|EED57184.1| conserved [Aspergillus flavus NRRL3357]
  misc_feature (346)..(481): NCBI GI: 195972729 Blast Desc: [Aspergillus oryzae]
  misc_feature (346)..(439): NCBI GI: 121719850 Blast Desc: ACLA_058590 [Aspergillus clavatus NRRL 1] gi|119404835|gb|EAW15197.1| ACLA_058590 [Aspergillus clavatus NRRL 1]
  misc_feature (342)..(453): NCBI GI: 145605984 Blast Desc: MGG_06762 [Magnaporthe grisea 70-15] gi|145013719|gb|EDJ98360.1| MGG_06762 [Magnaporthe grisea 70-15]
  misc_feature (346)..(453): NCBI GI: 164425649 Blast Desc: NCU06072 [Neurospora crassa OR74A] gi|157071008|gb|EAA30599.2| [Neurospora crassa OR74A]
  misc_feature (346)..(439): NCBI GI: 46109918 Blast Desc: FG01841.1 [Gibberella zeae PH-1]
  misc_feature (323)..(478): NCBI GI: 145603809 Blast Desc: [Magnaporthe grisea 70-15] gi|145011959|gb|EDJ96615.1| [Magnaporthe grisea 70-15]
  misc_feature (346)..(439): NCBI GI: 256728689 Blast Desc: NECHADRAFT_96871 [Nectria haematococca mpVI 77-13-4]
MEETKQVAMADIWNQAVNDCFQRAVSMISYGTETWTAHNWYTETLGTIRTCSFEDDSLLPSSQALPQCRIIRYIDTATLSPDEILILKHFNGERKTIKGPFNGPLILEDWLISVVGQPQILSNKSSTEQPSLDMKKFTGGIAQQQMGCANDSAICSASRHLSESRKVHIVTKCMAIGDSDFETSFPMHFFVKTTGMSVVQGGVWLKLGSIRTYQTYEDSVESENIPSLPFSQNLQAAKSDPEVASQVNRNPATYPEINKDPIALDSSNAQQESEEPSECTDLQFEIMFDDGQNLRPQIHEAQGAVRSNRRRRKSVPYPIEHITGSLVDRELRSPGTQRANHSKQSWDDNRPMIEKLYREDDLTLRQVKDIMDKRGFIATEREYWPRLKQWGLTKNIQSDEMSIMYRKMIERKVVEDKETKFTLHGRPVDDKRIHRFVKRVNLTPSQIPEKETPAFILAYTPSSPSKRGPATFPWSQSPHKHFLRIAESKHIESMLMHDSPERDSSSKKNDLYDLSWLENMDIWRPW

SEQ ID NO: 14299 - DNA, 2051 bp, Muscodor strobelii
  misc_feature: SGI EST ID NO. CUFF.34067.0
  misc_feature: Variant of the nucleotide sequence at SEQ ID NO 14297
atgcaggtcacctggcccagcgtctacgccacacctaggacacaccagtctgataggctgatccgccttggacaaaactacacttccaatgaagacttgcagcaaattgtgttggcctcgctcttgtaccttggcctgtgggccgggcgaggaagtgcgttcatggtgaaaaatgagttactagcctcgccctctcggctcacatcgtttcctcgaaatacacagcaacacccggagtcaaaacaccagtattctatataactacttaggacttgactcgtgcagagagccacatcgttagatttcatggaagagactaagcaagtcgcaatggctgacatctggaaccaagccgtaaatgactgtttccaaagggccgtttccatgatctcatacggcaccgagacatggacagcacacaattggtatacggaaactttgggaacgatccgtacatgcagtttcgaggacgattctctcctgccaagcagccaggccttaccacagtgtcggatcattcgatacattgacactgcaacactatcacccgacgaaattctaatattgaagcatttcaatggtgaacgcaaaaccattaaagggccatttaacgggccgcttatcttagaggattggctcatttcggtagtaggacaacctcagatcctaagcaataagtcatcaaccgaacagccatcgctagacatgaagaaattcactggcgggatagctcagcaacaaatgggctgcgcaaatgattcagcaatttgctcggcctctaggcatctatcagagtcacgcaaagtacatatcgtaacaaagtgcatggcaattggtgatagtgacttcgagacttcgtttccgatgcatttctttgtaaagactacaggaatgtcagtcgtgcaaggtggcgtctggctcaaattgggatccatccgaacttaccaaacctacgaagattctgtcgagagcgaaaatatacccagtctaccgttctcccagaacctgcaagcagcaaagtcggaccctgaggtagcaagccaggtgaaccgaaatcccgccacataccctgaaatcaacaaggacccaattgcattggatagtagcaatgcacaacaggaatcagaagaaccctctgagtgcacggacttgcaatttgaaatcatgtttgatgacggtcaaaatttgcgacctcagattcatgaggctcaaggagccgtgagatcaaatcgtagacgcaggaagagcgtaccatatcccatcgagcatatcacaggatcactcgtcgacagggaattgcgtagtccaggaacgcagagagcgaaccactcgaagcagagctgggacgataatcggccaatgatagagaaactatacagggaagatgatcttaccttgagacaagtcaaggatattatggacaaacgcggatttatagccacgtacgccaaagctattttaacctcgtagtcccgatgcatgctaatttcccacagcgaaagagagtactggcctcgtctgaagcaatggggccttacaaagaacattcaaagcgatgaaatgtccatcatgtatcggaagatgatcgaacggaaagttgtggaagacaaagagacaaaattcactttgcatggtcgaccagttgatgataagaggatccatcgcttcgtgaagcgtgtaaatttgacaccttcacagatacccgaaaaagagactccagccttcattctcgcgtacacgcccagcagcccttcgaaacgtggacccgcgactttcccctggtctcaatcgccgcacaagcacttcttgcgaattgctgagtccaagcatattgaatctatgctgatgcacgactcgccagaaagagacagctcaagcaagaaaaatgacctatacgatttaagctggcttgagaatatggacatatggcggccttggtgaacaatctggcgacagaaatgatgacagtataggatgagagttttctttacgacaatacacatgcaatatacgtagtcacatgaaagctgattacaccacctagattcctt

SEQ ID NO: 14300 - DNA, 1575 bp, Muscodor strobelii
  misc_feature: SGI cDNA ID NO. 564709
  misc_feature: Encodes the peptide sequence at SEQ ID NO 14301
atggaagagactaagcaagtcgcaatggctgacatctggaaccaagccgactgtttccaaagggccgtttccatgatctcatacggcaccgagacatggacagcacacaattggtatacggaaactttgggaacgatccgtacatgcagtttcgaggacgattctctcctgccaagcagccaggccttaccacagtgtcggatcattcgatacattgacactgcaacactatcacccgacgaaattctaatattgaagcatttcaatggtgaacgcaaaaccattaaagggccatttaacgggccgcttatcttagaggattggctcatttcggtagtaggacaacctcagatcctaagcaataagtcatcaaccgaacagccatcgctagacatgaagaaattcactggcgggatagctcagcaacaaatgggctgcgcaaatgattcagcaatttgctcggcctctaggcatctatcagagtcacgcaaagtacatatcgtaacaaagtgcatggcaattggtgatagtgacttcgagacttcgtttccgatgcatttctttgtaaagactacaggaatgtcagtcgtgcaaggtggcgtctggctcaaattgggatccatccgaacttaccaaacctacgaagattctgtcgagagcgaaaatatacccagtctaccgttctcccagaacctgcaagcagcaaagtcggaccctgaggtagcaagccaggtgaaccgaaatcccgccacataccctgaaatcaacaaggacccaattgcattggatagtagcaatgcacaacaggaatcagaagaaccctctgagtgcacggacttgcaatttgaaatcatgtttgatgacggtcaaaatttgcgacctcagattcatgaggctcaaggagccgtgagatcaaatcgtagacgcaggaagagcgtaccatatcccatcgagcatatcacaggatcactcgtcgacagggaattgcgtagtccaggaacgcagagagcgaaccactcgaagcagagctgggacgataatcggccaatgatagagaaactatacagggaagatgatcttaccttgagacaagtcaaggatattatggacaaacgcggatttatagccaccgaaagagagtactggcctcgtctgaagcaatggggccttacaaagaacattcaaagcgatgaaatgtccatcatgtatcggaagatgatcgaacggaaagttgtggaagacaaagagacaaaattcactttgcatggtcgaccagttgatgataagaggatccatcgcttcgtgaagcgtgtaaatttgacaccttcacagatacccgaaaaagagactccagccttcattctcgcgtacacgcccagcagcccttcgaaacgtggacccgcgactttcccctggtctcaatcgccgcacaagcacttcttgcgaattgctgagtccaagcatattgaatctatgctgatgcacgactcgccagaaagagacagctcaagcaagaaaaatgacctatacgatttaagctggcttgagaatatggacatatggcggccttggtga

SEQ ID NO: 14301 - protein, 524 aa, Muscodor strobelii
  misc_feature: SGI Peptide ID NO. 564709
  misc_feature (344)..(476): NCBI GI: 255945625 Blast Desc: Pc20g10910 [Penicillium chrysogenum Wisconsin 54-1255] gi|211588315|emb|CAP86420.1| Pc20g10910 [Penicillium chrysogenum Wisconsin 54-1255]
  misc_feature (292)..(460): NCBI GI: 156041192 Blast Desc: SS1G_11575 [Sclerotinia sclerotiorum 1980] gi|154695958|gb|EDN95696.1| SS1G_11575 [Sclerotinia sclerotiorum 1980]
  misc_feature (344)..(479): NCBI GI: 238483115 Blast Desc: conserved [Aspergillus flavus NRRL3357] gi|220700846|gb|EED57184.1| conserved [Aspergillus flavus NRRL3357]
  misc_feature (344)..(479): NCBI GI: 195972729 Blast Desc: [Aspergillus oryzae]
  misc_feature (344)..(437): NCBI GI: 121719850 Blast Desc: ACLA_058590 [Aspergillus clavatus NRRL 1] gi|119404835|gb|EAW15197.1| ACLA_058590 [Aspergillus clavatus NRRL 1]
  misc_feature (340)..(451): NCBI GI: 145605984 Blast Desc: MGG_06762 [Magnaporthe grisea 70-15] gi|145013719|gb|EDJ98360.1| MGG_06762 [Magnaporthe grisea 70-15]
  misc_feature (344)..(451): NCBI GI: 164425649 Blast Desc: NCU06072 [Neurospora crassa OR74A] gi|157071008|gb|EAA30599.2| [Neurospora crassa OR74A]
  misc_feature (344)..(437): NCBI GI: 46109918 Blast Desc: FG01841.1 [Gibberella zeae PH-1]
  misc_feature (321)..(476): NCBI GI: 145603809 Blast Desc: [Magnaporthe grisea 70-15] gi|145011959|gb|EDJ96615.1| [Magnaporthe grisea 70-15]
  misc_feature (344)..(437): NCBI GI: 256728689 Blast Desc: NECHADRAFT_96871 [Nectria haematococca mpVI 77-13-4]
MEETKQVAMADIWNQADCFQRAVSMISYGTETWTAHNWYTETLGTIRTCSFEDDSLLPSSQALPQCRIIRYIDTATLSPDEILILKHFNGERKTIKGPFNGPLILEDWLISVVGQPQILSNKSSTEQPSLDMKKFTGGIAQQQMGCANDSAICSASRHLSESRKVHIVTKCMAIGDSDFETSFPMHFFVKTTGMSVVQGGVWLKLGSIRTYQTYEDSVESENIPSLPFSQNLQAAKSDPEVASQVNRNPATYPEINKDPIALDSSNAQQESEEPSECTDLQFEIMFDDGQNLRPQIHEAQGAVRSNRRRRKSVPYPIEHITGSLVDRELRSPGTQRANHSKQSWDDNRPMIEKLYREDDLTLRQVKDIMDKRGFIATEREYWPRLKQWGLTKNIQSDEMSIMYRKMIERKVVEDKETKFTLHGRPVDDKRIHRFVKRVNLTPSQIPEKETPAFILAYTPSSPSKRGPATFPWSQSPHKHFLRIAESKHIESMLMHDSPERDSSSKKNDLYDLSWLENMDIWRPW

SEQ ID NO: 14302 - DNA, 2051 bp, Muscodor strobelii; identical to SEQ ID NO: 14299
  misc_feature: SGI EST ID NO. CUFF.34067.0
  misc_feature: Variant of the nucleotide sequence at SEQ ID NO 14300

SEQ ID NO: 14303 - DNA, 777 bp, Muscodor strobelii
  misc_feature: SGI cDNA ID NO. 564710
  misc_feature: Encodes the peptide sequence at SEQ ID NO 14304
atggctacgcgaccgagtttattcacgagaggtctctcgtcgctctctcagagccaagacgccaactcgccaaacgtcagctcacccgccgagcagcgagatgatgcgaagcggaacttcctcaagacgatccgaccgttgcctacgcagcactattggaaattctggttcgatcgaccatccaaggagcagaaacccgacgatggcaactaccaggcatccttagagcagttgggtacccaggtcgaatctgttcaggacttttggcgatacaacaacaacatcgacgtcggcgatatcaagatgcgcgagtcattatacttattcaaagaaggattcatgcccatctgggaggatcgccgcaacattcagggaggcagctggactttccgggtgcccaagagctctggcaaagacttctggacccgaatccagctgatggcgattggtgaaacgttacaagaagccctcgatgaaggtgatcagatctgtggagttggcctctcggtccggtttaattcccacctcatctcgatttggcaccgcgactcctcaaagcaaaagtcgatcgatgcgatgctacagacagtgttgagcgagctacctcctgagatgcagccaaaacccgacaactatttctacaagaagcactccgatcacgctggtttcaaggcgcctcccgagctgcaagccgtcctcgactcgcagaagcgggcgcaagaagctgctgccaagaaggccgcagatgctgctgctgctgctccagccgccgagtag

SEQ ID NO: 14304 - protein, 258 aa, Muscodor strobelii
  misc_feature: SGI Peptide ID NO. 564710
  misc_feature (21)..(231): Pfam Id: PF01652 Pfam Desc: Eukaryotic initiation factor 4E
  misc_feature (106)..(185): Pfam Id: PF01652 Pfam Desc: Eukaryotic initiation factor 4E
  misc_feature (7)..(236): NCBI GI: 171692355 Blast Desc: protein product [Podospora anserina] gi|170946126|emb|CAP72927.1| protein product [Podospora anserina]
  misc_feature (1)..(236): NCBI GI: 116206504 Blast Desc: CHGG_02545 [Chaetomium globosum CBS 148.51] gi|88183142|gb|EAQ90610.1| CHGG_02545 [Chaetomium globosum CBS 148.51]
  misc_feature (1)..(237): NCBI GI: 16944499 Blast Desc: related to translation initiation factor 4e [Neurospora crassa]
  misc_feature (1)..(251): NCBI GI: 46125537 Blast Desc: FG07146.1 [Gibberella zeae PH-1]
  misc_feature (1)..(258): NCBI GI: 256730948 Blast Desc: NECHADRAFT_101576 [Nectria haematococca mpVI 77-13-4]
  misc_feature (1)..(258): NCBI GI: 145612203 Blast Desc: MGG_12301 [Magnaporthe grisea 70-15] gi|145019409|gb|EDK03637.1| MGG_12301 [Magnaporthe grisea 70-15]
  misc_feature (1)..(227): NCBI GI: 156064579 Blast Desc: SS1G_00297 [Sclerotinia sclerotiorum 1980] gi|154691159|gb|EDN90897.1| SS1G_00297 [Sclerotinia sclerotiorum 1980]
  misc_feature (1)..(227): NCBI GI: 154323023 Blast Desc: translation initiation factor 4E [Botryotinia fuckeliana B05.10] gi|150848188|gb|EDN23381.1| translation initiation factor 4E [Botryotinia fuckeliana B05.10]
  misc_feature (1)..(237): NCBI GI: 164426840 Blast Desc: NCU03717 [Neurospora crassa OR74A] gi|157071497|gb|EAA32257.2| conserved [Neurospora crassa OR74A]
  misc_feature (28)..(228): NCBI GI: 242806761 Blast Desc: translation initiation factor eIF4E, [Talaromyces stipitatus ATCC 10500] gi|218715437|gb|EED14859.1| translation initiation factor eIF4E, [Talaromyces stipitatus ATCC 10500]
MATRPSLFTRGLSSLSQSQDANSPNVSSPAEQRDDAKRNFLKTIRPLPTQHYWKFWFDRPSKEQKPDDGNYQASLEQLGTQVESVQDFWRYNNNIDVGDIKMRESLYLFKEGFMPIWEDRRNIQGGSWTFRVPKSSGKDFWTRIQLMAIGETLQEALDEGDQICGVGLSVRFNSHLISIWHRDSSKQKSIDAMLQTVLSELPPEMQPKPDNYFYKKHSDHAGFKAPPELQAVLDSQKRAQEAAAKKAADAAAAAPAAE

SEQ ID NO: 14305 - DNA, 2356 bp, Muscodor strobelii
  misc_feature: SGI EST ID NO. CUFF.34179.0
  misc_feature: Variant of the nucleotide sequence at SEQ ID NO 14303
ctgaaacggtcgatagtgagattccccagatcttacccggttatcgatcaagagagatgttgcccccaacggcgataattaatatcatcttcggaagcatcaatatgatgatcatgttggtcatggtttggcaaacgcagtggaggcgaaacggaatacagtcccaaactctagcacacgctgtgcacgagatagcttagcgaacaaggccatccgtattttcgagacgacacttgcacactcggtattgattcacgacaaggaactcaaccatctggcctgagttgtacagtaattggcactgttgaaggaagccaattaccttatttgtttcaattcgaatcacgtttagacaggatgtttcaaacccccaaacgagccccgctggaaacttgaatggttggcgggggcatatctactgtagcttggggccgccgggcgcgctaaccgagctcccgtctaagactggtcctgtggcacgcctggcttgcagcttcaacatgctctattgctgcaacatgctggtggttggtcgggaacgcaagccctctctggccgctgcaaggcacagcccactctctcgtattacttgcgtctgtacacatataaggtattttaggatgatccaagtattcaagaccaatacaatcaattaagccccaaagccaagtgctttaggataggaaagccgcccgatataagcaggttaagggcctgctctcgtttcagagccccgacatttgtgaatcgcgccgcatctcccctgagtaaaacagcgtgttctaaccatacactaagtcagttacttaatctcctccttgtttgactcgtttctttcactctttcacctttacctctgcctttcacgccctttgctgttgtttgctggatagctcaacttgcgatagcataacgttgtctagagctgaagctaccttacttaagcactttaaggtccctttgttcgttgggcattgtggatgcccatcgaagacccctgcgccagtcaggacatacatcacctagaggcttggcaacgttgaaacgaccaggaaccccgccaacatcacctttatcctcccctccatcagctcacgcgccaggaaactcaatttcacaaccgtctttcccaccatggctacgcgaccgagtttattcacgagaggtctctcgtcgctctctcagagccaagacgccaactcgccaaacgtcagctcacccgccgagcagcgagatgatgcgaagcggaacttcctcaagacgatccgaccgttgcctacgcagcactattggaaattctggttcgatcgaccatccaaggagcagaaacccgacgatggcaactaccaggcatccttagagcagttgggtacccaggtcgaatctgttcaggacttttggcgatacaacaacaacatcgacgtcggcgatatcaagatgcgcgagtcattatacttattcaaagaaggattcatgcccatctgggaggatcgccgcaacattcagggaggcagctggactttccgggtgcccaagagctctggcaaagacttctggacccgaatccagctgatggcgattggtgaaacgttacaagaagccctcgatgaaggtgatcagatctgtggagttggcctctcggtccggtttaattcccacctcatctcgatttggcaccgcgactcctcaaagcaaaagtcgatcgatgcgatgctacagacagtgttgagcgagctacctcctgagatgcagccaaaacccgacaactatttctacaagaagcactccgatcacgctggtttcaaggcgcctcccgagctgcaagccgtcctcgactcgcagaagcgggcgcaagaagctgctgccaagaaggccgcagatgctgctgctgctgctccagccgccgagtaggcatatgttcatcaactgctttggtgaaagtcgatggagtggatatctgatgcatggatgattgtttgcatgttggtttgcttcttctgtgttacattccacggttcgtcgggcatcacctggaacccagattcacgatcttggctcaggatatagaatggcaacgtatgcatcattttggcgttagcgatggaaagcttgtgagattattttatgaggcgcattatcatgccattgaatcaaatacgcaactcagaatggcccccaaaatgattgaaactggtgcgttgttgctttgttgctgtgtttgccatggttcatttcatcatggccagccgtatggcaagattcgccatacaagctggcagtcgcctgtcattacaatcaatgcatctttgaccttctaaaagcataactagaatttgacgcattcatagagttgctc

SEQ ID NO: 14306 - DNA, 570 bp, Muscodor strobelii
  misc_feature: SGI cDNA ID NO. 564711
  misc_feature: Encodes the peptide sequence at SEQ ID NO 14307
atgccgaaaaggaaagcgccgggtgcagctcccaaggacacagcgccgaaggaacggcagtctaagctcgcgaaggagcacaatatctcagcacgcgatgagcgcgagataaaagaggcgtttgcgctgtttgcggaaccgatggatggcgagaaagagggcgtcatcccttctaaagatgtgcgacgggctatggtcgctctaggtctaccaccgagcaaagaagagctcacagagttcctctcaatcctggatcctgacgacgagggccacgcaacctacgaacccttcgtagcgatctgcgctctcaaactgcatgcacgagaggaagctggcggacccgactctgcagaggtcgaagaagctttccgtttattcatgggtgatgccaatgatgaaacattgaccctcgcgcatctcaaacgagtcgctatgacgctcaagcaggatgttgacgagagtctattgcgggatatgatccttgaggcgaatggtggtgcgggtgtcggacggggtgtctcgatgacggagttcgaggaagttatgcgaagggcgggtgcttggaaatga

SEQ ID NO: 14307 - protein, 189 aa, Muscodor strobelii
  misc_feature: SGI Peptide ID NO. 564711
  misc_feature (2)..(189): NCBI GI: 46125539 Blast Desc: FG07147.1 [Gibberella zeae PH-1]
  misc_feature (19)..(189): NCBI GI: 164426875 Blast Desc: NCU03750 [Neurospora crassa OR74A] gi|157071513|gb|EAA31861.2| NCU03750 [Neurospora crassa OR74A]
  misc_feature (19)..(189): NCBI GI: 16944630 Blast Desc: related to calmodulin [Neurospora crassa]
  misc_feature (2)..(189): NCBI GI: 256731323 Blast Desc: NECHADRAFT_84686 [Nectria haematococca mpVI 77-13-4]
  misc_feature (1)..(189): NCBI GI: 39946068 Blast Desc: MGG_08154 [Magnaporthe grisea 70-15] gi|145019408|gb|EDK03636.1| MGG_08154 [Magnaporthe grisea 70-15]
  misc_feature (1)..(189): NCBI GI: 154323025 Blast Desc: calmodulin [Botryotinia fuckeliana B05.10] gi|150848189|gb|EDN23382.1| calmodulin [Botryotinia fuckeliana B05.10]
  misc_feature (2)..(189): NCBI GI: 156064577 Blast Desc: SS1G_00296 [Sclerotinia sclerotiorum 1980] gi|154691158|gb|EDN90896.1| SS1G_00296 [Sclerotinia sclerotiorum 1980]
  misc_feature (2)..(188): NCBI GI: 239612951 Blast Desc: EF-hand superfamily Ca2+-modulated protein [Ajellomyces dermatitidis ER-3]
  misc_feature (2)..(188): NCBI GI: 261189747 Blast Desc: EF-hand superfamily Ca2+-modulated protein [Ajellomyces dermatitidis SLH14081] gi|239591520|gb|EEQ74101.1| EF-hand superfamily Ca2+-modulated protein [Ajellomyces SLH14081]
  misc_feature (19)..(189): NCBI GI: 171692357 Blast Desc: protein product [Podospora anserina] gi|170946127|emb|CAP72928.1| protein product [Podospora anserina]
MPKRKAPGAAPKDTAPKERQSKLAKEHNISARDEREIKEAFALFAEPMDGEKEGVIPSKDVRRAMVALGLPPSKEELTEFLSILDPDDEGHATYEPFVAICALKLHAREEAGGPDSAEVEEAFRLFMGDANDETLTLAHLKRVAMTLKQDVDESLLRDMILEANGGAGVGRGVSMTEFEEVMRRAGAWK

SEQ ID NO: 14308 - DNA, 4157 bp, Muscodor strobelii
  misc_feature: SGI EST ID NO. CUFF.34070.0
  misc_feature: Variant of the nucleotide sequence at SEQ ID NO 14306
tcacatagagccctgttacgcgtcgtcggaacagatcctgaccaatatgaccttgaccggaaacccatgtctgtggcgtcgcagttcaggcatggagaacgcgattagccacagccaaggcggggttcgggtggacaattcgaacgggatagtggagctggagagttacgatcttccaatctcaacgggaatctctgaagcacggccatgctggccgactgacagttgagcccatcatgaaaaaaatgagcgttaccgaaatagtccattggtatcgaaaagttcaccgtaacgatcaggtcactgctccggacaaatcctcgttcccaagccaatcacccgaaagatgaggatcccaggctgaaggacatcgcgtctcattcagttccgtcgtttgttcttcgtatacagagcagatccaccagtaatcaagctccactgccaacttgttcgggaggcacgggcagttgtcgtcaaggttcgggcggtaagaggaaaagttagtaacagatttcagactgacattgtactaaactgcgggctcgtatagctagtttggcgggaatggaggactcaaagccgcacgagtcccggccacgtggtccgagactgtatcataaaaaatcacggactggttgcttgcgctgtaaacagcgaagggtaaagtgtgatgagctgcgtcctagttgtggaagctgcacaagacatgcggtcgaatgtatctacgcaacccaagcatctgggtcggcgagtgcacagtcgcaagccggaccagctggactggatgatcacaaagcatttgcagtctcgactgtgaaatccgaatctccggtgactttggagccagcatctgtcgtcaatgtacatccatctttcagtcctctatccacgccgacgaccatgggaatgtccccacacaactcagccatatatccttccccaagttcatctcatcaagcgtcacatactgatgacaatgatcccgatattagcctacctgagggtcactggcgcagattatgggagctgcggctattgcataacaatcaaactcgtttacaagccgatcttgctcagggccaactccccgaagtcgtacatgtctggctttacgaagagccccagctagcactaacaatggctcaaaagtacggccggtgtggtctgctgtacataagcctcgctcattcagcgctgcatctgtggtctgttagtgaggatcctcaggagcgtgaagagctgatcaagctgcaacggatatatcatattatgtgtagcaaggaacagaggcgtgatgtggacgagatctccacagcgcaccccaaattccttgattacgtttgcttcacggccctcaagatcctagcgcattcgctagctctggtacagacattgtccacagatccttgggaaccacctgtgcaatggcttcacatgggctacggtgctggacaaatattccagagggtagcctctctagttatctcggaccagcgaccttacgagagcactatcggaaagtatttgcataccccgccaatgctgaaccatgctgaggacacaatattgagcgataatacgccgctattatggttgcttgaaaatccctctcctccaagctcaatcgaagctcagacggaccaggaactcaatgatgagaatactcgatcggtgtatcatatgacactgggctatatatgtagcgtgattagagcgaaggaggagggcgaagcagagtatgggatcatcagaagactcggtggcttcgccgtatgggtaccgatcgagttcagtaaatttgtcgaagagaagcgcccacgagccctcgtcattctcgcacatttcatgtctctctggattccatatgaacacgtgtggatccttgggaagtcaggggagtggcaaattcggtgcatttataaacagctgccaataggatggactcggaaattggatggcctatttgcgcagtttacggatccagtcgcgagatgacacccttctttatactgatgactccgtggtagaaggaccagattgtattttcgcttaccatgacgtggcatccgtaccttccacaccttcctgccaacatttgaatctcgcaaacaaggagcgaccaatcatagcgcgcgccactcacgataatacatgtttataggtatcaatggctggcagacccttcgacttcccagaatgggccggtgaccaccaatgccgccaccaattcgggccaagttagtcaggttgaaacggagttgtactgcgtttcaggtagcgtctgaatgcagagaacaccggttcggaccgaggcattacccttttgcaattttttgaaaactgcaaattgtctctgcaccgcctctccgtggctctacttgactttcaaggacaaattcatgccagattatcgccatcagccgccatgtaattattgcatctgtccgatttggaaacacaaattggttcaagtcgacgaaacgaggggccgggagattgctctttgaactagaaatatacctagttgcaaactttcaggtagcttccttcgcaggtatatgagcaaagtcggctgatgattatcgagactgcctcagcgacgagagtcattcgaaagaacaattgtgcttggacagttcatgttactcaactgtcggtcacaatgctgtcgacttacagctccgcatagtttgatatggtggatatctacggaacatggccagattttatcatcaaagtgagaagaatgtatcgcagatgggagctgacagccatccgaaatagtagattgacgctatgtgacggcacgatgaagaatgtaaatgcactgccatccatgcacttatccagctgttaagtggcttaagatactaaatatgccatccacatgcacatacccggctcgttgaacccgtaaactgcatgcatacaatcttctcgttccttaatgcgtcaccagttcggccccaccaagtatgagacaaccgttcatcaaaacaacaacgaaaatgaattcaatgaccatcagaaggtagcacagtttgagcgcaatccctgatgtgatagacatagcgcaagatttcttctcgcaccatgccgaaaaggaaagcgccgggtgcagctcccaaggacacagcgccgaaggaacggcagtctaagctcgcgaaggagcacaatatctcagcacgcgatgagcgcgagataaaagaggcgtttgcgctgtttgcggaaccgatggatggcgagaaagagggcgtcatcccttctaaagatgtgcgacgggctatggtcgctctaggtctaccaccgagcaaagaagagctcacagagttcctctcaatcctggatcctgacgacgagggccacgcaacctacgaacccttcgtagcgatctgcgctctcaaactgcatgcacgagaggaagctggcggacccgactctgcagaggtcgaagaagctttccgtttattcatgggtgatgccaatgatgaaacattgaccctcgcgcatctcaaacgagtcgctatgacgctcaagcaggatgttgacgagagtctattgcgggatatgatccttgaggcgaatggtggtgcgggtgtcggacggggtgtctcgatgacggagttcgaggaagttatgcgaagggcgggtgcttggaaatgagcaagtgtcgagacgtgagaacgattacgattattgatgataacatttggccagagactggcgacgagttgggaagcgaatgagtgaatgagaggcgtcgcgaggatatggcgtcggatgcatgagtttcgaggagcgaggcaggcgcagtgattagattgcatcaccatggtgatgaattcagagttattgctgcaattctatgcgccaaaagagcaggacattaatgcttaacattgttacatccgaaagcaagtgcaggcaggaaggctacagtcagtgagcatgagcgcatcgatgagaaggtcgccaagaaggctggtgtgcggaaatctcattgtaaggtcactatctaggcttgagtaagcttatcaagaatcatcagaaccatcgtgcaggcgaccgggcgtagtgcaggtgcaggtgcaggtgcgggctggttgctatggtggttgccagtcaggtcggaggggttgaagtatatctaccctgat

SEQ ID NO: 14309 - DNA, 1095 bp, Muscodor strobelii
  misc_feature: SGI cDNA ID NO. 564712
  misc_feature: Encodes the peptide sequence at SEQ ID NO 14310
atgggaatgtccccacacaactcagccatatatccttccccaagttcatctcatcaagcgtcacatactgatgacaatgatcccgatattagcctacctgagggtcactggcgcagattatgggagctgcggctattgcataacaatcaaactcgtttacaagccgatcttgctcagggccaactccccgaagtcgtacatgtctggctttacgaagagccccagctagcactaacaatggctcaaaagtacggccggtgtggtctgctgtacataagcctcgctcattcagcgctgcatctgtggtctgttagtgaggatcctcaggagcgtgaagagctgatcaagctgcaacggatatatcatattatgtgtagcaaggaacagaggcgtgatgtggacgagatctccacagcgcaccccaaattccttgattacgtttgcttcacggccctcaagatcctagcgcattcgctagctctggtacagacattgtccacagatccttgggaaccacctgtgcaatggcttcacatgggctacggtgctggacaaatattccagagggtagcctctctagttatctcggaccagcgaccttacgagagcactatcggaaagtatttgcataccccgccaatgctgaaccatgctgaggacacaatattgagcgataatacgccgctattatggttgcttgaaaatccctctcctccaagctcaatcgaagctcagacggaccaggaactcaatgatgagaatactcgatcggtgtatcatatgacactgggctatatatgtagcgtgattagagcgaaggaggagggcgaagcagagtatgggatcatcagaagactcggtggcttcgccgtatgggtaccgatcgagttcagtaaatttgtcgaagagaagcgcccacgagccctcgtcattctcgcacatttcatgtctctctggattccatatgaacacgtgtggatccttgggaagtcaggggagtggcaaattcggtgcatttataaacagctgccaataggatggactcggaaattggatggcctatttgcgcagtttacggatccagtcgcgagatga

SEQ ID NO: 14310 - protein, 364 aa, Muscodor strobelii
  misc_feature: SGI Peptide ID NO. 564712
  misc_feature (34)..(352): NCBI GI: 119483154 Blast Desc: C6 zinc finger domain protein [Neosartorya fischeri NRRL 181] gi|119409760|gb|EAW19708.1| C6 zinc finger domain protein [Neosartorya fischeri NRRL 181]
  misc_feature (43)..(347): NCBI GI: 145251874 Blast Desc: An16g01370 [Aspergillus niger] gi|134082991|emb|CAK42754.1| protein product [Aspergillus niger]
  misc_feature (30)..(352): NCBI GI: 159123373 Blast Desc: AFUB_092100 [Aspergillus fumigatus A1163]
  misc_feature (13)..(352): NCBI GI: 146324876 Blast Desc: C6 transcription factor [Aspergillus fumigatus Af293] gi|129556615|gb|EBA27290.1| C6 transcription factor, [Aspergillus fumigatus Af293]
  misc_feature (33)..(347): NCBI GI: 46137697 Blast Desc: FG10364.1 [Gibberella zeae PH-1]
  misc_feature (13)..(347): NCBI GI: 256725643 Blast Desc: NECHADRAFT_44224 [Nectria haematococca mpVI 77-13-4]
  misc_feature (34)..(347): NCBI GI: 238839582 Blast Desc: C6 finger domain-containing protein [Microsporum canis CBS 113480]
  misc_feature (17)..(347): NCBI GI: 238501006 Blast Desc: conserved [Aspergillus flavus NRRL3357] gi|220691974|gb|EED48321.1| conserved [Aspergillus flavus NRRL3357]
  misc_feature (38)..(347): NCBI GI: 212528218 Blast Desc: C6 transcription factor, [Penicillium marneffei ATCC 18224] gi|210073664|gb|EEA27751.1| C6 transcription factor, [Penicillium marneffei ATCC 18224]
  misc_feature (65)..(347): NCBI GI: 154314405 Blast Desc: BC1G_05296 [Botryotinia fuckeliana B05.10] gi|150848941|gb|EDN24134.1| BC1G_05296 [Botryotinia fuckeliana B05.10]
MGMSPHNSAIYPSPSSSHQASHTDDNDPDISLPEGHWRRLWELRLLHNNQTRLQADLAQGQLPEVVHVWLYEEPQLALTMAQKYGRCGLLYISLAHSALHLWSVSEDPQEREELIKLQRIYHIMCSKEQRRDVDEISTAHPKFLDYVCFTALKILAHSLALVQTLSTDPWEPPVQWLHMGYGAGQIFQRVASLVISDQRPYESTIGKYLHTPPMLNHAEDTILSDNTPLLWLLENPSPPSSIEAQTDQELNDENTRSVYHMTLGYICSVIRAKEEGEAEYGIIRRLGGFAVWVPIEFSKFVEEKRPRALVILAHFMSLWIPYEHVWILGKSGEWQIRCIYKQLPIGWTRKLDGLFAQFTDPVAR

SEQ ID NO: 14311 - DNA, 4157 bp, Muscodor strobelii; identical to SEQ ID NO: 14308
  misc_feature: SGI EST ID NO. CUFF.34070.0
  misc_feature: Variant of the nucleotide sequence at SEQ ID NO 14309

SEQ ID NO: 14312 - DNA, 1278 bp, Muscodor strobelii
  misc_feature: SGI cDNA ID NO. 564713
  misc_feature: Encodes the peptide sequence at SEQ ID NO 14313
atgtcttcttcttcgttgtccaactcctcgggagttcccacgtcttccgcagactctgagagcctattgccatggaagttcaaggtcgatcttccgcaggatggcagaatcagagtgggagacaccctgccatggcctatcattgtcagcgggcattctaccgcggtatttctcaatcaagagattcaactcattgccttgacagaaaggtgggagtcatccaagcccgctggatggatcatgcacggaaacgaaaagtattatctcatacctcccatggatggcgtgttcgggacgttgagggccagaagacaagctcgagaggaatcttcagaaagtgactccgaccctcaacactatgtcgtcttccctaaactaccggagcttgcagttggtgaatatgaaccatttacacttaaactaggcgtttttatatgcgatggagacagggccgactattatggtcacaagggcaaaggtccaataatcggttggcgacttcttgcattaagcgatactttcaaagtcattgcatgggagcccagagacgacgtcccactagctcagaagcagatccaattcatagaggcgctgcgcaagacggatttgtatccaatgctgccagataaagaaacaaataaagatcagcagacggtcaagtacatcccaatgcccagactccagtttttggtgcgtccaagaaattttatggcccctaaagtcgatctgccaattgtcgtccgtatcgacaccgatcttgagcatgaaaacagatatcagggcgtgctacgttttagtcttatcgaagattctacagtagtcgatcgtcgtggactaccacagcgaacaattttggggacactcgagcctgtgaaaatttcaggggaatttgttgcggcaagtcaaagtcggataaaaagctgtcgttttgctacgttccggggcgatttagtggataaagtgcctgaaaagaagcagggagacgagaccacgccagagacatatcggcatttcagagttcgagtcgagtacttcaagactaggggggacgcgaatgatgaaaaagccctccccatgacctggattgactcttgcgcattcgcgattactgatgatccgcaactccttaaaaagcaagtctgggatgataaggaaacagctgctctgtattttgtcagacccacggatggcttcgagtggaatgctttgaagctagaccaaatggtcccgccccatcccaagcacagggcagatatcttgggatatgacctcgtttga

SEQ ID NO: 14313 - protein, 425 aa, Muscodor strobelii
  misc_feature: SGI Peptide ID NO. 564713
MSSSSLSNSSGVPTSSADSESLLPWKFKVDLPQDGRIRVGDTLPWPIIVSGHSTAVFLNQEIQLIALTERWESSKPAGWIMHGNEKYYLIPPMDGVFGTLRARRQAREESSESDSDPQHYVVFPKLPELAVGEYEPFTLKLGVFICDGDRADYYGHKGKGPIIGWRLLALSDTFKVIAWEPRDDVPLAQKQIQFIEALRKTDLYPMLPDKETNKDQQTVKYIPMPRLQFLVRPRNFMAPKVDLPIVVRIDTDLEHENRYQGVLRFSLIEDSTVVDRRGLPQRTILGTLEPVKISGEFVAASQSRIKSCRFATFRGDLVDKVPEKKQGDETTPETYRHFRVRVEYFKTRGDANDEKALPMTWIDSCAFAITDDPQLLKKQVWDDKETAALYFVRPTDGFEWNALKLDQMVPPHPKHRADILGYDLV

SEQ ID NO: 14314 - DNA, 753 bp, Muscodor strobelii
  misc_feature: SGI cDNA ID NO. 564714
  misc_feature: Elevated expression when VOC is produced
  misc_feature: Encodes the peptide sequence at SEQ ID NO 14315
atgccattaccattcatcaacccgccacttcttgtctggatcaagtggcaggagggatcctcacaggcgccgcagtccggagccaagccagatctcagtcccgctagaggtagggtacgtctcagtaccgtttgcgtagggagttcgaagaataaaggcggtggtccggatccaacccaaacggatgccgatagctccagggtcatcgaaatcgtgcatcccgttccctactcgaatgacttcgtcggctcattgtcttcagaatactaccttgccatcttcaatggcctgaagtacgaagatacggacaaaaggaatattgaaagcctgaggaacaatctagaggctgtggagctcagaagatttctatttgacggggaaacatccggacataggttcagattccgcgtcgaatatttggagcaaggtagtgatgaagtcgcagcatggaccgactcagaatcattctgctggaaagaatccgatcaacccggcatccatgatccagaagtggataatctagatttcagtgacgaggaaagacacttcatgcttctgctcgaccgtaacgaccagttcaactttaagtgggacgaacgtgtatttggcgcacgtcctgatatggatttcggatggacgagtgaggatttcgaccaatggtttgaaaagaaatttcctcctggccctggtaccgagagcaaatctctctcctcgatcattgcagatagaaaaaccgaagcttctaggacttag

SEQ ID NO: 14315 - protein, 250 aa, Muscodor strobelii
  misc_feature: SGI Peptide ID NO. 564714
  misc_feature: Useful for introducing or modulating the production of volatile compounds
MPLPFINPPLLVWIKWQEGSSQAPQSGAKPDLSPARGRVRLSTVCVGSSKNKGGGPDPTQTDADSSRVIEIVHPVPYSNDFVGSLSSEYYLAIFNGLKYEDTDKRNIESLRNNLEAVELRRFLFDGETSGHRFRFRVEYLEQGSDEVAAWTDSESFCWKESDQPGIHDPEVDNLDFSDEERHFMLLLDRNDQFNFKWDERVFGARPDMDFGWTSEDFDQWFEKKFPPGPGTESKSLSSIIADRKTEASRT

SEQ ID NO: 14316 - DNA, 1588 bp, Muscodor strobelii
  misc_feature: SGI EST ID NO. CUFF.34075.0
  misc_feature: Variant of the nucleotide sequence at SEQ ID NO 14314
cgcaaatgtcacaggattcctcatagattaggcatatatattcatatattccgcggaggaatctagtctgctaattatgccaacgacgaagtcaccgcatatgctctctgtttatcacgtggactcatcgaccaacatgcggcattctcgacgcatctcattaagtagtcatgcttttcttgtcggccatatcttgtgacggagccaacatactcgctttagacgattggcatgagaagatgctcgcttctatggacgtcatgtttgatccttcttttttcaggagttgtgtgagcatactccattaatccatgataactcaataacacctagatacagcgcgcagatacacctcagctatgtcttccccgtctcaatctcctcccatgtcgtcagagcatagcgaagtgaattcactgcatgattctattaattcagagacaagtcaaccaacacagtcccgtacaagagatggtaaaccctttctgaaagatctagcgagtgcaatactaaggggccaatcacctaaaacacagccatcatctaatcataggagacgagctgcgttctatgaaattgtgccagaaaataaatcgaagaacgatgaaccgctacaaacccagtctcgatctgtacaagctggtatagcgctagcgatattctcacccccgagagatcccatgccattaccattcatcaacccgccacttcttgtctggatcaagtggcaggagggatcctcacaggcgccgcagtccggagccaagccagatctcagtcccgctagaggtagggtacgtctcagtaccgtttgcgtagggagttcgaagaataaaggcggtggtccggatccaacccaaacggatgccgatagctccagggtcatcgaaatcgtgcatcccgttccctactcgaatgacttcgtcggctcattgtcttcagaatactaccttgccatcttcaatggcctgaagtacgaagatacggacaaaaggaatattgaaagcctgaggaacaatctagaggctgtggagctcagaagatttctatttgacggggaaacatccggacataggttcagattccgcgtcgaatatttggagcaaggtagtgatgaagtcgcagcatggaccgactcagaatcattctgctggaaagaatccgatcaacccggcatccatgatccagaagtggataatctagatttcagtgacgaggaaagacacttcatgcttctgctcgaccgtaacgaccagttcaactttaagtgggacgaacgtgtatttggcgcacgtcctgatatggatttcggatggacgagtgaggatttcgaccaatggtttgaaaagaaatttcctcctggccctggtaccgagagcaaatctctctcctcgatcattgcagatagaaaaaccgaagcttctaggacttagaacgtgattatttcgcaacgagtataccgccgccatcagatagagtgtgagctgtttttttgtcacctggagcatcgccacaagatttaaactgtatatcaccaaatgccactactgtatggctagccacctattgtatgtgagaggagggctga

SEQ ID NO: 14317 - DNA, 642 bp, Muscodor strobelii
  misc_feature: SGI cDNA ID NO. 564715
  misc_feature: Reduced expression when VOC is produced
  misc_feature: Encodes the peptide sequence at SEQ ID NO 14318
atggcttctccaaagcaacctctaccgaagctgcagttcaagctggggccgcgaagctgtatgcccatgccattcatctacccgaacctcgtcgtcgaggccgattatcaggagggaggtcaccccttcccacattcaggacgaggtaaactgcgtcttaaagtcgtccgacagagcgacggcaaggactgtgtggtcgaggacggcgtctaccccatcgtcaacgggcacgttctcacgcatgaagagacaaccaagtactatgccgtcttcaagggaccggtgtacgaggccggcaaagattggacccttccaaaggagaccaaagaggccaaacacgagagggctgagaagctcataaagttcctgcagagcggccccaaggatgtgaaatacagatttcgactcgagtattttgcatcgaacagcgatggcaagccggctactgcgatcgagtccaactcgttccgttggatgggctgcgatgggcttaccgaggctcacaagcaaatggcaaaagatggacaaggcggacagaagtggactgacgatgagaagcgattcatgtcgcaatgtgaagccaaaagcttcgcgttcgacttcttctggatgtctgaggtcttgggtagtcgtctcaaataa

SEQ ID NO: 14318 - protein, 213 aa, Muscodor strobelii
  misc_feature: SGI Peptide ID NO. 564715
  misc_feature: Useful for introducing or modulating the production of volatile compounds
MASPKQPLPKLQFKLGPRSCMPMPFIYPNLVVEADYQEGGHPFPHSGRGKLRLKVVRQSDGKDCVVEDGVYPIVNGHVLTHEETTKYYAVFKGPVYEAGKDWTLPKETKEAKHERAEKLIKFLQSGPKDVKYRFRLEYFASNSDGKPATAIESNSFRWMGCDGLTEAHKQMAKDGQGGQKWTDDEKRFMSQCEAKSFAFDFFWMSEVLGSRLK

SEQ ID NO: 14319 - DNA, 2037 bp, Muscodor strobelii
  misc_feature: SGI cDNA ID NO. 564716
  misc_feature: Encodes the peptide sequence at SEQ ID NO 14320
atgcaactcagcccgttacagtcgcgcctggctgcgtcggtgatagcttcctttctccttctccttctttacctcttcctcttccctccgccgttcgccttcgccgccgagctagactcgatacctatagaccatgcgcccgacagcgacatgaccgatggccagcgcgctcttggcgactatatggcacagttggcgcttctagaacaacagaataaaaagatactcttagaagccaggcaacaaatggaacgcatgcgtaatgaaccgcccgccgatcgccttagcccgggagatgggatagagaaccgcgactgggactccgcggactcgttgtacgacccggaattcgacctgtttgaccagagcattgtaggacgtgcaactgacggcaatggtgccgtttccattgatgccgatgttgcccctacccagaccaacatcaatgctggacagaccaatgcgtacatctttcaggcatcctcggtttccgggagatcgacccaagggtccggcctatctcaagaacttcgacggagtttgaatgacactggggatcacattcaggacgatgacgacgaggcccttgtccgccgacaatcatccaaaacattgtggatatcggccaatacttgcctgcaacccatccgcaattcgccctctcagacatccatggacccgccacagttgactttatttgtctccacctcatccaaaaatactgcgccgggccctgggcagcctgatgatgcccagaagaccatcgtattcgatgaaggagccgtgacttacaacatttctgcgagcgcaaatgtctacttcagcatttccgctccagaagtgtcggacaagttcttctcgaatgatctgtacaactataatgtgtccgtgtcgttggaccagtactactacaactacaatgacaatgcgcaaccgaatctgtactgggtcgacagcgatgcatctgccacgttattcacgacgaaaaatctcactagtagcccggaccagaaggttcacgaacccccgtatgtcatgttcattcaaaattcacagaacgtcggcatcaacgggttgcgtaactcatactgtggcctcaccaactcggcccagatcagacctctggagaacggcacgggccagctcgaactcggcctgaagcaaagtgcggcaacgaatttgacagtccaacaattctatataagttcgctgaatgccagcagcaactacaccggcatattagccactgctccttctggttcctcagatgtcgaaaagagacaaagtggtagctcaacaggaggtggagtcaccgtatttagacaagttgaattcgaaacgaaaccccagggagcctgcacattcatcttcaatctgacattgtgcaccgagacgcaatatgcggtgccagggaactccagcaacttccccaatgctacagctttagcagcgttctacgataaatacacgctcgatatgtattctaatttcgaaaaagtacttgcacaaaccgcctgtgaagctccgccaacgcagagatactcgctggtcaaggattgcgacgactgcaagacggcctacaagaactggctgtgctccgtcgctattcctcgctgcgaggatttctcatcgaacctgacgaatctacaggttcgaaacatcgaggctgccttcccgaacggatcgttcgttcctcaggatgtgaaggaacaatttggggtcacgcgtgctaccaactattcacggaatccagaaattgatgcgcaggtccaaccaggaccctataaagaaattctgccttgcgattacctatgctacgatctcgtcaagtcctgccctgcgtctatgggcttttcctgtcctcggccaggcaacaattatagtttcgctgggagctacgcggtgccaaacgatgataatagtctggcgtgcaactaccccggctctgcgtattaccccagcgcagcgaacgagagggtggtctcctgggtactttgggctgtgtccacgatgggcgtgctgatgtttgttttatga

SEQ ID NO: 14320 - protein, 678 aa, Muscodor strobelii
  misc_feature: SGI Peptide ID NO. 564716
  misc_feature (1)..(677): NCBI GI: 116199221 Blast Desc: CHGG_07766 [Chaetomium globosum CBS 148.51] gi|88179045|gb|EAQ86513.1| CHGG_07766 [Chaetomium globosum CBS 148.51]
  misc_feature (110)..(678): NCBI GI: 261355636 Blast Desc: calcium influx-promoting protein ehs1 [Verticillium albo-atrum VaMs.102]
  misc_feature (110)..(672): NCBI GI: 28949941 Blast Desc: related to MID1 protein [Neurospora crassa]
  misc_feature (110)..(668): NCBI GI: 164424723 Blast Desc: NCU06703 [Neurospora crassa OR74A] gi|157070634|gb|EAA31782.2| [Neurospora crassa OR74A]
  misc_feature (110)..(650): NCBI GI: 256730906 Blast Desc: NECHADRAFT_84604 [Nectria haematococca mpVI 77-13-4]
  misc_feature (107)..(677): NCBI GI: 46126081 Blast Desc: FG07418.1 [Gibberella zeae PH-1]
  misc_feature (2)..(651): NCBI GI: 156065133 Blast Desc: SS1G_00577 [Sclerotinia sclerotiorum 1980] gi|154691436|gb|EDN91174.1| SS1G_00577 [Sclerotinia sclerotiorum 1980]
  misc_feature (2)..(651): NCBI GI: 154311479 Blast Desc: BC1G_06592 [Botryotinia fuckeliana B05.10] gi|150850989|gb|EDN26182.1| BC1G_06592 [Botryotinia fuckeliana B05.10]
  misc_feature (1)..(675): NCBI GI: 242381405 Blast Desc: stretch-activated Ca channel [Claviceps purpurea]
  misc_feature (2)..(678): NCBI GI: 226281383 Blast Desc: conserved [Paracoccidioides brasiliensis Pb01]
MQLSPLQSRLAASVIASFLLLLLYLFLFPPPFAFAAELDSIPIDHAPDSDMTDGQRALGDYMAQLALLEQQNKKILLEARQQMERMRNEPPADRLSPGDGIENRDWDSADSLYDPEFDLFDQSIVGRATDGNGAVSIDADVAPTQTNINAGQTNAYIFQASSVSGRSTQGSGLSQELRRSLNDTGDHIQDDDDEALVRRQSSKTLWISANTCLQPIRNSPSQTSMDPPQLTLFVSTSSKNTAPGPGQPDDAQKTIVFDEGAVTYNISASANVYFSISAPEVSDKFFSNDLYNYNVSVSLDQYYYNYNDNAQPNLYWVDSDASATLFTTKNLTSSPDQKVHEPPYVMFIQNSQNVGINGLRNSYCGLTNSAQIRPLENGTGQLELGLKQSAATNLTVQQFYISSLNASSNYTGILATAPSGSSDVEKRQSGSSTGGGVTVFRQVEFETKPQGACTFIFNLTLCTETQYAVPGNSSNFPNATALAAFYDKYTLDMYSNFEKVLAQTACEAPPTQRYSLVKDCDDCKTAYKNWLCSVAIPRCEDFSSNLTNLQVRNIEAAFPNGSFVPQDVKEQFGVTRATNYSRNPEIDAQVQPGPYKEILPCDYLCYDLVKSCPASMGFSCPRPGNNYSFAGSYAVPNDDNSLACNYPGSAYYPSAANERVVSWVLWAVSTMGVLMFVL

SEQ ID NO: 14321 - DNA, 2993 bp, Muscodor strobelii
  misc_feature: SGI EST ID NO. CUFF.34137.1
  misc_feature: Variant of the nucleotide sequence at SEQ ID NO 14319
cggatagaagcaggttcactcaaggaatggaatagttggtcatagtgaacatggcttttacagcgagatagatacggccaagataaactagggagcatcgacaacctcacgagctcgaatttcccttcggagtgttagagtgaattgaggatggatgtgtgctgccattgggcgagggaggatgatggactgtggcaggggtcgtgtctcgaatgtcaaatggggccttaaagatgtggagcccgacctgcaggctagaacgacggcgccctaaattcaattaacctaacagagctgacatggcgtgcatggggggatgggtgaaacagccccacgacttatgcggacagccccttggacgaacaccacggccgtgattcgtcatgccgtgaaaccgacaagttgtttgcgacctgacgacttcccctccacgatccacgatcattcattacgacaagtacataagccactcgttctagccaacccgcctctgactgcgacactcgctgcgatacccattcactgcaatcgatacacaccagacgccgacctcagactgtcgatatagaccttagatacctcgcattggcgccgtctgctgacgccgcgacacagcatgtacacttgtcgaattacgaattgaacgaaataccgcttgtcatcgccgtagtctatcggaagcccctcggggctatgctctcgcgatgcaactcagcccgttacagtcgcgcctggctgcgtcggtgatagcttcctttctccttctccttctttacctcttcctcttccctccgccgttcgccttcgccgccgagctagactcgatacctatagaccatgcgcccgacagcgacatgaccgatggccagcgcgctcttggcgactatatggcacagttggcgcttctagaacaacagaataaaaagatactcttagaagccaggcaacaaatggaacgcatgcgtaatgaaccgcccgccgatcgccttagcccgggagatgggatagagaaccgcgactgggactccgcggactcgttgtacgacccggaattcgacctgtttgaccagagcattgtaggacgtgcaactgacggcaatggtgccgtttccattgatgccgatgttgcccctacccagaccaacatcaatgctggacagaccaatgcgtacatctttcaggcatcctcggtttccgggagatcgacccaagggtccggcctatctcaagaacttcgacggagtttgaatgacactggggatcacattcaggacgatgacgacgaggcccttgtccgccgacaatcatccaaaacattgtggatatcggccaatacttgcctgcaacccatccgcaattcgccctctcagacatccatggacccgccacagttgactttatttgtctccacctcatccaaaaatactgcgccgggccctgggcagcctgatgatgcccagaagaccatcgtattcgatgaaggagccgtgacttacaacatttctgcgagcgcaaatgtctacttcagcatttccgctccagaagtgtcggacaagttcttctcgaatgatctgtacaactataatgtgtccgtgtcgttggaccagtactactacaactacaatgacaatgcgcaaccgaatctgtactgggtcgacagcgatgcatctgccacgttattcacgacgaaaaatctcactagtagcccggaccagaaggttcacgaacccccgtatgtcatgttcattcaaaattcacagaacgtcggcatcaacgggttgcgtaactcatactgtggcctcaccaactcggcccagatcagacctctggagaacggcacgggccagctcgaactcggcctgaagcaaagtgcggcaacgaatttgacagtccaacaattctatataagttcgctgaatgccagcagcaactacaccggcatattagccactgctccttctggttcctcagatgtcgaaaagagacaaagtggtagctcaacaggaggtggagtcaccgtatttagacaagttgaattcgaaacgaaaccccagggagcctgcacattcatcttcaatctgacattgtgcaccgagacgcaatatgcggtgccagggaactccagcaacttccccaatgctacagctttagcagcgttctacgataaatacacgctcgatatgtattctaatttcgaaaaagtacttgcacaaaccgcctgtgaagctccgccaacgcagagatactcgctggtcaaggattgcgacgactgcaagacggcctacaagaactggctgtgctccgtcgctattcctcgctgcgaggatttctcatcgaacctgacgaatctacaggttcgaaacatcgaggctgccttcccgaacggatcgttcgttcctcaggatgtgaaggaacaatttggggtcacgcgtgctaccaactattcacggaatccagaaattgatgcgcaggtccaaccaggaccctataaagaaattctgccttgcgattacctatgctacgatctcgtcaagtcctgccctgcgtctatgggcttttcctgtcctcggccaggcaacaattatagtttcgctgggagctacgcggtgccaaacgatgataatagtctggcgtgcaactaccccggctctgcgtattaccccagcgcagcgaacgagagggtggtctcctgggtactttgggctgtgtccacgatgggcgtgctgatgtttgttttatgatcatgaggatttggagggtgaattgggtatgaggggtttcggttcgagcgtgtacagtatggtgaaaaaggatactactgtaatgtcacatagatgatgacgcgagcatgggaaggcatgggcctggcgttttgggtttgcgttggaagggagttttatatcatgatggataggcgaatgatacaaatggatcgggctcgaagcctcttttttacgactcgaatagactctaagttccggatagacgtgcat

SEQ ID NO: 14322 - DNA, 336 bp, Muscodor strobelii
  misc_feature: SGI cDNA ID NO. 564717
  misc_feature: Encodes the peptide sequence at SEQ ID NO 14323
atgttcacaagaccagcacgccgtctcacaacgccattgcgcgccctggtgcggcagcagcagcagcctgcgcaagctcaaccgaaagcatggacgcggttcgcgtctaacgataccaagttcgagggatctatcaattccgcgacattctacaagacattcggccgacccgtcgccaaggtgttcctcatggccatcttcacataccaactagcgtactacttctgggtccgcctcgagcaggacgagactcgtgccaagatgcaggctacgatatctgaccttgaagcgaggataggggagcttgagaaggctaaggtgcagaagaagaagtga

SEQ ID NO: 14323 - protein, 111 aa, Muscodor strobelii
  misc_feature: SGI Peptide ID NO. 564717
  misc_feature (34)..(105): NCBI GI: 256731281 Blast Desc: NECHADRAFT_84605 [Nectria haematococca mpVI 77-13-4]
  misc_feature (50)..(101): NCBI GI: 46126079 Blast Desc: FG07417.1 [Gibberella zeae PH-1]
  misc_feature (47)..(103): NCBI GI: 164424721 Blast Desc: NCU11118 [Neurospora crassa OR74A] gi|28949942|emb|CAD70928.1| [Neurospora crassa] gi|157070633|gb|EDO65082.1| [Neurospora crassa OR74A]
  misc_feature (47)..(103): NCBI GI: 116199223 Blast Desc: [Chaetomium globosum CBS 148.51] gi|88179046|gb|EAQ86514.1| [Chaetomium globosum CBS 148.51]
  misc_feature (51)..(106): NCBI GI: 121719669 Blast Desc: ACLA_057630 [Aspergillus clavatus NRRL 1] gi|119404745|gb|EAW15107.1| ACLA_057630 [Aspergillus clavatus NRRL 1]
  misc_feature (6)..(106): NCBI GI: 145253332 Blast Desc: An16g08810 [Aspergillus niger] gi|134083743|emb|CAK42980.1| protein product [Aspergillus niger]
  misc_feature (14)..(102): NCBI GI: 238845362 Blast Desc: [Microsporum canis CBS 113480]
  misc_feature (33)..(86): NCBI GI: 154313440 Blast Desc: [Botryotinia fuckeliana B05.10] gi|150849486|gb|EDN24679.1| [Botryotinia fuckeliana B05.10]
  misc_feature (51)..(102): NCBI GI: 70983416 Blast Desc: conserved [Aspergillus fumigatus Af293] gi|66844861|gb|EAL85197.1| conserved [Aspergillus fumigatus Af293] gi|159123759|gb|EDP48878.1| conserved [Aspergillus A1163]
  misc_feature (33)..(111): NCBI GI: 261201750 Blast Desc: conserved [Ajellomyces dermatitidis SLH14081] gi|239590186|gb|EEQ72767.1| conserved [Ajellomyces dermatitidis SLH14081] gi|239611899|gb|EEQ88886.1| [Ajellomyces dermatitidis
MFTRPARRLTTPLRALVRQQQQPAQAQPKAWTRFASNDTKFEGSINSATFYKTFGRPVAKVFLMAIFTYQLAYYFWVRLEQDETRAKMQATISDLEARIGELEKAKVQKKK

SEQ ID NO: 14324 - DNA, 1202 bp, Muscodor strobelii
  misc_feature: SGI EST ID NO. CUFF.34095.0
  misc_feature: Variant of the nucleotide sequence at SEQ ID NO 14322
aatgacttcacatcgagcctgttgaatcggggttaagccacacacagcaccatcaacacctcggacgcaagccactctcgacatcggctttattcgaagctctagctcgggtttttagactctaccgaacttattcaacctgcatatgatagcttgacgaccttctacacccgagttcattgtacaacaatactccacgagacaaaatgttcacaagaccagcacgccgtctcacaacgccattgcgcgccctggtgcggcagcagcagcagcctgcgcaagctcaaccgaaagcatggacgcggttcgcgtctaacgataccaagttcgagggatctatcaattccgcgacattctacaagacattcggccgacccgtcgccaaggtgttcctcatggccatcttcacataccaactagcgtactacttctgggtccgcctcgagcaggacgagactcgtgccaagatgcaggctacgatatctgaccttgaagcgaggataggggagcttgagaaggctaaggtgcagaagaagaagtgattgaagcgcaacacgtgaatgaagagagggaattggataagccaaagaacgagattacacatttcgctcgcgatcgaccagcacgagcctgctatagttccggacactttgcttgggtcactacactccgctctgcgccgtgccatttgagttgccaaggacaagccaattacgagaactgaggctaagggctcatgacacgagatgctatcatggcgcacgagcatctagactcgggtgatcgggaacggccgtcggtgcaaatgagcagcatgtcaaaggcacaagacaggagcagaattgttagtaaatgtggctgagggctatctcctagcctcctatatctatcaattccgaaatgagacgattgggtattggtgaagacggtagttctactttatcatcagaggagagacgttatagctccggcataaagagacaagatccaataaatactctaatcctggtactttgtgtagaaagctgagcgagctgaaggactagaggggatatcatattcacagaattagagataacgtgttttggtcggtggcagagctgtcatttatgcatcatgtagtcaatattctggtacgagctgcatgatacacctgaagtgccaaacaaacaggcattggcttgaacatgccctctttgcac

SEQ ID NO: 14325 - DNA, 204 bp, Muscodor strobelii
  misc_feature: SGI cDNA ID NO. 564718
  misc_feature: Reduced expression when VOC is produced
  misc_feature: Encodes the peptide sequence at SEQ ID NO 14326
atggcccagaccctcgagcagcgcaggcgaaacgccaagtttgtcaaggaccaggaccaacggcgtggcaagtcggacgccgagatcaagaagaagactaaggaggttttcaagtcaccaatctctcctatctggctcggtgtattagcgttcgtcgtattcggtggtcttgtcttcgaggtcttctcccggttcttcttgtaa

SEQ ID NO: 14326 - protein, 67 aa, Muscodor strobelii
  misc_feature: SGI Peptide ID NO. 564718
  misc_feature (1)..(67): NCBI GI: 85100027 Blast Desc: NCU06704 [Neurospora crassa OR74A] gi|28922415|gb|EAA31648.1| [Neurospora crassa OR74A] gi|28949943|emb|CAD70929.1| related to secretory pathway protein
  misc_feature (1)..(66): NCBI GI: 256730907 Blast Desc: NECHADRAFT_102809 [Nectria haematococca mpVI 77-13-4]
  misc_feature (1)..(66): NCBI GI: 171692823 Blast Desc: protein product [Podospora anserina] gi|170946360|emb|CAP73161.1| protein product [Podospora anserina]
  misc_feature (1)..(66): NCBI GI: 46126077 Blast Desc: FG07416.1 [Gibberella zeae PH-1]
  misc_feature (1)..(62): NCBI GI: 255945255 Blast Desc: Pc20g08990 [Penicillium chrysogenum Wisconsin 54-1255] gi|211588130|emb|CAP86228.1| Pc20g08990 [Penicillium chrysogenum Wisconsin 54-1255]
  misc_feature (1)..(61): NCBI GI: 261201254 Blast Desc: BDBG_01698 [Ajellomyces dermatitidis SLH14081] gi|239592086|gb|EEQ74667.1| BDBG_01698 [Ajellomyces dermatitidis SLH14081] gi|239611750|gb|EEQ88737.1| BDCG_03857 [Ajellomyces
  misc_feature (1)..(65): NCBI GI: 154313408 Blast Desc: BC1G_05401 [Botryotinia fuckeliana B05.10] gi|150849470|gb|EDN24663.1| BC1G_05401 [Botryotinia fuckeliana B05.10]
  misc_feature (1)..(65): NCBI GI: 156042918 Blast Desc: [Sclerotinia sclerotiorum 1980] gi|154695643|gb|EDN95381.1| [Sclerotinia sclerotiorum 1980]
  misc_feature (6)..(67): NCBI GI: 169845341 Blast Desc: [Coprinopsis cinerea okayama7#130] gi|116509455|gb|EAU92350.1| [Coprinopsis cinerea okayama7#130]
  misc_feature (1)..(56): NCBI GI: 189193995 Blast Desc: PTRG_03003 [Pyrenophora tritici-repentis Pt-1C-BFP] gi|187978900|gb|EDU45526.1| PTRG_03003 [Pyrenophora tritici-repentis Pt-1C-BFP]
  misc_feature: Useful for introducing or modulating the production of volatile compounds
MAQTLEQRRRNAKFVKDQDQRRGKSDAEIKKKTKEVFKSPISPIWLGVLAFVVFGGLVFEVFSRFFL

SEQ ID NO: 14327 - DNA, 1161 bp, Muscodor strobelii
  misc_feature: SGI EST ID NO. CUFF.34176.0
  misc_feature: Variant of the nucleotide sequence at SEQ ID NO 14325
agacaacggcgcattctccccgactacagctacacctgcggctttgagcacgggaagctctgaaagacacattgccagatcccaattcccatgctcgtggccacaaccccatcgcccattgctcctccacggccctattcatctgttcttgctgtgtttgactcattaccgaagccttcgatctgttctcagaatccactggaaccattcatttccaagtcgttgtgtataaatcagcacagtcaaacttgaatctcgctataatctgacctcgactacgtttccacatctccaacctttcgatactctctcctccatcgaattgtcgatctctacctttcttgcaagcaattacacaccaccatcaagcccgaatacctaccacgagtccagttcgaataccatcttcgacatccaaatcttgaaccgaatctttccgaccttccattcctcaccaccacatcatccacaatggcccagaccctcgagcagcgcaggcgaaacgccaagtttgtcaaggaccaggaccaacggcgtggcaagtcggacgccgagatcaagaagaagactaaggaggttttcaagtcaccaatctctcctatctggctcggtgtattagcgttcgtcgtattcggtggtcttgtcttcgaggtcttctcccggttcttcttgtaagcgatcactatggatatattggagatatacgaacaaagtggaatggcaaagagaacaagaggaaaaagcacagagagtgcattacaaggaccgaatgatacgagccggggtagcagcgcagtgacactacgctgaaaaacagacattctcgattaactacgagttgtacatcgataccatgttaaggggcatttacgagttgcgtctttacgcgcggaatgggggaggaagagcaatatgcaaaaattaccgagtttgcagctctgttcgtgataggatcaatgcgactttagctgaatcacgagccctggttctgtcaagcaattcccagtgtttgcaaaccaatatttaaagtcagctcagtgactcgggttggtgtcttgctatatataactcgaaaaattatgttgcaaacactttgagttttcccctctccttctctatttccctgtaaacctacaccaacaaaaaagacttcaatatgtg

SEQ ID NO: 14328 - DNA, 1224 bp, Muscodor strobelii
  misc_feature: SGI cDNA ID NO. 564719
  misc_feature: Encodes the peptide sequence at SEQ ID NO 14329
atggacggcgagggtccctggcagaagctcgaccctgtcaagcttcgcaaagaagctgaggctaaggaggcaaagctcaacagacagcaaacacagcgaatcctgcgagccgaagctcgtaaggagaagcgtcatctcaagtctgaagccaagcaagctcgcaagctcaatgtcaagagagctgccaaatggacacctgaacgtaaagctcttgacaaagagaagaagctggccaacaaggaccgaaagagagacaggcgcaactcgcgcttgattttacgagctgacaagctcgaggctcaagccaaaaagctgtgggtagaagcgcagaaggccagagcccgtcatgagtttctcagcgaggccattgagaaggagaatgaggaaggggcaaaggagaaagctagcagccagatcgagactgataactatattcctttggatgctcctgacgctcctgataccgctgccgctattaccgccgcgatcaaggaagggtcttcaagctcaggaatccccgcaaccacagatggtagcgtatcaaaagaggagaagcgcaagagaaaggaagagaagaagctgaaacgagccgccgaggctgaaaccaaggctcaatccgcaacagatgtcatggaaattgatgcacccgaggagatcgttgcccaaattcccgaaaagaagaagaagaagcgaaagattgaagctgacaatgaggaggaagctgagcgttcttcggagaagaagaaaaagaagcataagaaggaacacaaagatgaggaagttgatgcctctgaaactgccgaagttacggagccaccgaaagacaagaaaaagaagaagaaacactccgctgaagagaacggcgtagcccgagtagatgaagacgccgaggcccaggagaagaaggacaagaagaagaggaagaaggagaggaaagagaaggagtcagtcgagcctgtcactgtagatgaaggggaagctaaagctgacgaaggtgaacagtggaatgtctctgccttagagggcagcgacaaaagaaaggagaagtttctacgtctattaggaggcggtaaggccaatggcacttcggccactagccacgctggcgcaaaatcttcgagggatgacattgccaaaatgcagtcagacctggagcatcaattcgacgccgggatgagagccaaggaagaaggtcgtagtcgcagaatgggtctgggggcctaa

SEQ ID NO: 14329 - protein, 407 aa, Muscodor strobelii
  misc_feature: SGI Peptide ID NO. 564719
  misc_feature (22)..(407): NCBI GI: 39943984 Blast Desc: MGG_04003 [Magnaporthe grisea 70-15] gi|145014725|gb|EDJ99293.1| MGG_04003 [Magnaporthe grisea 70-15]
  misc_feature (326)..(407): NCBI GI: 46126075 Blast Desc: FG07415.1 [Gibberella zeae PH-1]
  misc_feature (334)..(407): NCBI GI: 154313410 Blast Desc: [Botryotinia fuckeliana B05.10] gi|150849471|gb|EDN24664.1| [Botryotinia fuckeliana B05.10]
  misc_feature (334)..(405): NCBI GI: 156042916 Blast Desc: [Sclerotinia sclerotiorum 1980] gi|154695642|gb|EDN95380.1| [Sclerotinia sclerotiorum 1980]
  misc_feature (329)..(395): NCBI GI: 116199227 Blast Desc: [Chaetomium globosum CBS 148.51] gi|88179048|gb|EAQ86516.1| [Chaetomium globosum CBS 148.51]
  misc_feature (334)..(407): NCBI GI: 28949944 Blast Desc: related to wound-responsive protein KED [Neurospora crassa]
  misc_feature (334)..(407): NCBI GI: 85100031 Blast Desc: NCU06705 [Neurospora crassa OR74A] gi|28922416|gb|EAA31649.1| [Neurospora crassa OR74A]
MDGEGPWQKLDPVKLRKEAEAKEAKLNRQQTQRILRAEARKEKRHLKSEAKQARKLNVKRAAKWTPERKALDKEKKLANKDRKRDRRNSRLILRADKLEAQAKKLWVEAQKARARHEFLSEAIEKENEEGAKEKASSQIETDNYIPLDAPDAPDTAAAITAAIKEGSSSSGIPATTDGSVSKEEKRKRKEEKKLKRAAEAETKAQSATDVMEIDAPEEIVAQIPEKKKKKRKIEADNEEEAERSSEKKKKKHKKEHKDEEVDASETAEVTEPPKDKKKKKKHSAEENGVARVDEDAEAQEKKDKKKRKKERKEKESVEPVTVDEGEAKADEGEQWNVSALEGSDKRKEKFLRLLGGGKANGTSATSHAGAKSSRDDIAKMQSDLEHQFDAGMRAKEEGRSRRMGLGA

SEQ ID NO: 14330 - DNA, 1773 bp, Muscodor strobelii
  misc_feature: SGI EST ID NO. CUFF.34205.0
  misc_feature: Variant of the nucleotide sequence at SEQ ID NO 14328
gtctacttggtgaagtgtatgtgtagattcaccaaactcacacccgtcactcacatttatcagttccgtttgttgagagattcattcacttcacagttgaacctttgaagcatacatcttacttttaccgatttgtcttcaaactatcgcagccatggacggcgagggtccctggcagaagctcgaccctgtcaagcttcgcaaagaagctgaggctaaggaggcaaagctcaacagacagcaaacacagcgaatcctgcgagccgaagctcgtaaggagaagcgtcatctcaagtctgaagccaagcaagctcgcaagctcaatgtcaagagagctgccaaatggacacctgaacgtaaagctcttgacaaagagaagaagctggccaacaaggaccgaaagagagacaggcgcaactcgcgcttgattttacgagctgacaagctcgaggctcaagccaaaaagctgtgggtagaagcgcagaaggccagagcccgtcatgagtttctcagcgaggccattgagaaggagaatgaggaaggggcaaaggagaaagctagcagccagatcgagactgataactatattcctttggatgctcctgacgctcctgataccgctgccgctattaccgccgcgatcaaggaagggtcttcaagctcaggaatccccgcaaccacagatggtagcgtatcaaaagaggagaagcgcaagagaaaggaagagaagaagctgaaacgagccgccgaggctgaaaccaaggctcaatccgcaacagatgtcatggaaattgatgcacccgaggagatcgttgcccaaattcccgaaaagaagaagaagaagcgaaagattgaagctgacaatgaggaggaagctgagcgttcttcggagaagaagaaaaagaagcataagaaggaacacaaagatgaggaagttgatgcctctgaaactgccgaagttacggagccaccgaaagacaagaaaaagaagaagaaacactccgctgaagagaacggcgtagcccgagtagatgaagacgccgaggcccaggagaagaaggacaagaagaagaggaagaaggagaggaaagagaaggatggaatgtctctgccttagagggcagcgacaaaagaaaggagaagtttctacgtctattaggaggcggtaaggccaatggcacttcggccactagccacgctggcgcaaaatcttcgagggatgacattgccaaaatgcagtcagacctggagcatcaattcgacgccgggatgagagccaaggaagaaggtcgtagtcgcagaatgggtctgggggcctaacgtcgatcgactatctgactgcaagttcatgcatcggcgtttttgggagggaaaatgttctaataccatgtgtttcgttgagccccccattccggtctgactgtttgtaacgatcaaaagggtacacgaaggagtggcgtattgtggcaacgtgttagtcgcagaagattacatcgcctttctattttcacgttgcacaactgccacaatacaattcggcttaagttgatagacttaggtacttaaactacaatgttacacgaatcaagatacaatcgtgattgcttttcacgaactaaatgacaattatgaccgagtcactcaagaagcttactcccacataacctgaaatccgcctacccctttacatctttcccacctttgaatcatcggattatcgtatctattcggtcttcgaatcggcatccgtctgcacgtctgcttgggcgcccc

SEQ ID NO: 14331 - DNA, 2202 bp, Muscodor strobelii
  misc_feature: SGI cDNA ID NO. 564720
  misc_feature: Encodes the peptide sequence at SEQ ID NO 14332
atgtcgaccttcagacgggcggcgcagcccggcgccctgcccaagtcgagcattcttagcacactgcaagccacttcgatgttggactcaaagacttcactgcctgctgaaataatcgtagctattctcgactatctacccgttcccgacttgatgcgatttgccaggacttcttctcgtatgcgggaaatggtctacgatgatactcggtggattgcaaggttgaaaagcatgggtgtgtggagcgatgccgaggcaaagaagcgttttgaagaggctgtaaggcgacggcgagataatgctgcacgtgcagcagccaatggcggtccagctgctcccgccggtgtgcaggcaaccatgactattttcgacgctgctttggaggaagaaaggcgggctagggagagttctgcaaaggccgacgtgcggatagatggctttgaaaccctgagcttgaactcatcccagaccaaatcgccctttcaagatccatctgcactcctcgacatactcaagaatgtccgtagtgcaaggggccaagggagacaagaattcggcaaggtatacggggcgcttgcaccattttaccttgacctcagtcgtgccaaaacacatacagagcccatcgttttcaaagtgttccgagacccagagagccaggctcgcatgctgtccaatctgcagactttcagcaagtccgattggaccgatgggtacgaacagaggcaggaaaaggtcacgaatatgataacggtattcgaaggcgctgtcttgcgcgagttcgaacagggctacgaattttgggacgtggatggtaaaatgcgcaggtacgcgcacgttctacactcgctcaacggaggcaacgccgcaatggagcttttcatacaaaaacacccgatcttcaatgatcgagaatcactcggggatcacatggactgcaccaatcacgcagctcgcgacgacatcaccctagatccctccagagcattcttcgaactactcatgcgtaagctcaacgaacaaagtgacattataagccgcatcttcccccaagctgcgacagtcttctggcagtttgtcgagaagatttgcgaggatgttatcgtagaatatgtcacaccgctgctagatgatacccatgacagacacatggcttcttacttgaaagctatgtctggtctattcgagcagtgtatgctcttcgtacaatctctaaaggcaccaaaggggtctgaaacgtcgcaacaagaccatgccatagcaatatgtctcaaagtctttgggccacacatggatccgtacctcgatgatgaactggacttctttacccagtacgcagagcgcgaggtcagaaactgggaacaaaagctctcagagcaagatgcaagtgtcgagtcgttttatatggcaaatttcaaccggcaagcagataagaacgacttcttaagctccttcaagaaggtagtcatgctgcctgtgacagtcattcccaacgccttcagcggtgccaataaaccgacgtcggtggtggctgcacccaccccaacgctgactcctggaccctccaggccccagacgcctggcttgggaaataagttagataggtcagggagcccgcttcccgctgaagcaccaaatgatgagctgaaagcgaaggctgcattgatggcaaatcgactagaggggattaagagtctcttcagcattgaggttgctttagatctagtccacgctgcgaaaacgagcttgggccgggctgcgaagttcgttcgcctaggcggccaactaggcgaggaggcccgagagcagtgcgagttgatctttattgcgttgctgaaggttctcggccagacgcacgtgaagaacggtttcgcaaaggcgctcgaccatctctcgcgatataaccctcgcgacgtgagtgaccacagccagaccgcagttgccccactcgtcacgttcattgaactcgtgaatgtgggcgatatcatttctcagatgatcgacgtcttctatgaacaacagcttgcagcacccaaaattgcggacaagaacgatttcctagacccagcgggcaatgccaaaaaaaagttcgagcagatgctggatgagaatgttgcagctggtcttaacaaaggcatcgacgtacttatggacgaagttgaatatctgtgtgccacgacccaattgccccgcggattataa

SEQ ID NO: 14332 - protein, 733 aa, Muscodor strobelii
  misc_feature: SGI Peptide ID NO. 564720
  misc_feature (29)..(76): Pfam Id: PF00646 Pfam Desc: F-box domain
  misc_feature (8)..(730): NCBI GI: 46126089 Blast Desc: FG07422.1 [Gibberella zeae PH-1]
  misc_feature (8)..(730): NCBI GI: 256731278 Blast Desc: [Nectria haematococca mpVI 77-13-4]
  misc_feature (16)..(730): NCBI GI: 171692887 Blast Desc: protein product [Podospora anserina] gi|170946392|emb|CAP73193.1| protein product [Podospora anserina]
  misc_feature (5)..(730): NCBI GI: 116198111 Blast Desc: CHGG_07211 [Chaetomium globosum CBS 148.51] gi|88178490|gb|EAQ85958.1| CHGG_07211 [Chaetomium globosum CBS 148.51]
  misc_feature (1)..(730): NCBI GI: 85099227 Blast Desc: NCU03658 [Neurospora crassa OR74A] gi|16944462|emb|CAC18157.2| related to Sls2 protein [Neurospora crassa] gi|28922258|gb|EAA31502.1| NCU03658 [Neurospora crassa
  misc_feature (1)..(730): NCBI GI: 39972369 Blast Desc: MGG_07486 [Magnaporthe grisea 70-15] gi|145016676|gb|EDK01106.1| MGG_07486 [Magnaporthe grisea 70-15]
  misc_feature (1)..(730): NCBI GI: 154321189 Blast Desc: BC1G_01469 [Botryotinia fuckeliana B05.10] gi|150852007|gb|EDN27199.1| BC1G_01469 [Botryotinia fuckeliana B05.10]
  misc_feature (30)..(730): NCBI GI: 156054404 Blast Desc: SS1G_06050 [Sclerotinia sclerotiorum 1980] gi|154703830|gb|EDO03569.1| SS1G_06050 [Sclerotinia sclerotiorum 1980]
  misc_feature (2)..(730): NCBI GI: 189193637 Blast Desc: secretion pathway protein Sls2/Rcy1 [Pyrenophora tritici-repentis Pt-1C-BFP] gi|187978721|gb|EDU45347.1| secretion pathway protein Sls2/Rcy1 [Pyrenophora tritici-repentis
  misc_feature (2)..(730): NCBI GI: 169601190 Blast Desc: SNOG_03454 [Phaeosphaeria nodorum SN15] gi|160705882|gb|EAT88659.2| SNOG_03454 [Phaeosphaeria nodorum SN15]
MSTFRRAAQPGALPKSSILSTLQATSMLDSKTSLPAEIIVAILDYLPVPDLMRFARTSSRMREMVYDDTRWIARLKSMGVWSDAEAKKRFEEAVRRRRDNAARAAANGGPAAPAGVQATMTIFDAALEEERRARESSAKADVRIDGFETLSLNSSQTKSPFQDPSALLDILKNVRSARGQGRQEFGKVYGALAPFYLDLSRAKTHTEPIVFKVFRDPESQARMLSNLQTFSKSDWTDGYEQRQEKVTNMITVFEGAVLREFEQGYEFWDVDGKMRRYAHVLHSLNGGNAAMELFIQKHPIFNDRESLGDHMDCTNHAARDDITLDPSRAFFELLMRKLNEQSDIISRIFPQAATVFWQFVEKICEDVIVEYVTPLLDDTHDRHMASYLKAMSGLFEQCMLFVQSLKAPKGSETSQQDHAIAICLKVFGPHMDPYLDDELDFFTQYAEREVRNWEQKLSEQDASVESFYMANFNRQADKNDFLSSFKKVVMLPVTVIPNAFSGANKPTSVVAAPTPTLTPGPSRPQTPGLGNKLDRSGSPLPAEAPNDELKAKAALMANRLEGIKSLFSIEVALDLVHAAKTSLGRAAKFVRLGGQLGEEAREQCELIFIALLKVLGQTHVKNGFAKALDHLSRYNPRDVSDHSQTAVAPLVTFIELVNVGDIISQMIDVFYEQQLAAPKIADKNDFLDPAGNAKKKFEQMLDENVAAGLNKGIDVLMDEVEYLCATTQLPRGL

SEQ ID NO: 14333 - DNA, 4532 bp, Muscodor strobelii
  misc_feature: SGI EST ID NO. CUFF.34106.0
  misc_feature: Variant of the nucleotide sequence at SEQ ID NO 14331
ccttaatgcaccgtcatgcgacttccatgtacaccgaagcttgtttccctggatgatcgcgacctccaattgtaccataccacaacgattactcaattgacttagcaattgaggcttattggacttcgtcatgtttgtgaggatatccaaagaatagtgatatctcgttagggaagtcgatcggggaacttggagtgaggcccgggctcgactcgtggacttgcttcaacatgtcgaccttcagacgggcggcgcagcccggcgccctgcccaagtcgagcattcttagcacactgcaagccacttcgatgttggactcaaagacttcactgcctgctgaaataatcgtagctattctcgactatctacccgttcccgacttgatgcgatttgccaggacttcttctcgtatgcgggaaatggtctacgatgatactcggtggattgcaaggttgaaaagcatgggtgtgtggagcgatgccgaggcaaagaagcgttttgaagaggctgtaaggcgacggcgagataatgctgcacgtgcagcagccaatggcggtccagctgctcccgccggtgtgcaggcaaccatgactattttcgacgctgctttggaggaagaaaggcgggctagggagagttctgcaaaggccgacgtgcggatagatggctttgaaaccctgagcttgaactcatcccagaccaaatcgccctttcaagatccatctgcactcctcgacatactcaagaatgtccgtagtgcaaggggccaagggagacaagaattcggcaaggtatacggggcgcttgcaccattttaccttgacctcagtcgtgccaaaacacatacagagcccatcgttttcaaagtgttccgagacccagagagccaggctcgcatgctgtccaatctgcagactttcagcaagtccgattggaccgatgggtacgaacagaggcaggaaaaggtcacgaatatgataacggtattcgaaggcgctgtcttgcgcgagttcgaacagggctacgaattttgggacgtggatggtaaaatgcgcaggtacgcgcacgttctacactcgctcaacggaggcaacgccgcaatggagcttttcatacaaaaacacccgatcttcaatgatcgagaatcactcggggatcacatggactgcaccaatcacgcagctcgcgacgacatcaccctagatccctccagagcattcttcgaactactcatgcgtaagctcaacgaacaaagtgacattataagccgcatcttcccccaagctgcgacagtcttctggcagtttgtcgagaagatttgcgaggatgttatcgtagaatatgtcacaccgctgctagatgatacccatgacagacacatggcttcttacttgaaagctatgtctggtctattcgagcagtgtatgctcttcgtacaatctctaaaggcaccaaaggggtctgaaacgtcgcaacaagaccatgccatagcaatatgtctcaaagtctttgggccacacatggatccgtacctcgatgatgaactggacttctttacccagtacgcagagcgcgaggtcagaaactgggaacaaaagctctcagagcaagatgcaagtgtcgagtcgttttatatggcaaatttcaaccggcaagcagataagaacgacttcttaagctccttcaagaaggtagtcatgctgcctgtgacagtcattcccaacgccttcagcggtgccaataaaccgacgtcggtggtggctgcacccaccccaacgctgactcctggaccctccaggccccagacgcctggcttgggaaataagttagataggtcagggagcccgcttcccgctgaagcaccaaatgatgagctgaaagcgaaggctgcattgatggcaaatcgactagaggggattaagagtctcttcagcattgaggttgctttagatctagtccacgctgcgaaaacgagcttgggccgggctgcgaagttcgttcgcctaggcggccaactaggcgaggaggcccgagagcagtgcgagttgatctttattgcgttgctgaaggttctcggccagacgcacgtgaagaacggtttcgcaaaggcgctcgaccatctctcgcgatataaccctcgcgacgtgagtgaccacagccagaccgcagttgccccactcgtcacgttcattgaactcgtgaatgtgggcgatatcatttctcagatgatcgacgtcttctatgaacaacagcttgcagcacccaaaattgcggacaagaacgatttcctagacccagcgggcaatgccaaaaaaaagttcgagcagatgctggatgagaatgttgcagctggtcttaacaaaggcatcgacgtacttatggacgaagttgaatatctgtgtgccacgacccaattgccccgcggattataacccctctccatctgatcaagaaggtggtctgtcaaaaggacttgatattggtcccacaaccacggccaaacgagttacagagcttgtctcatcgcataccaagatgttgatagggagtaccgaaaaaaccatgttggatgtattcaatggcgaggtcggactccgtttatttaccgcgatatgtaaacatttgaaacgacagcgcatcagtaccgacggcgccatcaaacttatcgcagacatgactctgtatttcgaatacattcggacgttgagaaatccggacttgttggcgtacttcaaagcccttcgagagcttagtcaaatctatttaatcgacgctcgccacgcgaaagagatggcaacggtcatcgctgacggtgatcggtttggtggcatatttcgagccgaagaggtttacgagtatgcagaaagaagagccgactggtataccgtaaaacgtgatgtcgagagggcgatgtatgggttggagtgtaatatcatgtgatatatgaagtcccaatcccaaattcacgaatctgactggtttggaggatagtctttgccctacacaacatgcaatcgaggctcgtggagacaatacgcgaaacttaggatggtgcagtgataaggaaacccgccaagtctaaatacaatccggcccccaagtgatgaacaaatttaaaacatcaaatttgccactataggtgtatacaatatcgcttcatattcatcccgacaaaatcatctcaagtagatcaaatcagcccacgccaaaaacgccacgtcttccgcgcggctatcgagcaagcgaccggcaactcgccaaggctatgatcatcatctaccgagtctcatgttcgatggccagttcatcccgtgctctttcatgtctctaggcgtgcctgatcatacctgatgatacaacactaactcacgttatgcgacccaagaccacttctcaatttccaagtacagtcacctgcctggatatccgaaatccggttgccttcaaggcatcgaccaattgttcactcattaatccagacagatctcccgtgcctggggatatttcagtgtgggaggttgacaagcgggctgcaaagatgcttcaaaccacactgtctaagactcatctccggctgcctccctccgagcgtctgtcgctgtccgaaacggggtgcgcagtgtgcacgatggatgggatttggatttttagcaaaaaattactccaacgatgcgggttctgcatcatctgttggcttttccctaatcgtgtttatttcatgagatcactgagacgggagaatggagaagaatgcctcgccacttgcaagtgcgcctgagctaagggtcgttggcgtcaacgcatgtgcaccgcgcctataggctttagttggtgatgcaggggtccgagaatgaattggatccgagcgccccatcaattccaaccacaataaggctatcgcctcgccgttcatattatgacgtgaatcgtggatacgagtcaggctgcaaacacatcgaaatatcaggacggagggtcggcagttcagccgcacacctggtctattcacctatctcttctcagcggggtgttgggcagatccgaccagtctggtactgtcaaacttggtatccgcaggaggcaatgttgcaagagacattcggaattgaccgtcgttctctgaaattgatgacaagacgcgttcgtctgctgaaggattcgtggaggtctgtgtaccgaagcttctcatactctttcggtggtactagtaccgatccggtccacttgcaataatgttgttgatgagttccaattaagcctccacatcaaacaactacttctctctttcacctgcatctcgattttctaaatttgagaggaatgaagacgctgtggcaagacataacttccgacagcttgccaccgtcaaacaatagtcgagatgaggtaatcgcatttggttctccaattctaaaaaaaacatttacctatgcaatagggcgatcttcggggcctcagctgagcatagctgaagtatcaaaatcgggtcactgtccaatctacaatggtcgtcgtgacccgtttactgtgat

SEQ ID NO: 14334 - DNA, 588 bp, Muscodor strobelii
  misc_feature: SGI cDNA ID NO. 564721
  misc_feature: Encodes the peptide sequence at SEQ ID NO 14335
atgtcgtcacgttcctccaagtatcctccagagtcgagttctaagaagcactcgtcgaagtccaagtccaagaccaaagtcaagaacgacgactggacagatgtcacggagcctgaggaaaggcgacgaatccagaatcgcatcgctcaacgcaagttcagagagaaggccaaggaacagaaggagatgactgagcgagatgaccgcaatcaacagaatgcgggcagcagctatcgtgtccctgatgccagagctctcgacccagaagatgatcaactatcaggtttaccctggggaggtgtcagcatgagacatgtcgtagcacgcggccacgagagcgaatctcgccgaagtggctcacacagagatcaccatggtcacgacagctcgcagtactacaacacctattcgggatattacgcatcttcttcccagcaacagcagacagcaagctggggaagccgaggcagttccggcggcgatgaccaccaggatgattcggcctactattatgattacgactacgattacgactatgactatgactacgacccgcgcagcggcggggatgatcaccatcagcgttga

SEQ ID NO: 14335 - protein, 195 aa, Muscodor strobelii
  misc_feature: SGI Peptide ID NO. 564721
  misc_feature (20)..(115): NCBI GI: 116198103 Blast Desc: CHGG_07207 [Chaetomium globosum CBS 148.51] gi|88178486|gb|EAQ85954.1| CHGG_07207 [Chaetomium globosum CBS 148.51]
  misc_feature (31)..(173): NCBI GI: 256731283 Blast Desc: NECHADRAFT_84607 [Nectria haematococca mpVI 77-13-4]
  misc_feature (1)..(177): NCBI GI: 261355639 Blast Desc: [Verticillium albo-atrum VaMs.102]
  misc_feature (30)..(179): NCBI GI: 145607149 Blast Desc: [Magnaporthe grisea 70-15] gi|145014747|gb|EDJ99315.1| [Magnaporthe grisea 70-15]
  misc_feature (22)..(138): NCBI GI: 169601320 Blast Desc: SNOG_03524 [Phaeosphaeria nodorum SN15] gi|111067609|gb|EAT88729.1| SNOG_03524 [Phaeosphaeria nodorum SN15]
  misc_feature (28)..(170): NCBI GI: 154321125 Blast Desc: [Botryotinia fuckeliana B05.10] gi|150851975|gb|EDN27167.1| [Botryotinia fuckeliana B05.10]
  misc_feature (30)..(110): NCBI GI: 189193755 Blast Desc: conserved [Pyrenophora tritici-repentis Pt-1C-BFP] gi|187978780|gb|EDU45406.1| conserved [Pyrenophora tritici-repentis Pt-1C-BFP]
  misc_feature (28)..(126): NCBI GI: 171692881 Blast Desc: protein product [Podospora anserina] gi|170946389|emb|CAP73190.1| protein product [Podospora anserina]
  misc_feature (28)..(160): NCBI GI: 156054454 Blast Desc: SS1G_06075 [Sclerotinia sclerotiorum 1980] gi|154703855|gb|EDO03594.1| SS1G_06075 [Sclerotinia sclerotiorum 1980]
  misc_feature (12)..(111): NCBI GI: 85099211 Blast Desc: NCU03654 [Neurospora crassa OR74A] gi|16944464|emb|CAD11345.1| [Neurospora crassa] gi|28922254|gb|EAA31498.1| [Neurospora crassa OR74A]
MSSRSSKYPPESSSKKHSSKSKSKTKVKNDDWTDVTEPEERRRIQNRIAQRKFREKAKEQKEMTERDDRNQQNAGSSYRVPDARALDPEDDQLSGLPWGGVSMRHVVARGHESESRRSGSHRDHHGHDSSQYYNTYSGYYASSSQQQQTASWGSRGSSGGDDHQDDSAYYYDYDYDYDYDYDYDPRSGGDDHHQR

SEQ ID NO: 14336 - DNA, 1324 bp, Muscodor strobelii
  misc_feature: SGI EST ID NO. CUFF.34116.0
  misc_feature: Variant of the nucleotide sequence at SEQ ID NO 14334
cagaactcttatcatcacattctattatatctgttcagtccgaagcaacagagagaagaaatttccaagcccctacagcagagccatttcaagacaatatttcaacaacaccaaaagtatcaccctcgaactcgccaaggatcagtatacgaagatccaaaagtagtgacgaaacagaaacagagagaaccatgtcgtcacgttcctccaagtatcctccagagtcgagttctaagaagcactcgtcgaagtccaagtccaagaccaaagtcaagaacgacgactggacagatgtcacggagcctgaggaaaggcgacgaatccagaatcgcatcgctcaacgcaagttcagagagaaggccaaggaacagaaggagatgactgagcgagatgaccgcaatcaacagaatgcgggcagcagctatcgtgtccctgatgccagagctctcgacccagaagatgatcaactatcaggtttaccctggggaggtgtcagcatgagacatgtcgtagcacgcggccacgagagcgaatctcgccgaagtggctcacacagagatcaccatggtcacgacagctcgcagtactacaacacctattcgggatattacgcatcttcttcccagcaacagcagacagcaagctggggaagccgaggcagttccggcggcgatgaccaccaggatgattcggcctactattatgattacgactacgattacgactatgactatgactacgacccgcgcagcggcggggatgatcaccatcagcgttgacgagaggacaaacgagatacgtgatgagacctacgtcagaaacaacgcttatgacaactattgatgacgacggtgggaacttattttttcgacccccctctatcctgcagtctgccttgcgatggcttacactcgcatctgttttcgggaatattgagccagatgaagggccacgtgggatgtggcttgattaccaaatggtaactacacacaatggactcgatgatgggattcttttttctcttcttggtatcactcaggctggctcgtgccgccacggtgtcctccctgttttacatagaagcgcaacccgagcgatctttttttcccccatttgtttacacactctcattggttctattctacttgaggactttctgtagagggatggctttttccatacatgcattatgattcgcgagggaccgatatagaggtatagatcagttgtacgatacttgtaatggggacatatgaagatgggtatggggacatgggctaggcggaagttagcaaatagcaagatgaaatcttaatggtttcgc

SEQ ID NO: 14337 - DNA, 4875 bp, Muscodor strobelii
  misc_feature: SGI cDNA ID NO. 564722
  misc_feature: Encodes the peptide sequence at SEQ ID NO 14338
atggctcacctagctacgggcgcgaagctcaagcgctacccaaagcagtttgtggaacatgaaatcattcacaactactcataccaaccatttcctcgggctctattgaagaatttgtgtctaatcgctgcaagtggacgccccgaggaggatgccatagccgatttggtgcgcaatactagtgcaccgatggacgaagatgaagtttctctgagtcttcgtctgaaggagaatgagacgatggagcggttgcctggatccacctcttcggacttcgttgagactgagacacttggaaaggaaaatacaagattgaaacgtcggcaaaatgaagtcgctgaaatgccaggtccagagtcgaaacgccgcaaacttgaatcaggccaagcgcagcccggttcggctcaatctgcatccggtactgcgagctccgttgagactgaaataattgggaaccagaatcctaagttaaaacggcagcgaagcgacgcagccgaaatgtcaggtgtaaagtcgaaacgtcctagacttacgtcgtatcaagcacagcttgaatcgattcaagcgcagccagacactgtgcatgtcatgcgtgaatgtgtagccatctctcgaccagttggagacaggccagccatcgtccttgacagagaaaatacgatcaatcacaagaaggttcagcaatttctcgcaataaagtatgaccacgaggagaacactttagttatacacaacaaaccaggttcttcaccatgcaatcacttctggattactttgcacctcacccgaggcttgactccccctgctcgtgccgcacttgaaatattcaatgctactaaagaagacccgaataaagaatgtgccctatgggttacgacgaccatatctctcgcggaggcacatggtatggtatgcctcaaactctctctcgacgtgaaatggaacgtggcaatcaatgtgctccgaaacatgaaggagaggacaagaagtcaaccaatcgtcaatacattagcgagttcgagagcaaccgaagctcacagtgaacccagggacaatatccttttgccacaagaattttacgaagctgcgttcatgcctgatgcggaagctttcaacgacctagacaccgtgtcaattccaggtctagccacgactttatatcctttccaacgcagagctttgcaatggcttttgatgcgagaaggcgttaaactgatgaacaagtactatccttacaatccagatgggactgttctacttgaaccatgccccactacaacatccatggcaccacttccactgtctttccgaattctcaaggatgttgatgggaaggagttttattttagcgaactgtatcacgccgtggtgacagatttgaccccatatcgattagccgaagatggctttcgaggtggaattctcgccgaggagatgggtctcggaaaaacagtagaggtgatatcgctgatactgacacataaacgtggccttgtaaccgaacccaagagcactggtgtcgaaggcatcattccgacaaatgccacgctgatcatagcgccggatgcattgcaaaatcaatggctcgccgaactcaagcagcatgcgcccactcttcatgtcatgcgctatcccggcatggtcgagtgggtgaagaaggtcacgtcgagcgatgggggccaaggtgagcttccagagtcaggactcgaatcacagctcctgtcccagcttggaaaatatgatgtcgtcatcacgagtctcagcgttctacggtccgaggtccatcatgccaagccccctcctgatcgctcttccaggcaaaaatcacagcacgaaagacccatttcaccgttggtcaagctgggttggtggcgcgtttgtcttgacgaagcccaacaaattccatctggagtaagccaaaccgcaaaactggcaaggatcatacctcgaatcaacgcgtggtcagtgaccggaacacctgttaaagacaatatccatgatctcagggagcttctctcattcctgcggtacagcccctttgatacttataactgtatatggaaagcgatgctccacagtcatggatctctctttgcccctctgttcagtcgaatttctctcagacatgccaagcgagccgttcggaatgagttagagttaccacctcagaagcgcttcgttgttaccatgccgtttacagcgattgaagaacaccattatcgggtccagttcgaagcattcgcgacacgagccggactcgacaccactggttctcctctaaaagaatcggtagatctggccggtactgccactgttaccgaaatgaggggagcgctcgccagcctcagacagatgatcctacatcctgagctcggtgttaagacctatgtggcagctggtacttacaagacattggtagaacatttggaagccttgattgagaaatcagacgcacaaattcaggctgaacaacgaaaatatctggtcacaaagctttcgaggggacaattattcgagaactcgccgagagttggggaggcactcagcatttggcaagaagtgcaagaagaaattgcgccaattgtcagcgagtgtcgagaagaactaaaaaaggcactagaaaatgatcaccaagagaacaataacgttgatcacccagtagttgatgacggcccggtagatgaagaagccgagaacgcgaaggtgggcgaatgccgccgaaacttgcgatcaatcctcgacattgagcacagagcaacatttttcatcgccagcggctgtttccagcaaaagtccgacatcagtctgactgatcctaattctgacgagttcaaagagcttgagcgtcgcgaggttgagggttacgaaaaagcaaaacaactacgcaaagagatactgcaagaaccgctcgccaaagccggcatgatcatggataaaataagtgcgcgtgcggacacccaatctttcgttgaaatccccgagattgttcccgacgacacgcatggtttagagagcatgtctcttatcgaggatctgcaatcagtcagcgcctcgttgaacgaacaggctaatctcatcgacgagtggcgagagcacgttattcagctcctgttaaaaccgctcgttgatggagaagacgacgttgaacttacaggtgaggaatacgaagattctaccaaagttcaagatcacctcatgattttcacactcgcgctgcgggctgtgatttgtgatcgacaagatgcgcttagcgggctaacgaacgagcgcattgcgtacgagaccgctgctgcccagcgaatggccaagaatggtgacggccacgcgccggagaagatgctcgagtgtctagaaatccgacaagaccacagactcatgccagggcagcgtccgcttcgcgctgtgttatcagggttgaggcagcttgctgcgaaatttcgccaggaagtagctaatggcagtgatcgtgctaagattgagttgaagatcgttactagacaactccactctacacaggagatgttcaacgagcataatcagattgctatgaaactcgaacgggagttggatctcttcaccgcggccatgaatgctcgtgtcgacttttaccggcagctccaatcactctccgacagtgtagctccgctctcagacgatgttcaaatgcgtattgaggctcagtttgagtcgtataaaaaggtcgaacaggatacagtaaggaaaatagagaatgctaggtcgcaacatcgtcatctgcttttgatacgagaggaagaaggaccgggtgcagaagaccttcggccttgtctcatttgtgtcagcgatttcacttgcggtattctcaccgaatgtggtcatcggttttgcaaaaaatgtttgatgctttggttcagagcaaagcacaactgcccggtctgtaagaaacaattgactgccaacatgctgctagagttcaataggaagcaggtggttctgaagttacgccatgatcaggatcaaagccttagtagctccgatttgtcgtctcaaacggcagccatttactcaaacttcggcgaggacaagctccgtgctatccaggatattaacctcacaggtccttcgtattcaactaagatcgacactctcatcaaacatcttaagtggcttcggaatgaagatcctggggctaagtcgattatcttctcgcaattccaaggcttcctcgacgttctagagcaagctttgacagctcatgacattggccatgcggtttttacgaccacttcaagccataaagatcggagtcttgaacggttcagagcagacccggatacggtgtgcttattgatgagcgcgaaagcccactccagtggattgaatctcgtcaatgcaagccatgtcttcctatgcgaaccgctattgaatacagcactggagctgcaagcaattgcacgagtagacagaattggccaagaaacggaaacgacagtatggctttaccttgtcgaggggacagttgaggaatcaatttacaatctttctgtacgtcgaagaatggcgcatatgagtgccatggacaagggcaaagggaacggaccagcaatggaagtcatgtccacaaacgcgctagaggctgccaactctcgagagatggagcaggtcagtctcgccaggctgttggataaacgaggagatggtgagatagtcgaggatcaagatctctggcaatgcctctttggaaatacaacaaaacccaaagaggatggtatgcgtgaggccctcgaaagatatccaaatactgctctcactagagcgattggtgctgaagcagcggaacagaggattgagttggagcaaaggatggagttagaccgtcaaactgatgtcgtctaa

SEQ ID NO: 14338 - protein, 1624 aa, Muscodor strobelii
  misc_feature: SGI Peptide ID NO. 564722
  misc_feature (1269)..(1306): Pfam Id: PF00097 Pfam Desc: Zinc finger, C3HC4 type (RING finger)
  misc_feature (1408)..(1484): Pfam Id: PF00271 Pfam Desc: Helicase conserved C-terminal domain
  misc_feature (389)..(792): Pfam Id: PF00176 Pfam Desc: SNF2 family N-terminal domain
  misc_feature (389)..(544): Pfam Id: PF00176 Pfam Desc: SNF2 family N-terminal domain
  misc_feature (196)..(1578): NCBI GI: 46126071 Blast Desc: FG07413.1 [Gibberella zeae PH-1]
  misc_feature (314)..(1609): NCBI GI: 256730908 Blast Desc: NECHADRAFT_106359 [Nectria haematococca mpVI 77-13-4]
  misc_feature (279)..(1618): NCBI GI: 261355641 Blast Desc: E3 ubiquitin-protein ligase SHPRH [Verticillium albo-atrum VaMs.102]
  misc_feature (266)..(1609): NCBI GI: 171692877 Blast Desc: protein product [Podospora anserina] gi|170946387|emb|CAP73188.1| protein product [Podospora anserina]
  misc_feature (261)..(1612): NCBI GI: 116198109 Blast Desc: CHGG_07210 [Chaetomium globosum CBS 148.51] gi|88178489|gb|EAQ85957.1| CHGG_07210 [Chaetomium globosum CBS 148.51]
  misc_feature (172)..(1575): NCBI GI: 85099203 Blast Desc: NCU03652 [Neurospora crassa OR74A] gi|16944466|emb|CAC18163.2| conserved [Neurospora crassa] gi|28922252|gb|EAA31496.1| [Neurospora crassa OR74A]
  misc_feature (356)..(1608): NCBI GI: 242786466 Blast Desc: SNF2 family helicase/ATPase, [Talaromyces stipitatus ATCC 10500] gi|218720958|gb|EED20377.1| SNF2 family helicase/ATPase, [Talaromyces stipitatus ATCC 10500]
  misc_feature (306)..(1608): NCBI GI: 119467932 Blast Desc: SNF2 family helicase/ATPase, [Neosartorya fischeri NRRL 181] gi|119405924|gb|EAW15875.1| SNF2 family helicase/ATPase, [Neosartorya fischeri NRRL 181]
  misc_feature (306)..(1608): NCBI GI: 159124104 Blast Desc: SNF2 family helicase/ATPase, [Aspergillus fumigatus A1163]
  misc_feature (306)..(1608): NCBI GI: 146324369 Blast Desc: SNF2 family helicase/ATPase [Aspergillus fumigatus Af293] gi|129557212|gb|EAL88509.2| SNF2 family helicase/ATPase, [Aspergillus fumigatus Af293]
MAHLATGAKLKRYPKQFVEHEIIHNYSYQPFPRALLKNLCLIAASGRPEEDAIADLVRNTSAPMDEDEVSLSLRLKENETMERLPGSTSSDFVETETLGKENTRLKRRQNEVAEMPGPESKRRKLESGQAQPGSAQSASGTASSVETEIIGNQNPKLKRQRSDAAEMSGVKSKRPRLTSYQAQLESIQAQPDTVHVMRECVAISRPVGDRPAIVLDRENTINHKKVQQFLAIKYDHEENTLVIHNKPGSSPCNHFWITLHLTRGLTPPARAALEIFNATKEDPNKECALWVTTTISLAEAHGMVCLKLSLDVKWNVAINVLRNMKERTRSQPIVNTLASSRATEAHSEPRDNILLPQEFYEAAFMPDAEAFNDLDTVSIPGLATTLYPFQRRALQWLLMREGVKLMNKYYPYNPDGTVLLEPCPTTTSMAPLPLSFRILKDVDGKEFYFSELYHAVVTDLTPYRLAEDGFRGGILAEEMGLGKTVEVISLILTHKRGLVTEPKSTGVEGIIPTNATLIIAPDALQNQWLAELKQHAPTLHVMRYPGMVEWVKKVTSSDGGQGELPESGLESQLLSQLGKYDVVITSLSVLRSEVHHAKPPPDRSSRQKSQHERPISPLVKLGWWRVCLDEAQQIPSGVSQTAKLARIIPRINAWSVTGTPVKDNIHDLRELLSFLRYSPFDTYNCIWKAMLHSHGSLFAPLFSRISLRHAKRAVRNELELPPQKRFVVTMPFTAIEEHHYRVQFEAFATRAGLDTTGSPLKESVDLAGTATVTEMRGALASLRQMILHPELGVKTYVAAGTYKTLVEHLEALIEKSDAQIQAEQRKYLVTKLSRGQLFENSPRVGEALSIWQEVQEEIAPIVSECREELKKALENDHQENNNVDHPVVDDGPVDEEAENAKVGECRRNLRSILDIEHRATFFIASGCFQQKSDISLTDPNSDEFKELERREVEGYEKAKQLRKEILQEPLAKAGMIMDKISARADTQSFVEIPEIVPDDTHGLESMSLIEDLQSVSASLNEQANLIDEWREHVIQLLLKPLVDGEDDVELTGEEYEDSTKVQDHLMIFTLALRAVICDRQDALSGLTNERIAYETAAAQRMAKNGDGHAPEKMLECLEIRQDHRLMPGQRPLRAVLSGLRQLAAKFRQEVANGSDRAKIELKIVTRQLHSTQEMFNEHNQIAMKLERELDLFTAAMNARVDFYRQLQSLSDSVAPLSDDVQMRIEAQFESYKKVEQDTVRKIENARSQHRHLLLIREEEGPGAEDLRPCLICVSDFTCGILTECGHRFCKKCLMLWFRAKHNCPVCKKQLTANMLLEFNRKQVVLKLRHDQDQSLSSSDLSSQTAAIYSNFGEDKLRAIQDINLTGPSYSTKIDTLIKHLKWLRNEDPGAKSIIFSQFQGFLDVLEQALTAHDIGHAVFTTTSSHKDRSLERFRADPDTVCLLMSAKAHSSGLNLVNASHVFLCEPLLNTALELQAIARVDRIGQETETTVWLYLVEGTVEESIYNLSVRRRMAHMSAMDKGKGNGPAMEVMSTNALEAANSREMEQVSLARLLDKRGDGEIVEDQDLWQCLFGNTTKPKEDGMREALERYPNTALTRAIGAEAAEQRIELEQRMELDRQTDVV

SEQ ID NO: 14339 - DNA, 2920 bp, Muscodor strobelii
  misc_feature: SGI EST ID NO. CUFF.34132.0
  misc_feature: Variant of the nucleotide sequence at SEQ ID NO 14337
ctcgccagcctcagacagatgatcctacatcctgagctcggtgttaagacctatgtggcagctggtacttacaagacattggtagaacatttggaagccttgattgagaaatcagacgcacaaattcaggctgaacaacgaaaatatctggtcacaaagctttcgaggggacaattattcgagaactcgccgagagttggggaggcactcagcatttggcaagaagtgcaagaagaaattgcgccaattgtcagcgagtgtcgagaagaactaaaaaaggcactagaaaatgatcaccaagagaacaataacgttgatcacccagtagttgatgacggcccggtagatgaagaagccgagaacgcgaaggtgggcgaatgccgccgaaacttgcgatcaatcctcgacattgagcacagagcaacatttttcatcgccagcggctgtttccagcaaaagtccgacatcagtctgactgatcctaattctgacgagttcaaagagcttgagcgtcgcgaggttgagggttacgaaaaagcaaaacaactacgcaaagagatactgcaagaaccgctcgccaaagccggcatgatcatggataaaataagtgcgcgtgcggacacccaatctttcgttgaaatccccgagattgttcccgacgacacgcatggtttagagagcatgtctcttatcgaggatctgcaatcagtcagcgcctcgttgaacgaacaggctaatctcatcgacgagtggcgagagcacgttattcagctcctgttaaaaccgctcgttgatggagaagacgacgttgaacttacaggtgaggaatacgaagattctaccaaagttcaagatcacctcatgattttcacactcgcgctgcgggctgtgatttgtgatcgacaagatgcgcttagcgggctaacgaacgagcgcattgcgtacgagaccgctgctgcccagcgaatggccaagaatggtgacggccacgcgccggagaagatgctcgagtgtctagaaatccgacaagaccacagactcatgccagggcagcgtccgcttcgcgctgtgttatcagggttgaggcagcttgctgcgaaatttcgccaggaagtagctaatggcagtgatcgtgctaagattgagttgaagatcgttactagacaactccactctacacaggagatgttcaacgagcataatcagattgctatgaaactcgaacgggagttggatctcttcaccgcggccatgaatgctcgtgtcgacttttaccggcagctccaatcactctccgacagtgtagctccgctctcagacgatgttcaaatgcgtattgaggctcagtttgagtcgtataaaaaggtcgaacaggatacagtaaggaaaatagagaatgctaggtcgcaacatcgtcatctgcttttgatacgagaggaagaaggaccgggtgcagaagaccttcggccttgtctcatttgtgtcagcgatttcacttgcggtattctcaccgaatgtggtcatcggttttgcaaaaaatgtttgatgctttggttcagagcaaagcacaactgcccggtctgtaagaaacaattgactgccaacatgctgctagagttcaataggaagcaggtggttctgaagttacgccatgatcaggatcaaagccttagtagctccgatttgtcgtctcaaacggcagccatttactcaaacttcggcgaggacaagctccgtgctatccaggatattaacctcacaggtccttcgtattcaactaagatcgacactctcatcaaacatcttaagtggcttcggaatgaagatcctggggctaagtcgattatcttctcgcaattccaaggcttcctcgacgttctagagcaagctttgacagctcatgacattggccatgcggtttttacgaccacttcaagccataaagatcggagtcttgaacggttcagagcagacccggatacggtgtgcttattgatgagcgcgaaagcccactccagtggattgaatctcgtcaatgcaagccatgtcttcctatgcgaaccgctattgaatacagcactggagctgcaagcaattgcacgagtagacagaattggccaagaaacggaaacgacagtatggctttaccttgtcgaggggacagttgaggaatcaatttacaatctttctgtacgtcgaagaatggcgcatatgagtgccatggacaagggcaaagggaacggaccagcaatggaagtcatgtccacaaacgcgctagaggctgccaactctcgagagatggagcaggtcagtctcgccaggctgttggataaacgaggagatggtgagatagtcgaggatcaagatctctggcaatgcctctttggaaatacaacaaaacccaaagaggatggtatgcgtgaggccctcgaaagatatccaaatactgctctcactagagcgattggtgctgaagcagcggaacagaggattgagttggagcaaaggatggagttagaccgtcaaactgatgtcgtctaaaagcgaggcgctgtcgagacatagatgaccaatctcggtgttgatgtcacatgaaagcgcggagttcaggttggtatttgttgtcagtcggtgcggtttgcttgtaacaagatagcgtaagatgactgacgaaatgtgagagtactgatggtaaacatgaaaacgcgcatagattctaaaggacaggcatagcaaacaggaaaaaatttgtctttgcgattctacatgacggtacaaaatttgctatacgcaggtgcttgctttcgaaactgtatccgagggaaacatttcgcattaggcaacgtcacttagtctgtctctactttctctcgcagtcatgtagtgatgaattgcatagcaatagaatactactccaaga

SEQ ID NO: 14340 - DNA, 747 bp, Muscodor strobelii
  misc_feature: SGI cDNA ID NO. 564723
  misc_feature: Encodes the peptide sequence at SEQ ID NO 14341
atggccagcttaaagccaattattcgcccgcataatctgcgcagtgcactctccattttacaacacgcacacctctccgctagcacattccgaccaacgatacagacatccataagggccacatcatcaactgcaacctccaaaccctctcaaatccccgagccaacgcccttcgtacccgatgtcccaacgttcctcaccgtcatcggccgcggcctctcgacccatgcatccaagatcccagactgggagaccctcttcaccctcacctcggagcagatgcgcgagctaggcatcgagccccctcgcgcccggaagtatctccttcgctggcggcagcgcttccgagagggcaaatacggcatcggcggcgatctcacacacgtcaccgatggtgttgccgacttacgcgttctcgagaccgatccagaggccctcggaaaagacatcaaggagacgccacgcaaagtggtcgtgaatgtgcccaatggccgcacgctgaaggaatgtggtatggaggagatatcacgcgtccagggatttcacgttgagggtgccaaggcaatcgttggtccttatgccctgcccgtgaagggcggtgatggggcccaagtcactgtcaccgagggtatgtgggaggatgtccgtggccgcaagattgatggcggtgaacggagacggacagagattcgatacttgaagcgcgtggctgagcgtcgcgaggctcgtgagagaggcgagttatga

SEQ ID NO: 14341 - protein, 248 aa, Muscodor strobelii
  misc_feature: SGI Peptide ID NO. 564723
  misc_feature (62)..(118): Pfam Id: PF09597 Pfam Desc: IGR protein motif
  misc_feature (13)..(244): NCBI GI: 116198107 Blast Desc: CHGG_07209 [Chaetomium globosum CBS 148.51] gi|88178488|gb|EAQ85956.1| CHGG_07209 [Chaetomium globosum CBS 148.51]
  misc_feature (13)..(245): NCBI GI: 164426798 Blast Desc: NCU03653 [Neurospora crassa OR74A] gi|157071482|gb|EAA31497.2| conserved [Neurospora crassa OR74A]
  misc_feature (13)..(245): NCBI GI: 16944465 Blast Desc: conserved [Neurospora crassa]
  misc_feature (7)..(243): NCBI GI: 156054458 Blast Desc: SS1G_06077 [Sclerotinia sclerotiorum 1980] gi|154703857|gb|EDO03596.1| SS1G_06077 [Sclerotinia sclerotiorum 1980]
  misc_feature (7)..(243): NCBI GI: 154321119 Blast Desc: BC1G_01434 [Botryotinia fuckeliana B05.10] gi|150851972|gb|EDN27164.1| BC1G_01434 [Botryotinia fuckeliana B05.10]
  misc_feature (13)..(244): NCBI GI: 171692879 Blast Desc: protein product [Podospora anserina] gi|170946388|emb|CAP73189.1| protein product [Podospora anserina]
  misc_feature (26)..(246): NCBI GI: 261355640 Blast Desc: conserved [Verticillium albo-atrum VaMs.102]
  misc_feature (26)..(244): NCBI GI: 39944024 Blast Desc: MGG_04023 [Magnaporthe grisea 70-15] gi|145014746|gb|EDJ99314.1| MGG_04023 [Magnaporthe grisea 70-15]
  misc_feature (19)..(239): NCBI GI: 169601002 Blast Desc: SNOG_03355 [Phaeosphaeria nodorum SN15] gi|111067440|gb|EAT88560.1| SNOG_03355 [Phaeosphaeria nodorum SN15]
  misc_feature (58)..(240): NCBI GI: 256731284 Blast Desc: NECHADRAFT_84608 [Nectria haematococca mpVI 77-13-4]
MASLKPIIRPHNLRSALSILQHAHLSASTFRPTIQTSIRATSSTATSKPSQIPEPTPFVPDVPTFLTVIGRGLSTHASKIPDWETLFTLTSEQMRELGIEPPRARKYLLRWRQRFREGKYGIGGDLTHVTDGVADLRVLETDPEALGKDIKETPRKVVVNVPNGRTLKECGMEEISRVQGFHVEGAKAIVGPYALPVKGGDGAQVTVTEGMWEDVRGRKIDGGERRRTEIRYLKRVAERREARERGEL

SEQ ID NO: 14342 - DNA, 2662 bp, Muscodor strobelii
  misc_feature: SGI EST ID NO. CUFF.34269.0
  misc_feature: Variant of the nucleotide sequence at SEQ ID NO 14340
cgatctcctggcgcaactccattgaacttttttggttcatcgacgacaacactcgtgacgataccaaaccttgtgataccgtcctcccgcttctacaaggcgcacgctcccatgatgcatatatagctcagtcgaatgagcagcatttcatcaacacaacgcccatcatggccagcttaaagccaattattcgcccgcataatctgcgcagtgcactctccattttacaacacgcacacctctccgctagcacattccgaccaacgatacagacatccataagggccacatcatcaactgcaacctccaaaccctctcaaatccccgagccaacgcccttcgtacccgatgtcccaacgttcctcaccgtcatcggccgcggcctctcgacccatgcatccaagatcccagactgggagaccctcttcaccctcacctcggagcagatgcgcgagctaggcatcgagccccctcgcgcccggaagtatctccttcgctggcggcagcgcttccgagagggcaaatacggcatcggcggcgatctcacacacgtcaccgatggtgttgccgacttacgcgttctcgagaccgatccagaggccctcggaaaagacatcaaggagacgccacgcaaagtggtcgtgaatgtgcccaatggccgcacgctgaaggaatgtggtatggaggagatatcacgcgtccagggatttcacgttgagggtgccaaggcaatcgttggtccttatgccctgcccgtgaagggcggtgatggggcccaagtcactgtcaccgagggtatgtgggaggatgtccgtggccgcaagattgatggcggtgaacggagacggacagagattcgatacttgaagcgcgtggctgagcgtcgcgaggctcgtgagagaggcgagttatgatagtgttgagtccacggaacacatgtcacatgtatcaaggtgtacccatattggcagattttgtaagaacatcaagatcaaatcagatctctgtataaagtagcaacacttgtccacactgaaaggccaagtgagtcaaacaatcaaggcctcatccttttgtcccgtccttctcgtaaaactccgttgacgccataccctatgcaatcaaagtgtctttccctgcgcctgtatcatgtctatttggcaccgccgaagtctagttttctcgccaccttgctacctcggtcctcatccaccatgccggggcgtctcgtgagatcctcaccaagctttgctgctccaaccttgctcctgtcctccttgggcagcttatccttgcgtgtaggccgaggttctttctgccaccattcgtgctgcaacatctcgcgtgccgtgattcgcttgttggggtcaagcacaagtgtcttcatgagaaagtcgataccgacgtttcccaaggtgggaaacagttgcagatagtgatcctttcctcgcaaaggcacaacctgctcttgagccatgaagccaggcaacttggtcactccgggccaattctcctctgttggggtccctatcgcctgacagatgaggttgatctggtcaatctctgtatttcctggcagatatgctgttcgcagggcgagttcggccagcaccagtccaacagaccatacatcaacggcgccggagtaatgctgagctccaaagagaagctcgggaggtcgataccagcgcgtgatgacattggacgtcataggcctgtaggggtctgcaaagcttcgtgcgagaccgaaatcggcaagcttcacttctccgtcggcagcaatcaacaagttgttgggcttgatatcacggtggaggacgaagttctcgtggcaaaaccacacggctctggtcaacatgcccatccaggccttgatatctgccacgccgtacggaacgtccttagtattatggatgagcatctccaggtcaccgcctggtaggtactcaagaactaagttcaggttctggtttttggaggagaacaccgagtgcagagtgatgatattaggatgtgagagttcttgaagaaatttgatctctcgtacggcatcaggagccatgccctccttaaattccttttggaccttgattttcttgatggctacttgctgcgacttgtccgccttgagatgaccgaggtacacattggcatatgtaccttcgccaagtttcttgtctgtcagaaaataattgatcagtgttttgtgattttttccaaggcttgtcgtctctggaaatgacaaacctttgtaatacttgttcttctccctcagattctctctctcagcggcatcgagaagttcctcatttacggcaatagcattggggacagccagactggcaagtggtgtcccgccagatgaggcttctgcagaggcaacattcttgagaggtgaagtggtcgcgtgaatgttctgaacaggctccgacggatacaaaaccatgggagagaccgccatggtgaagttgtggatattgcactcacgggtgcataccgggtgcgtacttggggcaaattatggcgtcctgtttctcagaaggactcctccagcttctggagaactcggccaagcaaggcacttccgacttccgagcaccagaaagtgtgcgcaaagaagatgggctaccgctgtcaagatcagcggcagttggacgatgat

SEQ ID NO: 14343 - DNA, 1239 bp, Muscodor strobelii
  misc_feature: SGI cDNA ID NO. 564724
  misc_feature: Encodes the peptide sequence at SEQ ID NO 14344
atggcggtctctcccatggttttgtatccgtcggagcctgttcagaacattcacgcgaccacttcacctctcaagaatgttgcctctgcagaagcctcatctggcgggacaccacttgccagtctggctgtccccaatgctattgccgtaaatgaggaacttctcgatgccgctgagagagagaatctgagggagaagaacaagtattacaaagacaagaaacttggcgaaggtacatatgccaatgtgtacctcggtcatctcaaggcggacaagtcgcagcaagtagccatcaagaaaatcaaggtccaaaaggaatttaaggagggcatggctcctgatgccgtacgagagatcaaatttcttcaagaactctcacatcctaatatcatcactctgcactcggtgttctcctccaaaaaccagaacctgaacttagttcttgagtacctaccaggcggtgacctggagatgctcatccataatactaaggacgttccgtacggcgtggcagatatcaaggcctggatgggcatgttgaccagagccgtgtggttttgccacgagaacttcgtcctccaccgtgatatcaagcccaacaacttgttgattgctgccgacggagaagtgaagcttgccgatttcggtctcgcacgaagctttgcagacccctacaggcctatgacgtccaatgtcatcacgcgctggtatcgacctcccgagcttctctttggagctcagcattactccggcgccgttgatgtatggtctgttggactggtgctggccgaactcgccctgcgaacagcatatctgccaggaaatacagagattgaccagatcaacctcatctgtcaggcgatagggaccccaacagaggagaattggcccggagtgaccaagttgcctggcttcatggctcaagagcaggttgtgcctttgcgaggaaaggatcactatctgcaactgtttcccaccttgggaaacgtcggtatcgactttctcatgaagacacttgtgcttgaccccaacaagcgaatcacggcacgcgagatgttgcagcacgaatggtggcagaaagaacctcggcctacacgcaaggataagctgcccaaggaggacaggagcaaggttggagcagcaaagcttggtgaggatctcacgagacgccccggcatggtggatgaggaccgaggtagcaaggtggcgagaaaactagacttcggcggtgccaaatag

SEQ ID NO: 14344 - protein, 412 aa, Muscodor strobelii
  misc_feature: SGI Peptide ID NO. 564724
  misc_feature (69)..(358): Pfam Id: PF00069 Pfam Desc: Protein kinase domain
  misc_feature (69)..(265): Pfam Id: PF07714 Pfam Desc: Protein tyrosine kinase
  misc_feature (1)..(410): NCBI GI: 46126091 Blast Desc: FG07423.1 [Gibberella zeae PH-1]
  misc_feature (1)..(409): NCBI GI: 261355644 Blast Desc: serine/threonine-protein kinase crk1 [Verticillium albo-atrum VaMs.102]
  misc_feature (1)..(412): NCBI GI: 154321191 Blast Desc: BC1G_01470 [Botryotinia fuckeliana B05.10] gi|150852008|gb|EDN27200.1| BC1G_01470 [Botryotinia fuckeliana B05.10]
  misc_feature (1)..(412): NCBI GI: 85099231 Blast Desc: NCU03659 [Neurospora crassa OR74A] gi|16944461|emb|CAC18156.2| cyclin-dependent ser/thr protein kinase KIN28 [Neurospora crassa] gi|28922259|gb|EAA31503.1|
  misc_feature (1)..(412): NCBI GI: 156054406 Blast Desc: serine/threonine-protein kinase [Sclerotinia sclerotiorum 1980] gi|154703831|gb|EDO03570.1| serine/threonine-protein kinase [Sclerotinia sclerotiorum 1980]
  misc_feature (1)..(412): NCBI GI: 116198113 Blast Desc: CHGG_07212 [Chaetomium globosum CBS 148.51] gi|88178491|gb|EAQ85959.1| CHGG_07212 [Chaetomium globosum CBS 148.51]
  misc_feature (1)..(412): NCBI GI: 171692873 Blast Desc: protein product [Podospora anserina] gi|170946385|emb|CAP73186.1| protein product [Podospora anserina]
  misc_feature (1)..(412): NCBI GI: 145609287 Blast Desc: MGG_13401 [Magnaporthe grisea 70-15] gi|145016675|gb|EDK01105.1| MGG_13401 [Magnaporthe grisea 70-15]
  misc_feature (1)..(410): NCBI GI: 240107820 Blast Desc: serine/threonine protein kinase crk1, [Coccidioides posadasii C735 delta SOWgp]
  misc_feature (1)..(412): NCBI GI: 115389042 Blast Desc: serine/threonine-protein kinase crk1 [Aspergillus terreus NIH2624] gi|114194422|gb|EAU36122.1| serine/threonine-protein kinase crk1 [Aspergillus terreus
  misc_feature (68)..(365): SWISSPROT Homolog: EC 2.7.11.23 [RNA-polymerase]-subunit kinase
MAVSPMVLYPSEPVQNIHATTSPLKNVASAEASSGGTPLASLAVPNAIAVNEELLDAAERENLREKNKYYKDKKLGEGTYANVYLGHLKADKSQQVAIKKIKVQKEFKEGMAPDAVREIKFLQELSHPNIITLHSVFSSKNQNLNLVLEYLPGGDLEMLIHNTKDVPYGVADIKAWMGMLTRAVWFCHENFVLHRDIKPNNLLIAADGEVKLADFGLARSFADPYRPMTSNVITRWYRPPELLFGAQHYSGAVDVWSVGLVLAELALRTAYLPGNTEIDQINLICQAIGTPTEENWPGVTKLPGFMAQEQVVPLRGKDHYLQLFPTLGNVGIDFLMKTLVLDPNKRITAREMLQHEWWQKEPRPTRKDKLPKEDRSKVGAAKLGEDLTRRPGMVDEDRGSKVARKLDFGGAK

SEQ ID NO: 14345 - DNA, 2702 bp, Muscodor strobelii
  misc_feature: SGI EST ID NO. CUFF.34270.1
  misc_feature: Variant of the nucleotide sequence at SEQ ID NO 14343
atcatcgtccaactgccgctgatcttgacagcggtagcccatcttctttgcgcacactttctggtgctcggaagtcggaagtgccttgcttggccgagttctccagaagctggaggagtccttctgagaaacaggacgccataatttgccccaagtacgcacccggtatgcacccgtgagtgcaatatccacaacttcaccatggcggtctctcccatggttttgtatccgtcggagcctgttcagaacattcacgcgaccacttcacctctcaagaatgttgcctctgcagaagcctcatctggcgggacaccacttgccagtctggctgtccccaatgctattgccgtaaatgaggaacttctcgatgccgctgagagagagaatctgagggagaagaacaagtattacaaagacaagaaacttggcgaaggtacatatgccaatgtgtacctcggtcatctcaaggcggacaagtcgcagcaagtagccatcaagaaaatcaaggtccaaaaggaatttaaggagggcatggctcctgatgccgtacgagagatcaaatttcttcaagaactctcacatcctaatatcatcactctgcactcggtgttctcctccaaaaaccagaacctgaacttagttcttgagtacctaccaggcggtgacctggagatgctcatccataatactaaggacgttccgtacggcgtggcagatatcaaggcctggatgggcatgttgaccagagccgtgtggttttgccacgagaacttcgtcctccaccgtgatatcaagcccaacaacttgttgattgctgccgacggagaagtgaagcttgccgatttcggtctcgcacgaagctttgcagacccctacaggcctatgacgtccaatgtcatcacgcgctggtatcgacctcccgagcttctctttggagctcagcattactccggcgccgttgatgtatggtctgttggactggtgctggccgaactcgccctgcgaacagcatatctgccaggaaatacagagattgaccagatcaacctcatctgtcaggcgatagggaccccaacagaggagaattggcccggagtgaccaagttgcctggcttcatggctcaagagcaggttgtgcctttgcgaggaaaggatcactatctgcaactgtttcccaccttgggaaacgtcggtatcgactttctcatgaagacacttgtgcttgaccccaacaagcgaatcacggcacgcgagatgttgcagcacgaatggtggcagaaagaacctcggcctacacgcaaggataagctgcccaaggaggacaggagcaaggttggagcagcaaagcttggtgaggatctcacgagacgccccggcatggtggatgaggaccgaggtagcaaggtggcgagaaaactagacttcggcggtgccaaatagacatgatacaggcgcagggaaagacactttgattgcatagggtatggcgtcaacggagttttacgagaaggacgggacaaaaggatgaggccttgattgtttgactcacttggcctttcagtgtggacaagtgttgctactttatacagagatctgatttgatcttgatgttcttacaaaatctgccaatatgggtacaccttgatacatgtgacatgtgttccgtggactcaacactatcataactcgcctctctcacgagcctcgcgacgctcagccacgcgcttcaagtatcgaatctctgtccgtctccgttcaccgccatcaatcttgcggccacggacatcctcccacataccctcggtgacagtgacttgggccccatcaccgcccttcacgggcagggcataaggaccaacgattgccttggcaccctcaacgtgaaatccctggacgcgtgatatctcctccataccacattccttcagcgtgcggccattgggcacattcacgaccactttgcgtggcgtctccttgatgtcttttccgagggcctctggatcggtctcgagaacgcgtaagtcggcaacaccatcggtgacgtgtgtgagatcgccgccgatgccgtatttgccctctcggaagcgctgccgccagcgaaggagatacttccgggcgcgagggggctcgatgcctagctcgcgcatctgctccgaggtgagggtgaagagggtctcccagtctgggatcttggatgcatgggtcgagaggccgcggccgatgacggtgaggaacgttgggacatcgggtacgaagggcgttggctcggggatttgagagggtttggaggttgcagttgatgatgtggcccttatggatgtctgtatcgttggtcggaatgtgctagcggagaggtgtgcgtgttgtaaaatggagagtgcactgcgcagattatgcgggcgaataattggctatccagtgatgcattattagctgacggttcatctttcctttgtctgcttcgacgtggttcgagatcaagacgtgtatcaggaagaggtttcattggagttagaatacctttaagctggccatgatgggcgttgtgttgatgaaatgctgctcattcgactgagctatatatgcatcatgggagcgtgcgccttgtagaagcgggaggacggtatcacaaggtttggtatcgtcacgagtgttgtcgtcgatgaaccaaaaaagttcaatggagttgcgccaggagatcg

SEQ ID NO: 14346 - DNA, 1341 bp, Muscodor strobelii
  misc_feature: SGI cDNA ID NO. 564725
  misc_feature: Encodes the peptide sequence at SEQ ID NO 14347
atggtccagtctattgctgataaggcacagggagtctggctttgggttcaccttgtcgtccgagatttattacgagacatcagggacaacgaaccctatgatgttttgcaagcgcgactgaactcatatccgccagagctgaatgccttctttgagaagatatttctccgtatcgacccccttcacagaccagagacagctcagcttttcgtcctggcaacagcagcacgagctcccatgtcaattctagcactccctcttctcgagaaacggaacaacagcaaatcctcttttgaaataaagcttgagttatttaaggaagagaaattcgagaatttattccgatactggcatcccagattgcagaaccgctgtagagacctaatgaagctcacgaaggatgacaaagcagagctgtggcggcgctaccaagttgaatttctgcaccgaacagttcgagactttttacaagaccatttcatgatgtctctccgggcaaacctgccggacagcttccacgaatgggaatttttgagcgaattgatattagtaggcatgagaccgtatcaaagcattgtcgaccgtggtcgatccgacgcggtcggggaccgcgacaccaaggagaagatcgacgaattgctctactacttacggaaaattgaagagacggtggtaatggaggacgcaatagagctggtaagtggatttatggaggatttagaagccagtaggggtcctgcatgtaccactcgctgggtagaaagaatctaccatctctcagcgcctgcagattacctgtccgtagctgcagcaggtggacttacaaatttcattcttgaaatagtcaagagagaccctagtctactgcagaacccccagagtctcattttttactatgctctattacctgggtcgattttcgaagaggacctactcatccactccagtgcagcttcgtcgaaagcctggactaatctgatcgagggtttgttgaaccttggagccgatccgaatgggtcagtgtcagacaacaatttgaggagagatcggacagtttactggagcagatttgttactgaatgcttacgattctggaatcaggctgatgagcatttcgaggtcgctgctgtccagattatggagactatgctccgtcatggcgcatcgctgaagattctttataagggtaacgaaaccggactctttgaccttcttcagcggaagttagatcccccgcaggttgaacgtctcagagcggcggcgattccaccacctagcaagtcagccatctcaactatcttgcagttcatgcgtccaagatggacagttcaaggggtttag

SEQ ID NO: 14347 - protein, 446 aa, Muscodor strobelii
  misc_feature: SGI Peptide ID NO. 564725
  misc_feature (1)..(379): NCBI GI: 255956529 Blast Desc: Pc21g20270 [Penicillium chrysogenum Wisconsin 54-1255] gi|211590728|emb|CAP96924.1| Pc21g20270 [Penicillium chrysogenum Wisconsin 54-1255]
  misc_feature (1)..(401): NCBI GI: 256730066 Blast Desc: NECHADRAFT_82694 [Nectria haematococca mpVI 77-13-4]
  misc_feature (1)..(341): NCBI GI: 169605571 Blast Desc: SNOG_05810 [Phaeosphaeria nodorum SN15] gi|160706792|gb|EAT86874.2| SNOG_05810 [Phaeosphaeria nodorum SN15]
  misc_feature (5)..(417): NCBI GI: 256728066 Blast Desc: NECHADRAFT_83494 [Nectria haematococca mpVI 77-13-4]
  misc_feature (4)..(395): NCBI GI: 46111055 Blast Desc: FG02409.1 [Gibberella zeae PH-1]
  misc_feature (5)..(392): NCBI GI: 256725326 Blast Desc: NECHADRAFT_83092 [Nectria haematococca mpVI 77-13-4]
  misc_feature (1)..(156): NCBI GI: 156048628 Blast Desc: SS1G_09046 [Sclerotinia sclerotiorum 1980] gi|154693442|gb|EDN93180.1| SS1G_09046 [Sclerotinia sclerotiorum 1980]
  misc_feature (1)..(435): NCBI GI: 225684243 Blast Desc: conserved [Paracoccidioides brasiliensis Pb03]
  misc_feature (1)..(157): NCBI GI: 226293863 Blast Desc: conserved [Paracoccidioides brasiliensis Pb18]
  misc_feature (1)..(158): NCBI GI: 212540446 Blast Desc: conserved [Penicillium marneffei ATCC 18224] gi|210067677|gb|EEA21769.1| conserved [Penicillium marneffei ATCC 18224]
MVQSIADKAQGVWLWVHLVVRDLLRDIRDNEPYDVLQARLNSYPPELNAFFEKIFLRIDPLHRPETAQLFVLATAARAPMSILALPLLEKRNNSKSSFEIKLELFKEEKFENLFRYWHPRLQNRCRDLMKLTKDDKAELWRRYQVEFLHRTVRDFLQDHFMMSLRANLPDSFHEWEFLSELILVGMRPYQSIVDRGRSDAVGDRDTKEKIDELLYYLRKIEETVVMEDAIELVSGFMEDLEASRGPACTTRWVERIYHLSAPADYLSVAAAGGLTNFILEIVKRDPSLLQNPQSLIFYYALLPGSIFEEDLLIHSSAASSKAWTNLIEGLLNLGADPNGSVSDNNLRRDRTVYWSRFVTECLRFWNQADEHFEVAAVQIMETMLRHGASLKILYKGNETGLFDLLQRKLDPPQVERLRAAAIPPPSKSAISTILQFMRPRWTVQGV

SEQ ID NO: 14348 - DNA, 616 bp, Muscodor strobelii
  misc_feature: SGI EST ID NO. CUFF.34140.0
  misc_feature: Variant of the nucleotide sequence at SEQ ID NO 14346
cgcaggttgaacgtctcagagcggcggcgattccaccacctagcaagtcagccatctcaactatcttgcagttcatgcgtccaagatggacagttcaaggggtttagcctcaaggagtgcttagtttctactttcgggcggaaaaggctgatcaatcggatgcccctttgctagagcgcaatgctttcctagtggcagccgcggaggctggaaggatgacgatggtgcgaagtgtgattgagcttggagattcgtggagtctacagcgaacataactaggcgtggtcttccgactccagtgccgcacttctgcttaaatagaacgagagaatcaagttcatccgggtgtgaagcaaacagacttggagttaatgtcgtcttttctaggcagccggtatattgacattacgattttcagatggagcgctcgagctggaagaattaccaccagaaaagatcgagacggtatcaatctgctgtgtctaggctaatcggagactaggcactaaaatgactgtgagatgagtgtatctccatggaattttcccaaggcgattgaacagttcaccccaatgaaaacaagagtgcacaacctctattcggcgtcccaatgatc

SEQ ID NO: 14349 - DNA, 2430 bp, Muscodor strobelii
  misc_feature: SGI cDNA ID NO. 564726
  misc_feature: Encodes the peptide sequence at SEQ ID NO 14350
atggaaggaagattgattaggatctggaggaataatcaagatcatgagaaccatgcgtccataatggctgccctttcacgccttgagcaacgagcgctcagcatacaagccgacggggcggcagacaagctcaaagcccttgaaacacagatgaataagcaatttcgcaatcttgagagtgagatcggccagcatcgtagcgaactaatgctagaattatctacgacccatgctgaacaaaaacgtgaggcggctcggatatcacagatccagcgtcatgtcaacatacttggtaatactgtcatggctgtagaaaggtatccaaaagagatcaacgccgcgttgagacactgccagatcctcgagagtcttgcattccaatccattcaatcaagatatagcagtatcgaaaacgcacactacgagactcttcactggatttatcataagtcaagaaccaactttactacgtggttagagcaaggtgaaggaatttattggatcgaaggactagctggtagcggaaagtcaacactcatgaaattcgtttccgaggactctcggacaagagatgccctctcacgatggtcgggagatcgtcgtctagtgctagccagtcattttttctggatatctggcaccgagatgcaaaagtcgcagatagggctttttcaaactttactcttcacgatcttccgctcttgcccggacatcctagacgatgtgcttcccttccatcgacctaatgtgccatgggagatctcggagttattgtcgactttcgaaaagctcagaaattttacaaattctaacacgaagttctgcttcttcatagacggattggatgagtacagtggagatgaggaacacatcataaagatcatccgacaattagcgtcgtctcctaacatcaagatctgtacttcgagtcgcccatggccggggttctacgctgaatggcacggctcaacgtactcattccttgtccaagactttacgcggccagatatggagcattacatcgagtcatgtttttctgaaaactccagattcaaatctctcgctttgagagacaagagatacatgacgatggtccagtctattgctgataaggcacagggagtctggctttgggttcaccttgtcgtccgagatttattacgagacatcagggacaacgaaccctatgatgttttgcaagcgcgactgaactcatatccgccagagctgaatgccttctttgagaagatatttctccgtatcgacccccttcacagaccagagacagctcagcttttcgtcctggcaacagcagcacgagctcccatgtcaattctagcactccctcttctcgagaaacggaacaacagcaaatcctcttttgaaataaagcttgagttatttaaggaagagaaattcgagaatttattccgatactggcatcccagattgcagaaccgctgtagagacctaatgaagctcacgaaggatgacaaagcagagctgtggcggcgctaccaagttgaatttctgcaccgaacagttcgagactttttacaagaccatttcatgatgtctctccgggcaaacctgccggacagcttccacgaatgggaatttttgagcgaattgatattagtaggcatgagaccgtatcaaagcattgtcgaccgtggtcgatccgacgcggtcggggaccgcgacaccaaggagaagatcgacgaattgctctactacttacggaaaattgaagagacggtggtaatggaggacgcaatagagctggtaagtggatttatggaggatttagaagccagtaggggtcctgcatgtaccactcgctgggtagaaagaatctaccatctctcagcgcctgcagattacctgtccgtagctgcagcaggtggacttacaaatttcattcttgaaatagtcaagagagaccctagtctactgcagaacccccagagtctcattttttactatgctctattacctgggtcgattttcgaagaggacctactcatccactccagtgcagcttcgtcgaaagcctggactaatctgatcgagggtttgttgaaccttggagccgatccgaatgggtcagtgtcagacaacaatttgaggagagatcggacagtttactggagcagatttgttactgaatgcttacgattctggaatcaggctgatgagcatttcgaggtcgctgctgtccagattatggagactatgctccgtcatggcgcatcgctgaagattctttataagggtaacgaaaccggactctttgaccttcttcagcggaagttagatcccccgcaggttgaacgtctcagagcggcggcgattccaccacctagcaagtcagccatctcaactatcttgcagttcatgcgtccaagatggacagttcaaggggtttag

SEQ ID NO: 14350 - protein, 809 aa, Muscodor strobelii
  misc_feature: SGI Peptide ID NO. 564726
  misc_feature (42)..(742): NCBI GI: 255956529 Blast Desc: Pc21g20270 [Penicillium chrysogenum Wisconsin 54-1255] gi|211590728|emb|CAP96924.1| Pc21g20270 [Penicillium chrysogenum Wisconsin 54-1255]
  misc_feature (80)..(764): NCBI GI: 256730066 Blast Desc: NECHADRAFT_82694 [Nectria haematococca mpVI 77-13-4]
  misc_feature (1)..(758): NCBI GI: 46111055 Blast Desc: FG02409.1 [Gibberella zeae PH-1]
  misc_feature (171)..(704): NCBI GI: 169605571 Blast Desc: SNOG_05810 [Phaeosphaeria nodorum SN15] gi|160706792|gb|EAT86874.2| SNOG_05810 [Phaeosphaeria nodorum SN15]
  misc_feature (90)..(780): NCBI GI: 256728066 Blast Desc: NECHADRAFT_83494 [Nectria haematococca mpVI 77-13-4]
  misc_feature (120)..(519): NCBI GI: 156048628 Blast Desc: SS1G_09046 [Sclerotinia sclerotiorum 1980] gi|154693442|gb|EDN93180.1| SS1G_09046 [Sclerotinia sclerotiorum 1980]
  misc_feature (119)..(701): NCBI GI: 261190024 Blast Desc: conserved [Ajellomyces dermatitidis SLH14081] gi|239591250|gb|EEQ73831.1| conserved [Ajellomyces dermatitidis SLH14081]
  misc_feature (120)..(493): NCBI GI: 169616506 Blast Desc: SNOG_11426 [Phaeosphaeria nodorum SN15] gi|160703200|gb|EAT81134.2| SNOG_11426 [Phaeosphaeria nodorum SN15]
  misc_feature (119)..(535): NCBI GI: 256725921 Blast Desc: NECHADRAFT_82115 [Nectria haematococca mpVI 77-13-4]
  misc_feature (119)..(520): NCBI GI: 226293863 Blast Desc: conserved [Paracoccidioides brasiliensis Pb18]
MEGRLIRIWRNNQDHENHASIMAALSRLEQRALSIQADGAADKLKALETQMNKQFRNLESEIGQHRSELMLELSTTHAEQKREAARISQIQRHVNILGNTVMAVERYPKEINAALRHCQILESLAFQSIQSRYSSIENAHYETLHWIYHKSRTNFTTWLEQGEGIYWIEGLAGSGKSTLMKFVSEDSRTRDALSRWSGDRRLVLASHFFWISGTEMQKSQIGLFQTLLFTIFRSCPDILDDVLPFHRPNVPWEISELLSTFEKLRNFTNSNTKFCFFIDGLDEYSGDEEHIIKIIRQLASSPNIKICTSSRPWPGFYAEWHGSTYSFLVQDFTRPDMEHYIESCFSENSRFKSLALRDKRYMTMVQSIADKAQGVWLWVHLVVRDLLRDIRDNEPYDVLQARLNSYPPELNAFFEKIFLRIDPLHRPETAQLFVLATAARAPMSILALPLLEKRNNSKSSFEIKLELFKEEKFENLFRYWHPRLQNRCRDLMKLTKDDKAELWRRYQVEFLHRTVRDFLQDHFMMSLRANLPDSFHEWEFLSELILVGMRPYQSIVDRGRSDAVGDRDTKEKIDELLYYLRKIEETVVMEDAIELVSGFMEDLEASRGPACTTRWVERIYHLSAPADYLSVAAAGGLTNFILEIVKRDPSLLQNPQSLIFYYALLPGSIFEEDLLIHSSAASSKAWTNLIEGLLNLGADPNGSVSDNNLRRDRTVYWSRFVTECLRFWNQADEHFEVAAVQIMETMLRHGASLKILYKGNETGLFDLLQRKLDPPQVERLRAAAIPPPSKSAISTILQFMRPRWTVQGV

SEQ ID NO: 14351 - DNA, 157 bp, Muscodor strobelii
  misc_feature: SGI EST ID NO. CUFF.34144.0
  misc_feature: Variant of the nucleotide sequence at SEQ ID NO 14349
tcgaaggactagctggtagcggaaagtcaacactcatgaaattcgtttccgaggactctcggacaagagatgccctctcacgatggtcgggagatcgtcgtctagtgctagccagtcattttttctggatatctggcaccgagatgcaaaagtcgca

SEQ ID NO: 14352 - DNA, 504 bp, Muscodor strobelii
  misc_feature: SGI cDNA ID NO. 564727
  misc_feature: Encodes the peptide sequence at SEQ ID NO 14353
atggtctacttttcgaagctactcatagttgccaccacaactcttggggttgcgagcgcgcaaactatcgacaatggctgccctgcgaatgagaccttggtgaacaacaacaaatgctgccccggttatatcaccagtggaccggataacgttagcggaaactactgctgcgtgctgaagaacggcaacaacatcgatatttctgatattcctcccaaatccgagtgtctcggtctcatcaataccgacgattcgaacttcgatcaagaagtctccgacgcccaatctggttctggctctagctctagctctggtatgccatcctcctctgtgtcgactccatcaccttcctctacaacgggtggcactacaccaacagcttcgacttcaaacggctctgacacgccgacaggcaccagtgcagcttctggcgctggggcttccatctcgggtatgagcattgcgctcttggctattggatctggagcgtggctgggactgtaa

SEQ ID NO: 14353 - protein, 167 aa, Muscodor strobelii
  misc_feature: SGI Peptide ID NO. 564727
MVYFSKLLIVATTTLGVASAQTIDNGCPANETLVNNNKCCPGYITSGPDNVSGNYCCVLKNGNNIDISDIPPKSECLGLINTDDSNFDQEVSDAQSGSGSSSSSGMPSSSVSTPSPSSTTGGTTPTASTSNGSDTPTGTSAASGAGASISGMSIALLAIGSGAWLGL

SEQ ID NO: 14354 - DNA, 1959 bp, Muscodor strobelii
  misc_feature: SGI cDNA ID NO. 564728
  misc_feature: Encodes the peptide sequence at SEQ ID NO 14355
atggagcgtatcatgggtcaactcgaggaacaagcaaatcgtgccaagcaaatattatcttggataacttgtgcggaaagaccattgaacaaaggtgaactccaacatgctctcgctgtggaggtagatgaattagaatttgatagcgacaacattccagtgatagaagacgtcatttctctatgctctgggttggttacaaccgatgaagagagtagtgtcgtccgattagttcactatacgacgcaagagtacttcgaacggaaccaagggaaatggttcccaaacgcacagcagcaaatggctaatacatgtaccacttatctttcgtatggaaattttatgaagggatacgccctttctgatcaagagttcaagaatcggctcaaatcgtacccgttttacaactacgctgcacgaaactgggccagccatcaccttcaagcgccagacgagcagcgaactctttcatttcttcgaaaacgcggccatgttgaagcagcagcccaagtagattggcttgattatgcaaattatgacattgtccaaaattggcacattagcaactatagccaacgtgttccaaagcaaatctctggtttgcacatggcggtccactatcgtctgatcaagattgtgccagccctcctcaagcattacgacgtgaatattagccacggtgccggtggaaccccactgcttttggcggtaaaggaaggcagcgaagacatggtcaggttgctgctcgccactgaagggatcgacgtcaatgcagaagattgcgatggctgtaagccttttagcgaggcaatcgagaaagaaaacgcgactatcgctaaactacttctcaataccaacaaagtggactttaactcaaaaaacaagcatggcgtgagtgccttgatgcatatcgtcgtctgtaaaggcaatgacgtcgcacttgagtttttgcccgcggtcctcgcaaccgaaggaattgatcttgatgtgaaaagtactcgtgggcagacggcgctattcttggctgcaacttacgggcacgagaaagcagtacagttattacttcatactggaaagtttgatttaaatatcgtggatgacaagcgcgatacgctacttctgacagctgtacgatggaacaataatgctgtacttaagctgctggttgcaactaagacgatcgacgtaaataggaaagatactgaaggtaaaacaccactgctttgggcggcggaatccgatgccattgagaaagtttggacgctactttctaccagcgggatcgatccaaatagtaaggataggcacggcgaaacaccacttcttctggctgtgcagaatcagaacgaggcaatggtcaagttactgctaagcgcaaaaggaatcaatacgaagattcgcaacaaccagggcgacacaccattgttgttggcgcatacgcttgggaacgtatcagtagccagactactacttaatgcacataggagtgtgctaattgtccgggagaagaatgatactttgccaccgttaagaattgcaggccgtgacgggatagcctttttttgtgcagcacaatgtggtgacaaggccacattcgagttgttatgcaacattgaaggtatcaatccgaacctgacagatacacacggccgaacagcactatcatgggcagcagggaacggacacaaggctatcgtcaaactattacttaatatcgccggcgttgatccaaatatggcagatgcgcaaggaaagacgccgttgtcgtgggcagtggagcgcggccacgagagcgtggtcaggattttactagatagagccgaccttgacatcagcgataaaggacttactgcacttggttatgcaatattgttgtccatcggatttttatggacttggaagactattctcgcaggacttggattgagcagacagcctcttcagtcttcttccatttaa

SEQ ID NO: 14355 - protein, 652 aa, Muscodor strobelii
  misc_feature: SGI Peptide ID NO. 564728
  misc_feature (549)..(582): Pfam Id: PF00023 Pfam Desc: Ankyrin repeat
  misc_feature (583)..(614): Pfam Id: PF00023 Pfam Desc: Ankyrin repeat
  misc_feature (436)..(469): Pfam Id: PF00023 Pfam Desc: Ankyrin repeat
  misc_feature (228)..(261): Pfam Id: PF00023 Pfam Desc: Ankyrin repeat
  misc_feature (334)..(367): Pfam Id: PF00023 Pfam Desc: Ankyrin repeat
  misc_feature (402)..(435): Pfam Id: PF00023 Pfam Desc: Ankyrin repeat
  misc_feature (1)..(613): NCBI GI: 242821429 Blast Desc: ankyrin repeat-containing protein, [Talaromyces stipitatus ATCC 10500] gi|218712600|gb|EED12025.1| ankyrin repeat-containing protein, [Talaromyces stipitatus ATCC 10500]
  misc_feature (1)..(622): NCBI GI: 154313093 Blast Desc: BC1G_05548 [Botryotinia fuckeliana B05.10] gi|150849633|gb|EDN24826.1| BC1G_05548 [Botryotinia fuckeliana B05.10]
  misc_feature (3)..(607): NCBI GI: 238500846 Blast Desc: Pfs, NACHT and Ankyrin domain protein [Aspergillus flavus NRRL3357] gi|220691894|gb|EED48241.1| Pfs, NACHT and Ankyrin domain protein [Aspergillus flavus NRRL3357]
  misc_feature (3)..(607): NCBI GI: 169782465 Blast Desc: [Aspergillus oryzae RIB40] gi|83774438|dbj|BAE64562.1| protein product [Aspergillus oryzae]
  misc_feature (1)..(490): NCBI GI: 212541358 Blast Desc: serine/threonine-protein kinase ripk4, [Penicillium marneffei ATCC 18224] gi|210068133|gb|EEA22225.1| serine/threonine-protein kinase ripk4, [Penicillium marneffei
  misc_feature (1)..(623): NCBI GI: 238508580 Blast Desc: Pfs, NACHT and Ankyrin domain protein [Aspergillus flavus NRRL3357] gi|220688371|gb|EED44724.1| Pfs, NACHT and Ankyrin domain protein [Aspergillus flavus NRRL3357]
  misc_feature (1)..(613): NCBI GI: 212528994 Blast Desc: Pfs, NACHT and Ankyrin domain protein [Penicillium marneffei ATCC 18224] gi|210074052|gb|EEA28139.1| Pfs, NACHT and Ankyrin domain protein [Penicillium marneffei ATCC 18224]
  misc_feature (1)..(603): NCBI GI: 255939916 Blast Desc: Pc16g03680 [Penicillium chrysogenum Wisconsin 54-1255] gi|211585350|emb|CAP93038.1| Pc16g03680 [Penicillium chrysogenum Wisconsin 54-1255]
  misc_feature (1)..(424): NCBI GI: 256720461 Blast Desc: NECHADRAFT_55600 [Nectria haematococca mpVI 77-13-4]
  misc_feature (1)..(605): NCBI GI: 145251379 Blast Desc: An15g06750 [Aspergillus niger] gi|134082735|emb|CAK42627.1| protein product [Aspergillus niger]
  misc_feature (175)..(603): SWISSPROT Homolog: EC 2.7.11.1 Non-specific serine/threonine protein kinase
MERIMGQLEEQANRAKQILSWITCAERPLNKGELQHALAVEVDELEFDSDNIPVIEDVISLCSGLVTTDEESSVVRLVHYTTQEYFERNQGKWFPNAQQQMANTCTTYLSYGNFMKGYALSDQEFKNRLKSYPFYNYAARNWASHHLQAPDEQRTLSFLRKRGHVEAAAQVDWLDYANYDIVQNWHISNYSQRVPKQISGLHMAVHYRLIKIVPALLKHYDVNISHGAGGTPLLLAVKEGSEDMVRLLLATEGIDVNAEDCDGCKPFSEAIEKENATIAKLLLNTNKVDFNSKNKHGVSALMHIVVCKGNDVALEFLPAVLATEGIDLDVKSTRGQTALFLAATYGHEKAVQLLLHTGKFDLNIVDDKRDTLLLTAVRWNNNAVLKLLVATKTIDVNRKDTEGKTPLLWAAESDAIEKVWTLLSTSGIDPNSKDRHGETPLLLAVQNQNEAMVKLLLSAKGINTKIRNNQGDTPLLLAHTLGNVSVARLLLNAHRSVLIVREKNDTLPPLRIAGRDGIAFFCAAQCGDKATFELLCNIEGINPNLTDTHGRTALSWAAGNGHKAIVKLLLNIAGVDPNMADAQGKTPLSWAVERGHESVVRILLDRADLDISDKGLTALGYAILLSIGFLWTWKTILAGLGLSRQPLQSSSI

SEQ ID NO: 14356 - DNA, 1944 bp, Muscodor strobelii
  misc_feature: SGI cDNA ID NO. 564729
  misc_feature: Encodes the peptide sequence at SEQ ID NO 14357
atgaggctcagcgtcaaatacggcgcatggaacgtatccgaaacatattcctatttctttgataagcttgaaatgacggaacggtctcgaacccgcgatgactatacggtgggttgggtatgcgcccttccaaaagaacagacagcagctgttgcgatgctagatcagaggcatgatccttgtcccaagctagaacgagatcagaacacatacacgctaggatcaatcggtagccataatgtcgtgatcgcttgtctgccgaaagggaagactggcaccgtctccgcagcaacagtggctacgcaaatgatcaattcatttcctgcaatcaaatttggcctaatggtcggaataggaggaggtgtaccgccaaaagtgaggctaggtgatgttgttgttggcataccactaggacagtaccctggtgtagttcagtgggatcttgggaaggaagagaaagggaacgtcttcaaaagaaccggctgcttgaacaagccaccagatctattactcacggctgtgacaatgctggaaacaaacaatgaattgatggggtctaaaatactagattatgtggaagaaatggtgaccaagtaccctcttctggcatctaaataccaacggtctgagctcctacaagatatactgttcaaggcggactacgatcattgttcacttgtacctagcttgcattcgttgcgaatcgaaacacatgaaggggaagagcaagggagagaggcggagattgatgaggaagagaactgtcggttttgcgaccaacgccagatcattcgacgaaaggcccgagaaatgcgagtgcattatggtttgattgcttccggcaattgcgttattaaaaacgccaggcttcgggatcaaattcgaagagattttgaagatcacctgctttgcattgagatggaagcagctggcctggttgataactttccgtgtattgtgattcgcggcatttgcgattattcagattcccataagaacaaagcatggcaggaaaacgcggctgctgttgctgcggcatatgctaaagagcttctgggatatgtccagccaggtgaaattgatcggcaaagggcagtcagagacatgatggaagaagcttcctatactatgtcggttattcgagacgatatagcgtatgctaagagctatattcatcagaaaagtgaacttgacatactcgaatggcttgtgccaaccgattatggtcttcaacagaccgactacatcaaaaagagagagctgggaactggccaatggctacttgactcgaaagagtttcatgactggaaaaatgagtctaatgagacactgttcctcacgggaattccaggaggaggaaaaacgattttgacgtccatggttgttgagcatctcgaaaatgagtcatcagatacaccaaataccgtagtcgcctatgtttactgcagctatatgcgcaaaagcgaacaaacaccagaacacctcttgtcaagtctgttgaaacagatatctttaaaccagggatccttgtcacacgacgtgcaaaatctttacagaaaacacaataccaagcggactcggccacttctagttgaaatcttaagcacgcttgaatctgttgctatgcgcagccatagagtattcatcattgtggacgcacttgatgaatgccaagcgtctggcggtggtcgcacgacatttttatcagcaatcttcgcgctacagagaaggactggagcgaatatcctagcaacttccagaatgataccagaaattgaagaccatttcaagcaatgtgtatctttagagatacgcgcaactgagacagacgttctcaagtatttgcggggtcgcatctctgagcttccgaaatgcgttcggaaccgacgagatctccaagatgagatcatatcaagtataacacacgccgcgaagggcatgtaa

SEQ ID NO: 14357 - protein, 647 aa, Muscodor strobelii
  misc_feature: SGI Peptide ID NO. 564729
  misc_feature (24)..(647): NCBI GI: 46139821 Blast Desc: FG11425.1 [Gibberella zeae PH-1]
  misc_feature (25)..(647): NCBI GI: 225557065 Blast Desc: ankyrin repeat protein [Ajellomyces capsulatus G186AR]
  misc_feature (30)..(647): NCBI GI: 171693393 Blast Desc: protein product [Podospora anserina] gi|170946645|emb|CAP73448.1| protein product [Podospora anserina]
  misc_feature (25)..(647): NCBI GI: 212541358 Blast Desc: serine/threonine-protein kinase ripk4, [Penicillium marneffei ATCC 18224] gi|210068133|gb|EEA22225.1| serine/threonine-protein kinase ripk4, [Penicillium marneffei
  misc_feature (24)..(647): NCBI GI: 154285314 Blast Desc: conserved [Ajellomyces capsulatus NAm1] gi|150407093|gb|EDN02634.1| conserved [Ajellomyces capsulatus NAm1]
  misc_feature (28)..(619): NCBI GI: 238491078 Blast Desc: ankyrin repeat-containing protein, [Aspergillus flavus NRRL3357] gi|220697189|gb|EED53530.1| ankyrin repeat-containing protein, [Aspergillus flavus NRRL3357]
  misc_feature (28)..(619): NCBI GI: 169773129 Blast Desc: [Aspergillus oryzae RIB40] gi|83768894|dbj|BAE59031.1| protein product [Aspergillus oryzae]
  misc_feature (31)..(647): NCBI GI: 115390338 Blast Desc: conserved [Aspergillus terreus NIH2624] gi|114195070|gb|EAU36770.1| conserved [Aspergillus terreus NIH2624]
  misc_feature (30)..(517): NCBI GI: 116197170 Blast Desc: CHGG_05183 [Chaetomium globosum CBS 148.51] gi|88181096|gb|EAQ88564.1| CHGG_05183 [Chaetomium globosum CBS 148.51]
  misc_feature (35)..(647): NCBI GI: 212528994 Blast Desc: Pfs, NACHT and Ankyrin domain protein [Penicillium marneffei ATCC 18224] gi|210074052|gb|EEA28139.1| Pfs, NACHT and Ankyrin domain protein [Penicillium marneffei ATCC 18224]
MRLSVKYGAWNVSETYSYFFDKLEMTERSRTRDDYTVGWVCALPKEQTAAVAMLDQRHDPCPKLERDQNTYTLGSIGSHNVVIACLPKGKTGTVSAATVATQMINSFPAIKFGLMVGIGGGVPPKVRLGDVVVGIPLGQYPGVVQWDLGKEEKGNVFKRTGCLNKPPDLLLTAVTMLETNNELMGSKILDYVEEMVTKYPLLASKYQRSELLQDILFKADYDHCSLVPSLHSLRIETHEGEEQGREAEIDEEENCRFCDQRQIIRRKAREMRVHYGLIASGNCVIKNARLRDQIRRDFEDHLLCIEMEAAGLVDNFPCIVIRGICDYSDSHKNKAWQENAAAVAAAYAKELLGYVQPGEIDRQRAVRDMMEEASYTMSVIRDDIAYAKSYIHQKSELDILEWLVPTDYGLQQTDYIKKRELGTGQWLLDSKEFHDWKNESNETLFLTGIPGGGKTILTSMVVEHLENESSDTPNTVVAYVYCSYMRKSEQTPEHLLSSLLKQISLNQGSLSHDVQNLYRKHNTKRTRPLLVEILSTLESVAMRSHRVFIIVDALDECQASGGGRTTFLSAIFALQRRTGANILATSRMIPEIEDHFKQCVSLEIRATETDVLKYLRGRISELPKCVRNRRDLQDEIISSITHAAKGM

SEQ ID NO: 14358 - DNA, 2304 bp, Muscodor strobelii
  misc_feature: SGI cDNA ID NO. 564730
  misc_feature: Encodes the peptide sequence at SEQ ID NO 14359
atgcagcagacagggaccgtggtccagcgaaaccatgctgcgaaccccacggataagccagccaatggcgcccgcggcggagggaaacagctgctccatgacgacactcaccaccaccaacaccagcccgcagtgcattcgggacgtcttgtctacgccaaacctgaggacctcccgagctttccatccgtcgggctgaatgccaaagcttccgccgccagtgctgctgcatcgttaggctgggccatgaagtcccccgatccgatctggagacaggaaaaatcaccctcggcctccaccgctgccatcatggccgccgaatataaatcgcagcctgcttgggagcccaaagccagcagtcacggcgcaaaggctgctctcttggcgtcggcatcgcaacccacccgaagcagcgagtcgctgaaaccatcctcgtccggccatgagatgtcggctgcgacccaagcattccagtcgcaccgagctgcatctcaacatgcccaggtcgaaacactagaacgccagaagtcattacttgctgctcagggcgcagtggcccgacgtcatcgtgctgactctgctcccgctcctcgagaatcgtatcctgacgaagcaaatgccgccgccaacgccttgagcgccgccactcgagcgcatcgtcccactccttcgcctccatccatcgaacataccggcgctgtgccttttacaaccatgaatagactaatgttcacctcccatcctcctgtcaagcccgaaaccgacgaacaaaagaggaacgacgtccttcgcgcatctgctgttgccatggctcagaagatgtatgcccagcagcaaaagatgatcgagaccaaaaagaatcatatgcaaaatactacctcgagtgacaattttgatgtatcgagcagtgtcagtgatgatgcgcagtcagcccagctgacgacactgcaagacgcagcttataaacaggcccaagctcgtcttgcaaaaatggaggaggaaaatgctaaaaaccgggacctacgagcctactatggaacgaagcccgtagaatcacggaagctgttgtcaatgggaaggcttagaaggcgatcttcaagtgacggagctgtgatagaagatcgcaagagatcgcagcaaataagggaccagacatccatgcttagaagcaatctgtcgaaggtcgacgaacagaaacgttcccacgatcaagaaatgctacttgcagctgctcagcgaaatgtgaacaaaaccatacagggaattgatgagaaggttgccaaagatactggcatggttcctccgtcaaatttgacacagtggcaactcaaagcacatgccgcagcccgccaccgagttgaacaatctgcaagtacacaagaaggcaaagttgacattggagggcgatacatggaccaagaagagatcaacgccatcgcagcccgaagagtacagcctgtgctggacgagatcaacgagaaagccgaaaaggagcacgcacgacagacggaaattcgtcttgatatggagcgcaagaaagaacagcaggagctcgaaaaggctcgacagaaagaaatccacgatgctgagaagaaaatcaagcagcaagagaaacaggagcagaaagaaaagaagacagaagagaagcaagaagcaaaagccaagaaagaagaagagaaggctgcgaaggctgaacaaaaacgtctcgcgcgagtagagaaagtgcagacaacagagcagcatgaccaagcagttcaggaagaacccgaaacccaagagcgtacggtgcagttgaatactagtggacagcccgtcagcgttccgcgttccagcactcataacgctgtcttgacgagtccgcctaagtcgccggaagaagaaccgaagtccactctcggagacaagtcgccgggccgagtgagaacctggattaaatcacggttttcgcgagggtccaagtcaccagatgacgatggaaagggtaaattgacccgaagaggatttatcggtggcgcctctcttacgggtatggacaacgagagttctgccagtctcgacggtcggagtgtacgagctgtcgcaatggcaggcagacagcgctcagcctcggagaacctacctcaacgcagaggcgaccccgaagcagtctcacccttgagtagtgagagtgaggacgagtatttccacgatgaagctcgggatcaattgacgactgagttatctcccccgcggccccttcgggatttttcgccggctaagagccatagtccgactagggattcgcggtttcatgagatcatatga

SEQ ID NO: 14359 - protein, 767 aa, Muscodor strobelii
  misc_feature: SGI Peptide ID NO. 564730
  misc_feature (43)..(767): NCBI GI: 256730903 Blast Desc: NECHADRAFT_101540 [Nectria haematococca mpVI 77-13-4]
  misc_feature (44)..(767): NCBI GI: 46126097 Blast Desc: FG07426.1 [Gibberella zeae PH-1]
  misc_feature (46)..(746): NCBI GI: 171692871 Blast Desc: protein product [Podospora anserina] gi|170946384|emb|CAP73185.1| protein product [Podospora anserina]
  misc_feature (50)..(767): NCBI GI: 156054420 Blast Desc: SS1G_06058 [Sclerotinia sclerotiorum 1980] gi|154703838|gb|EDO03577.1| SS1G_06058 [Sclerotinia sclerotiorum 1980]
  misc_feature (35)..(767): NCBI GI: 261355646 Blast Desc: conserved [Verticillium albo-atrum VaMs.102]
  misc_feature (43)..(697): NCBI GI: 164426793 Blast Desc: NCU03647 [Neurospora crassa OR74A] gi|157071480|gb|EAA32138.2| [Neurospora crassa OR74A]
  misc_feature (50)..(767): NCBI GI: 154321173 Blast Desc: BC1G_01461 [Botryotinia fuckeliana B05.10] gi|150851999|gb|EDN27191.1| BC1G_01461 [Botryotinia fuckeliana B05.10]
  misc_feature (46)..(698): NCBI GI: 116198117 Blast Desc: CHGG_07214 [Chaetomium globosum CBS 148.51] gi|88178493|gb|EAQ85961.1| CHGG_07214 [Chaetomium globosum CBS 148.51]
  misc_feature (56)..(697): NCBI GI: 11595546 Blast Desc: conserved [Neurospora crassa]
  misc_feature (47)..(698): NCBI GI: 145609275 Blast Desc: MGG_07476 [Magnaporthe grisea 70-15] gi|145016664|gb|EDK01094.1| MGG_07476 [Magnaporthe grisea 70-15]
MQQTGTVVQRNHAANPTDKPANGARGGGKQLLHDDTHHHQHQPAVHSGRLVYAKPEDLPSFPSVGLNAKASAASAAASLGWAMKSPDPIWRQEKSPSASTAAIMAAEYKSQPAWEPKASSHGAKAALLASASQPTRSSESLKPSSSGHEMSAATQAFQSHRAASQHAQVETLERQKSLLAAQGAVARRHRADSAPAPRESYPDEANAAANALSAATRAHRPTPSPPSIEHTGAVPFTTMNRLMFTSHPPVKPETDEQKRNDVLRASAVAMAQKMYAQQQKMIETKKNHMQNTTSSDNFDVSSSVSDDAQSAQLTTLQDAAYKQAQARLAKMEEENAKNRDLRAYYGTKPVESRKLLSMGRLRRRSSSDGAVIEDRKRSQQIRDQTSMLRSNLSKVDEQKRSHDQEMLLAAAQRNVNKTIQGIDEKVAKDTGMVPPSNLTQWQLKAHAAARHRVEQSASTQEGKVDIGGRYMDQEEINAIAARRVQPVLDEINEKAEKEHARQTEIRLDMERKKEQQELEKARQKEIHDAEKKIKQQEKQEQKEKKTEEKQEAKAKKEEEKAAKAEQKRLARVEKVQTTEQHDQAVQEEPETQERTVQLNTSGQPVSVPRSSTHNAVLTSPPKSPEEEPKSTLGDKSPGRVRTWIKSRFSRGSKSPDDDGKGKLTRRGFIGGASLTGMDNESSASLDGRSVRAVAMAGRQRSASENLPQRRGDPEAVSPLSSESEDEYFHDEARDQLTTELSPPRPLRDFSPAKSHSPTRDSRFHEII

SEQ ID NO: 14360 - DNA, 3964 bp, Muscodor strobelii
  misc_feature: SGI EST ID NO. CUFF.34244.2
  misc_feature: Variant of the nucleotide sequence at SEQ ID NO 14358
gcgtgttgaaggcgggctagaggataactatcgttcgtgctaacctttttgtgctcttactgttacagtatgacttgtgctttcatcaacgtatcgtgaccctaacatgaatcccgatcccccaagacaaggagacagtaggctctccagctgctatacttctatccgcacgtccctgcatgcgcaagacttgacatcgtcatcatccttctacttaccacaaataccttgaagaacctctctgtctcactcccctctctctctttgtatctagtatgttgtgacccaacagcagttcatcggcccatattgccgtatgcagacacagcctatccatgcattattagatttctacattcctctattaaggtatatttacacgcgagtatttgtctcccgtctgggatccctgtcttgactgtcaggcagctccaacaacccgggtcctgagaactccagcaacgccgatcgctgctgccgttccatataatcacagcgcagggacaaacccaatcagtatcaacatctctaaaaaagaggatatctgctgcatctgtttgagttacagttcaaagatgcagcagacagggaccgtggtccagcgaaaccatgctgcgaaccccacggataagccagccaatggcgcccgcggcggagggaaacagctgctccatgacgacactcaccaccaccaacaccagcccgcaggtaagctgattgttcgcagcccattggcacaatgcgacactgccgactgtcaagactcaacactgcctcgttcgcttcctctctttttttaagacaaaggccgtcgctaatgtctcactctcacataaccagtgcattcgggacgtcttgtctacgccaaacctgaggacctcccgagctttccatccgtcgggctgaatgccaaagcttccgccgccagtgctgctgcatcgttaggctgggccatgaagtcccccgatccgatctggagacaggaaaaatcaccctcggcctccaccgctgccatcatggccgccgaatataaatcgcagcctgcttgggagcccaaagccagcagtcacggcgcaaaggctgctctcttggcgtcggcatcgcaacccacccgaagcagcgagtcgctgaaaccatcctcgtccggccatgagatgtcggctgcgacccaagcattccagtcgcaccgagctgcatctcaacatgcccaggtcgaaacactagaacgccagaagtcattacttgctgctcagggcgcagtggcccgacgtcatcgtgctgactctgctcccgctcctcgagaatcgtatcctgacgaagcaaatgccgccgccaacgccttgagcgccgccactcgagcgcatcgtcccactccttcgcctccatccatcgaacataccggcgctgtgccttttacaaccatgaatagactaatgttcacctcccatcctcctgtcaagcccgaaaccgacgaacaaaagaggaacgacgtccttcgcgcatctgctgttgccatggctcagaagatgtatgcccagcagcaaaagatgatcgagaccaaaaagaatcatatgcaaaatactacctcgagtgacaattttgatgtatcgagcagtgtcagtgatgatgcgcagtcagcccagctgacgacactgcaagacgcagcttataaacaggcccaagctcgtcttgcaaaaatggaggaggaaaatgctaaaaaccgggacctacgagcctactatggaacgaagcccgtagaatcacggaagctgttgtcaatgggaaggcttagaaggcgatcttcaagtgacggagctgtgatagaagatcgcaagagatcgcagcaaataagggaccagacatccatgcttagaagcaatctgtcgaaggtcgacgaacagaaacgttcccacgatcaagaaatgctacttgcagctgctcagcgaaatgtgaacaaaaccatacagggaattgatgagaaggttgccaaagatactggcatggttcctccgtcaaatttgacacagtggcaactcaaagcacatgccgcagcccgccaccgagttgaacaatctgcaagtacacaagaaggcaaagttgacattggagggcgatacatggaccaagaagagatcaacgccatcgcagcccgaagagtacagcctgtgctggacgagatcaacgagaaagccgaaaaggagcacgcacgacagacggaaattcgtcttgatatggagcgcaagaaagaacagcaggagctcgaaaaggctcgacagaaagaaatccacgatgctgagaagaaaatcaagcagcaagagaaacaggagcagaaagaaaagaagacagaagagaagcaagaagcaaaagccaagaaagaagaagagaaggctgcgaaggctgaacaaaaacgtctcgcgcgagtagagaaagtgcagacaacagagcagcatgaccaagcagttcaggaagaacccgaaacccaagagcgtacggtgcagttgaatactagtggacagcccgtcagcgttccgcgttccagcactcataacgctgtcttgacgagtccgcctaagtcgccggaagaagaaccgaagtccactctcggagacaagtcgccgggccgagtgagaacctggattaaatcacggttttcgcgagggtccaagtcaccagatgacgatggaaagggtaaattgacccgaagaggatttatcggtggcgcctctcttacgggtatggacaacgagagttctgccagtctcgacggtcggagtgtacgagctgtcgcaatggcaggcagacagcgctcagcctcggagaacctacctcaacgcagaggcgaccccgaagcagtctcacccttgagtagtgagagtgaggacgagtatttccacgatgaagctcgggatcaattgacgactgagttatctcccccgcggccccttcgggatttttcgccggctaagagccatagtccgactagggattcgcggtttcatgagatcatatgagagacggatgacgagtttgcgtcttgagtaaacggatacatgagagttcgatacatgtcgcaggcatgttgtaatatggctgtatgagagagtccacactcaatgatgttaaggtgtccaggcgtggtacacgcgtttgcttgggctttcatggcgatgtaacaattataccccttttcacatcatttcgtcggacagggcggtgcacaagatttgcgaataacgttggtccgctaatttactccttaaattaaatgcgagctgggaatgatttgtgtgtttgtttgcatgtaattttgactgatcatcgctaatccggctgtaagtcgcgagtaatggtcttggccgaattgaagtgagtaatgtctggtggaggctctcttcagagcaatccgatcagacaaaagttttttggtaggcctaggaagcacttcctccatctgaagaaatgattgttgtttcaacccccaattcaaagcaatcttagatctatcattcctgagattgatattctgcacttgtattgggaaccgtcaggtggctcattgtccttggggctactgcatctccggccgacaactcgttagaccgcatgacacgtttctccaaaacgaatgtcgggtatgtgttgcgttttgattgagcctgtagatttgttgaaaatgttgtccggttgtgattctgctagatgttggttccgtacgtcgctaaggggtatttgcggacttttcttgtatgcactaggtctggctaaaaacagcggccgataatgcctaccatattcagacggagtgttgtccgcgaaatagtgaggatcattatcatgttacacttgcttgctctctaatatcttttgttatcatattcattctctgttgtaatcttatacatttctttcctttcgcacttgttcttaagtatccaatatccctcctgtgggctgcactcctgca

SEQ ID NO: 14361 - DNA, 897 bp, Muscodor strobelii
  misc_feature: SGI cDNA ID NO. 564731
  misc_feature: Encodes the peptide sequence at SEQ ID NO 14362
atgtctatcgaatttgaaaatatcttgaatctccgcgatgtagggaagactgtgaacgattatctcggaagaagacttgttcgtgaaggtgtgctgtaccgatcagcaagacccgatgatgcaacactcaatgaccggagccggctcatagatgagctgggcatcaagactgtgctagatctacgaactaaaaccgaacatctaaagcaagcagaaaagcgaaaagcagacctcaaagtcccagctgttctccaatccaacgccgcgctcgcagaacccgtcaagatcccaggcctctcgtaccgcgagatacgcgtcacgggctcacgtttcgagcgtgctatgctgaagcagctttcgtggtggaacctgataaaactgatatttctcttcataatcggccgacgcataagcgcgatccgcattatgagccgggaagtcatgttacccctcggactcgtcggtctaagtcttgtcacactcgatgaatctggaccagaaatcgcagagcccattaacaataccaaggctctacgaaccctcctttccacttcagccgccccttcacctacaccactcctggttcactgcacacaaggcaaagaccgcacagggatgatcgtcgccctgctccttctcacactctccgttccatccaccgcaataacccatgactacctcctctcgcagtctggtctcaaaccagagagagaaagtcggctcgctgaaatcgaggagattggtctcacggcagagtggggagactgtcctgaggaacttatacctagggtctgctcgcatattgacgtacggtatggtgggattgatggatatcttgatgcgattgggtttgggagtgaggagaggagaaggctggtagatgttttgggtgcttag

SEQ ID NO: 14362 - protein, 298 aa, Muscodor strobelii
  misc_feature: SGI Peptide ID NO. 564731
  misc_feature (5)..(296): NCBI GI: 46126099 Blast Desc: FG07427.1 [Gibberella zeae PH-1]
  misc_feature (2)..(296): NCBI GI: 256731276 Blast Desc: NECHADRAFT_48741 [Nectria haematococca mpVI 77-13-4]
  misc_feature (81)..(296): NCBI GI: 39972347 Blast Desc: MGG_07475 [Magnaporthe grisea 70-15] gi|145016663|gb|EDK01093.1| MGG_07475 [Magnaporthe grisea 70-15]
  misc_feature (4)..(293): NCBI GI: 156054418 Blast Desc: SS1G_06057 [Sclerotinia sclerotiorum 1980] gi|154703837|gb|EDO03576.1| SS1G_06057 [Sclerotinia sclerotiorum 1980]
  misc_feature (5)..(283): NCBI GI: 189205567 Blast Desc: conserved [Pyrenophora tritici-repentis Pt-1C-BFP] gi|187975211|gb|EDU41837.1| conserved [Pyrenophora tritici-repentis Pt-1C-BFP]
  misc_feature (5)..(289): NCBI GI: 119467952 Blast Desc: NFIA_052300 [Neosartorya fischeri NRRL 181] gi|119405934|gb|EAW15885.1| conserved [Neosartorya fischeri NRRL 181]
  misc_feature (5)..(283): NCBI GI: 242808938 Blast Desc: tyrosine/serine protein phosphatase, [Talaromyces stipitatus ATCC 10500] gi|218715890|gb|EED15312.1| tyrosine/serine protein phosphatase, [Talaromyces stipitatus ATCC
  misc_feature (5)..(289): NCBI GI: 121709928 Blast Desc: conserved [Aspergillus clavatus NRRL 1] gi|119400730|gb|EAW11154.1| conserved [Aspergillus clavatus NRRL 1]
  misc_feature (5)..(283): NCBI GI: 238488062 Blast Desc: tyrosine/serine protein phosphatase, [Aspergillus flavus NRRL3357] gi|220700148|gb|EED56487.1| tyrosine/serine protein phosphatase, [Aspergillus flavus NRRL3357]
  misc_feature (5)..(288): NCBI GI: 115400952 Blast Desc: [Aspergillus terreus NIH2624] gi|114190005|gb|EAU31705.1| [Aspergillus terreus NIH2624]
MSIEFENILNLRDVGKTVNDYLGRRLVREGVLYRSARPDDATLNDRSRLIDELGIKTVLDLRTKTEHLKQAEKRKADLKVPAVLQSNAALAEPVKIPGLSYREIRVTGSRFERAMLKQLSWWNLIKLIFLFIIGRRISAIRIMSREVMLPLGLVGLSLVTLDESGPEIAEPINNTKALRTLLSTSAAPSPTPLLVHCTQGKDRTGMIVALLLLTLSVPSTAITHDYLLSQSGLKPERESRLAEIEEIGLTAEWGDCPEELIPRVCSHIDVRYGGIDGYLDAIGFGSEERRRLVDVLGA

SEQ ID NO: 14363 - DNA, 1883 bp, Muscodor strobelii
  misc_feature: SGI EST ID NO. CUFF.34259.0
  misc_feature: Variant of the nucleotide sequence at SEQ ID NO 14361
tgatcataaacggtccgtatcacacaagtgccttcttcttccttgaatgtcggtttagttttaagatcgctatgtctatcgaatttgaaaatatcttgaatctccgcgatgtagggaagactgtgaacgattatctcggaagaagacttgttcgtgaaggtgtgctgtaccgatcagcaagacccgatgatgcaacactcaatgaccggagccggctcatagatgagctgggcatcaagactgtgctagatctacgaactaaaaccgaacatctaaagcaagcagaaaagcgaaaagcagacctcaaagtcccagctgttctccaatccaacgccgcgctcgcagaacccgtcaagatcccaggcctctcgtaccgcgagatacgcgtcacgggctcacgtttcgagcgtgctatgctgaagcagctttcgtggtggaacctgataaaactgatatttctcttcataatcggccgacgcataagcgcgatccgcattatgagccgggaagtcatgttacccctcggactcgtcggtctaagtcttgtcacactcgatgaatctggaccagaaatcgcagaggctctacgaaccctcctttccacttcagccgccccttcacctacaccactcctggttcactgcacacaaggcaaagaccgcacagggatgatcgtcgccctgctccttctcacactctccgttccatccaccgcaataacccatgactacctcctctcgcagtctggtctcaaaccagagagagaaagtcggctcgctgaaatcgaggagattggtctcacggcagagtggggagactgtcctgaggaacttatacctagggtctgctcgcatattgacgtacggtatggtgggattgatggatatcttgatgcgattgggtttgggagtgaggagaggagaaggctggtagatgttttgggtgcttaggggtggatttctatgagaggattggttatgaagttggtgagagccaatgtccatgatatataagagttatgatgatgaaccacggcaatacatagggaggcacatataacgagtcacgaaagcgtggtagaagcagtctatttctttctaaagcgaccttgcatccagcagcgatacatcttgatctttagtgctctattgaccagcatccgtctatcaacgcccaggtcttccacgtcaaatagcggtgtcctttctgtcttagaagcaacattttcatttgcatcattcttggactcggtgtccgggttcccgttccctacagcaacaaactctcctcgccatatttgcgcaagttcttctttgtcaaagaaatacacgcgcgtaccatctcccctgatatagaagttctcttccaggtaccggcccttcttgaaccggacctgtgccaaatcacctctaccgtagtcacggaagcagacttctccgcctggctttaggacacggtaaatattctgcacggccttttgccattgtaatggtgataaggccgagaagatgaagaccattaagacgacatctactgtggcttcaacaacatccggcggaagctcgtcactcgccacatcccacacgtcggcctgcatctgttcggtattgtactcagcatgttctcgcatgacctgcacagctttctttgaaaagtcacaagcatgtagcttcaacttggggttcttgttattggccaagataggaaaggcggtattgccggcgccggcaccgacctctagcaccaccttggggccagcgtcttcggctgtcaccttatccaatatggggaattcttgttgcaaccatttgcggttcttaaagaaattggcagtgttatttttgtagaaaagattccaccaccttgcaggatcggaattaaat

SEQ ID NO: 14364 - DNA, 1146 bp, Muscodor strobelii
  misc_feature: SGI cDNA ID NO. 564732
  misc_feature: Encodes the peptide sequence at SEQ ID NO 14365
atggccgacaccaccgctgccacggtcaatccggtgccttcgccagacatcgaactggcaaagcagacctccgccttgactgtgcaggagaccattcccgaggctggcactccaagccaagcagaagccggagctcagcacctgccgccgcacaggaaccatgacccgcaacacaacatgaagcggagtgatcccttcatgtttggctcgcgttacctcgaggagggcgacgatgtcttcgagttcaatgcttgggaccatgtggagactgacgatgcttacaaagagtactctgagcagcagtttgccaagcagcgtgcgtcgccagtctccgactttgataagaatagatttaattccgatcctgcaaggtggtggaatcttttctacaaaaataacactgccaatttctttaagaaccgcaaatggttgcaacaagaattccccatattggataaggtgacagccgaagacgctggccccaaggtggtgctagaggtcggtgccggcgccggcaataccgcctttcctatcttggccaataacaagaaccccaagttgaagctacatgcttgtgacttttcaaagaaagctgtgcaggtcatgcgagaacatgctgagtacaataccgaacagatgcaggccgacgtgtgggatgtggcgagtgacgagcttccgccggatgttgttgaagccacagtagatgtcgtcttaatggtcttcatcttctcggccttatcaccattacaatggcaaaaggccgtgcagaatatttaccgtgtcctaaagccaggcggagaagtctgcttccgtgactacggtagaggtgatttggcacaggtccggttcaagaagggccggtacctggaagagaacttctatatcaggggagatggtacgcgcgtgtatttctttgacaaagaagaacttgcgcaaatatggcgaggagagtttgttgctgtagggaacgggaacccggacaccgagtccaagaatgatgcaaatgaaaatgttgcttctaagacagaaaggacaccgctatttgacgtggaagacctgggcgttgatagacggatgctggtcaatagagcactaaagatcaagatgtatcgctgctggatgcaaggtcgctttagaaagaaatag

SEQ ID NO: 14365 - protein, 381 aa, Muscodor strobelii
  misc_feature: SGI Peptide ID NO. 564732
  misc_feature (165)..(270): Pfam Id: PF08241 Pfam Desc: Methyltransferase domain
  misc_feature (165)..(268): Pfam Id: PF08242 Pfam Desc: Methyltransferase domain
  misc_feature (8)..(381): NCBI GI: 46126101 Blast Desc: FG07428.1 [Gibberella zeae PH-1]
  misc_feature (4)..(381): NCBI GI: 256730902 Blast Desc: [Nectria haematococca mpVI 77-13-4]
  misc_feature (51)..(380): NCBI GI: 85092026 Blast Desc: NCU04647 [Neurospora crassa OR74A] gi|21622314|emb|CAD37017.1| conserved [Neurospora crassa] gi|28920592|gb|EAA29954.1| NCU04647 [Neurospora crassa OR74A]
  misc_feature (2)..(380): NCBI GI: 171692269 Blast Desc: protein product [Podospora anserina] gi|170946083|emb|CAP72884.1| protein product [Podospora anserina]
  misc_feature (16)..(380): NCBI GI: 145609273 Blast Desc: MGG_13398 [Magnaporthe grisea 70-15] gi|145016662|gb|EDK01092.1| MGG_13398 [Magnaporthe grisea 70-15]
  misc_feature (24)..(381): NCBI GI: 156042894 Blast Desc: SS1G_11246 [Sclerotinia sclerotiorum 1980] gi|154695631|gb|EDN95369.1| SS1G_11246 [Sclerotinia sclerotiorum 1980]
  misc_feature (24)..(381): NCBI GI: 154313444 Blast Desc: BC1G_05419 [Botryotinia fuckeliana B05.10] gi|150849488|gb|EDN24681.1| BC1G_05419 [Botryotinia fuckeliana B05.10]
  misc_feature (47)..(380): NCBI GI: 119178286 Blast Desc: CIMG_07993 [Coccidioides immitis RS]
  misc_feature (47)..(380): NCBI GI: 240104812 Blast Desc: Actin-binding protein ABP140, [Coccidioides posadasii C735 delta SOWgp]
  misc_feature (19)..(380): NCBI GI: 261355648 Blast Desc: conserved [Verticillium albo-atrum VaMs.102]
MADTTAATVNPVPSPDIELAKQTSALTVQETIPEAGTPSQAEAGAQHLPPHRNHDPQHNMKRSDPFMFGSRYLEEGDDVFEFNAWDHVETDDAYKEYSEQQFAKQRASPVSDFDKNRFNSDPARWWNLFYKNNTANFFKNRKWLQQEFPILDKVTAEDAGPKVVLEVGAGAGNTAFPILANNKNPKLKLHACDFSKKAVQVMREHAEYNTEQMQADVWDVASDELPPDVVEATVDVVLMVFIFSALSPLQWQKAVQNIYRVLKPGGEVCFRDYGRGDLAQVRFKKGRYLEENFYIRGDGTRVYFFDKEELAQIWRGEFVAVGNGNPDTESKNDANENVASKTERTPLFDVEDLGVDRRMLVNRALKIKMYRCWMQGRFRKK

SEQ ID NO: 14366 - DNA, 1810 bp, Muscodor strobelii
  misc_feature: SGI EST ID NO. CUFF.34260.2
  misc_feature: Variant of the nucleotide sequence at SEQ ID NO 14364
tttcgctgggcgatgtcaacaaatcctcgcatgcggtggaaacccaagtgaaagctaccttgaccaggccaccaacactggactgtctctcaagatggccgacaccaccgctgccacggtcaatccggtgccttcgccagacatcgaactggcaaagcagacctccgccttgactgtgcaggagaccattcccgaggctggcactccaagccaagcagaagccggagctcagcacctgccgccgcacaggaaccatgacccgcaacacaacatgaagcggagtgatcccttcatgtttggctcgcgttacctcgaggagggcgacgatgtcttcgagttcaatgcttgggaccatgtggagactgacgatgcttacaaagagtactctgagcagcagtttgccaagcagcgtgcgtcgccagtctccgactttgataagaatagatttaattccgatcctgcaaggtggtggaatcttttctacaaaaataacactgccaatttctttaagaaccgcaaatggttgcaacaagaattccccatattggataaggtgacagccgaagacgctggccccaaggtggtgctagaggtcggtgccggcgccggcaataccgcctttcctatcttggccaataacaagaaccccaagttgaagctacatgcttgtgacttttcaaagaaagctgtgcaggtcatgcgagaacatgctgagtacaataccgaacagatgcaggccgacgtgtgggatgtggcgagtgacgagcttccgccggatgttgttgaagccacagtagatgtcgtcttaatggtcttcatcttctcggccttatcaccattacaatggcaaaaggccgtgcagaatatttaccgtgtcctaaagccaggcggagaagtctgcttccgtgactacggtagaggtgatttggcacaggtccggttcaagaagggccggtacctggaagagaacttctatatcaggggagatggtacgcgcgtgtatttctttgacaaagaagaacttgcgcaaatatggcgaggagagtttgttgctgtagggaacgggaacccggacaccgagtccaagaatgatgcaaatgaaaatgttgcttctaagacagaaaggacaccgctatttgacgtggaagacctgggcgttgatagacggatgctggtcaatagagcactaaagatcaagatgtatcgctgctggatgcaaggtcgctttagaaagaaatagactgcttctaccacgctttcgtgactcgttatatgtgcctccctatgtattgccgtggttcatcatcataactcttatatatcatggacattggctctcaccaacttcataaccaatcctctcatagaaatccacccctaagcacccaaaacatctaccagccttctcctctcctcactcccaaacccaatcgcatcaagatatccatcaatcccaccataccgtacgtcaatatgcgagcagaccctaggtataagttcctcaggacagtctccccactctgccgtgagaccaatctcctcgatttcagcgagccgactttctctctctggtttgagaccagactgcgagaggaggtagtcatgggttattgcggtggatggaacggagagtgtgagaaggagcagggcgacgatcatccctgtgcggtctttgccttgtgtgcagtgaaccaggagtggtgtaggtgaaggggcggctgaagtggaaaggagggttcgtagagccttggtattgttaatgggctgtctcgtttagagagagatggtgaaatagagggtgatagggcac

SEQ ID NO: 14367 - DNA, 696 bp, Muscodor strobelii
  misc_feature: SGI cDNA ID NO. 564733
  misc_feature: Encodes the peptide sequence at SEQ ID NO 14368
atgccaccaaaaccacctctctggctccccccacgagctcttcctctaacatccaaccaccacatccaacgccgaacattcctctcttcactcctccaaaatctcccaagttctccagaagcaacacaaacactcacggcctctcgacggcttccctacgaccataaaccactgtacaccctaatatccgacatagactcctactcgtcattcctcccgtactgttcctcatcccgcgtaacacactggacatccacgccagacccaatctacaaccgcaaatggccgacgcgcgcagacctcacagcaggctggggcggactggaacaaacatacacgagccgcgtgcactgcattccagggtccatcgtcgaggcactaagcggggacggagctaaaagtggtattcctgccgatgtcctagctgcgcatggcatcacagatgagctgagtgatgggaatagcgggagaggagtggatgaggaaggagttttcaagacacttgtcacgacatggactgttgcgcctgtgaaggtcgagggcgatagaagagagtggagcgacgtccatctaaatatccgctttcagtttgctaatccgttatacggcgccgtgagttccgccgtcgctgataaagtcgcgcccttcatgatcgaggctttcgtcgagagggcgaggaaagtgcttggttcttga

SEQ ID NO: 14368 - protein, 231 aa, Muscodor strobelii
  misc_feature: SGI Peptide ID NO. 564733
  misc_feature (51)..(222): Pfam Id: PF03364 Pfam Desc: Polyketide cyclase / dehydrase and lipid transport
  misc_feature (51)..(120): Pfam Id: PF03364 Pfam Desc: Polyketide cyclase / dehydrase and lipid transport
  misc_feature (161)..(222): Pfam Id: PF03364 Pfam Desc: Polyketide cyclase / dehydrase and lipid transport
  misc_feature (4)..(231): NCBI GI: 39972345 Blast Desc: MGG_07474 [Magnaporthe grisea 70-15] gi|145016661|gb|EDK01091.1| MGG_07474 [Magnaporthe grisea 70-15]
  misc_feature (24)..(231): NCBI GI: 256730901 Blast Desc: NECHADRAFT_48848 [Nectria haematococca mpVI 77-13-4]
  misc_feature (25)..(229): NCBI GI: 156054262 Blast Desc: SS1G_05979 [Sclerotinia sclerotiorum 1980] gi|154703759|gb|EDO03498.1| SS1G_05979 [Sclerotinia sclerotiorum 1980]
  misc_feature (24)..(229): NCBI GI: 154303349 Blast Desc: BC1G_09423 [Botryotinia fuckeliana B05.10] gi|150854986|gb|EDN30178.1| BC1G_09423 [Botryotinia fuckeliana B05.10]
  misc_feature (23)..(229): NCBI GI: 189193537 Blast Desc: conserved [Pyrenophora tritici-repentis Pt-1C-BFP] gi|187978671|gb|EDU45297.1| conserved [Pyrenophora tritici-repentis Pt-1C-BFP]
  misc_feature (25)..(230): NCBI GI: 171692265 Blast Desc: protein product [Podospora anserina] gi|170946081|emb|CAP72882.1| protein product [Podospora anserina]
  misc_feature (10)..(229): NCBI GI: 169601442 Blast Desc: SNOG_03586 [Phaeosphaeria nodorum SN15] gi|160705933|gb|EAT88791.2| SNOG_03586 [Phaeosphaeria nodorum SN15]
  misc_feature (16)..(204): NCBI GI: 46126107 Blast Desc: FG07431.1 [Gibberella zeae PH-1]
  misc_feature (45)..(227): NCBI GI: 85092030 Blast Desc: NCU04649 [Neurospora crassa OR74A] gi|21622316|emb|CAD37019.1| [Neurospora crassa] gi|28920594|gb|EAA29956.1| [Neurospora crassa OR74A]
  misc_feature (43)..(230): NCBI GI: 169768032 Blast Desc: [Aspergillus oryzae RIB40] gi|83766342|dbj|BAE56485.1| protein product [Aspergillus oryzae]
  misc_feature: Useful for fungicidal and/or biocontrol applications
MPPKPPLWLPPRALPLTSNHHIQRRTFLSSLLQNLPSSPEATQTLTASRRLPYDHKPLYTLISDIDSYSSFLPYCSSSRVTHWTSTPDPIYNRKWPTRADLTAGWGGLEQTYTSRVHCIPGSIVEALSGDGAKSGIPADVLAAHGITDELSDGNSGRGVDEEGVFKTLVTTWTVAPVKVEGDRREWSDVHLNIRFQFANPLYGAVSSAVADKVAPFMIEAFVERARKVLGS

SEQ ID NO: 14369 - DNA, 2043 bp, Muscodor strobelii
  misc_feature: SGI cDNA ID NO. 564734
  misc_feature: Encodes the peptide sequence at SEQ ID NO 14370
atgaacgcacgcatccgtataagatctggctctcgaggtgcatcaaggcaccgtcaaaccgaagatagctattccgaggacgacagtaatcagcgcaccacgtcatatgagagctcatcagattgggagtcagatgaattagcagacgaagacgacgacgacgacgacgaacttgacccatcagattctgcctctgcaagtccccaaaggcatcgccgtgctgacagccggcatccaggcgagtctcaacgcagactcactcatcggtctgcttcttcccattatcggggcacatcgcgcccacctacaggcgctctggatccatatgattatgactatgccggccgtggtggcccgtatgcaccaccggccggctatggctatgggcgtggtccacctggctacccccaaagccaggttggaggatatggcccagtagtccctcatgcggcgcaccatggatttcgagaccatccaggtaatccattcgccccgggacctggaccctcgggtggtaactacttcaacaatgagcattggggtagaggcgatatgatgccgtatggtcaacaatacttcgatcccaggggttatggtatgccggcccagctgcagcaatatggtggatggggccacgcaccacccccacctccaaccgaaattggtccgccgaagacacccagtcctgaagataggccggatcctgagaaggaggccatgaagaagcagcttgctgaaatcaaggccgagcaaaagaagagagaagacgaagctaagcagaaggaattagaagcgcgcattagagaagaggctgagcaagcgtttcagcgcaaaatggaccaaatgagacgagatgaagaagttcgtgctgaagagagacgtattgcgctagaaaaggccaagaaggaaatcgaggatgcgcgaaaagacgccgaaaaggcagcccgcgaagccatcgaagcggaacgtaaagcggcagccgaacaagccaaaagagaggccgaagccattgctcgggccgagagagaagcgcgggacagattggaagccgagcggaaacaagagacagagaggcagaagagagaagccgaagctgttgctcgagccgaaagagaggcacgtgacaagctggaagctgaagcaaaagccgctgccgagaagcaaaagcgagatgctgaagccgctgcattggcggaggctgccgctcgacttaagttagaggctgctatcaaggctgaagccgaagctaaagaagctgcggcaaagaaagcagcagaggaggcagagtggagaaagaatctagaggaggaagcgaaactcaaagccgagatcgaggctcgcaaaaagatcgaagacgagaagaaggccgccgacgctgccgctgctgatgccgaggcgaagaagaaggcagacgaattattcaaaaaacaagctcttgaggaagctaagatcaaggcagaagaagcaaatcggaaaactatggggaaggacaaagatcccattcggtttaaagatgctgttggcagaaaatttagcttccctttccacatctgtcaaacctggcagggtatggaagacttgattaaacaagcctttgcacacgtcgacgtcattggtccacacgtacaggccggccattacgatctcatcggacctaatggcgagattattttgcctcaagtctgggataaggtcatcgagcctgactgggcagtaactatgcacatgtggcctatggaccagcgaccacccccgggtccgcaaatgggtcgtgggccaggtggacctcctaggatggggatgcccatgggcggtagaatggcaggaccagctggtcggccaggtggtataccagtaccgccacatcatcaccccggtgccggtcgaccgatgatggatcgcccaggggggggaccgcctccgcaggtcatcaatgtgacaaagccttccggcaagaagtcgagcaagggccaaaagggagtcctttcatggataggcggaggagccaaacccccaaagtcgagcaagaagaaaacacgttga

SEQ ID NO: 14370 - protein, 680 aa, Muscodor strobelii
  misc_feature: SGI Peptide ID NO. 564734
  misc_feature (48)..(339): Pfam Id: PF00012 Pfam Desc: Hsp70 protein
  misc_feature (238)..(626): NCBI GI: 116206700 Blast Desc: CHGG_02643 [Chaetomium globosum CBS 148.51] gi|88183240|gb|EAQ90708.1| CHGG_02643 [Chaetomium globosum CBS 148.51]
  misc_feature (226)..(615): NCBI GI: 164425313 Blast Desc: NCU04650 [Neurospora crassa OR74A] gi|157070878|gb|EAA29957.2| [Neurospora crassa OR74A]
  misc_feature (226)..(586): NCBI GI: 21622317 Blast Desc: related to kinetoplast-associated protein KAP [Neurospora crassa]
  misc_feature (123)..(587): NCBI GI: 39972355 Blast Desc: MGG_07479 [Magnaporthe grisea 70-15] gi|145016667|gb|EDK01097.1| MGG_07479 [Magnaporthe grisea 70-15]
  misc_feature (434)..(602): NCBI GI: 171692263 Blast Desc: protein product [Podospora anserina] gi|170946080|emb|CAP72881.1| protein product [Podospora anserina]
  misc_feature (155)..(667): NCBI GI: 261355650 Blast Desc: conserved [Verticillium albo-atrum VaMs.102]
  misc_feature (478)..(646): NCBI GI: 256731274 Blast Desc: [Nectria haematococca mpVI 77-13-4]
  misc_feature (498)..(577): NCBI GI: 154313416 Blast Desc: BC1G_05405 [Botryotinia fuckeliana B05.10] gi|150849474|gb|EDN24667.1| BC1G_05405 [Botryotinia fuckeliana B05.10]
  misc_feature (6)..(579): NCBI GI: 156042908 Blast Desc: SS1G_11253 [Sclerotinia sclerotiorum 1980] gi|154695638|gb|EDN95376.1| SS1G_11253 [Sclerotinia sclerotiorum 1980]
  misc_feature (498)..(590): NCBI GI: 70987456 Blast Desc: conserved [Aspergillus fumigatus Af293] gi|66846771|gb|EAL87103.1| conserved [Aspergillus fumigatus Af293]
MNARIRIRSGSRGASRHRQTEDSYSEDDSNQRTTSYESSSDWESDELADEDDDDDDELDPSDSASASPQRHRRADSRHPGESQRRLTHRSASSHYRGTSRPPTGALDPYDYDYAGRGGPYAPPAGYGYGRGPPGYPQSQVGGYGPVVPHAAHHGFRDHPGNPFAPGPGPSGGNYFNNEHWGRGDMMPYGQQYFDPRGYGMPAQLQQYGGWGHAPPPPPTEIGPPKTPSPEDRPDPEKEAMKKQLAEIKAEQKKREDEAKQKELEARIREEAEQAFQRKMDQMRRDEEVRAEERRIALEKAKKEIEDARKDAEKAAREAIEAERKAAAEQAKREAEAIARAEREARDRLEAERKQETERQKREAEAVARAEREARDKLEAEAKAAAEKQKRDAEAAALAEAAARLKLEAAIKAEAEAKEAAAKKAAEEAEWRKNLEEEAKLKAEIEARKKIEDEKKAADAAAADAEAKKKADELFKKQALEEAKIKAEEANRKTMGKDKDPIRFKDAVGRKFSFPFHICQTWQGMEDLIKQAFAHVDVIGPHVQAGHYDLIGPNGEIILPQVWDKVIEPDWAVTMHMWPMDQRPPPGPQMGRGPGGPPRMGMPMGGRMAGPAGRPGGIPVPPHHHPGAGRPMMDRPGGGPPPQVINVTKPSGKKSSKGQKGVLSWIGGGAKPPKSSKKKTR

SEQ ID NO: 14371 - DNA, 5125 bp, Muscodor strobelii
  misc_feature: SGI EST ID NO. CUFF.34515.0
  misc_feature: Variant of the nucleotide sequence at SEQ ID NO 14369
cgaatgtagaggagcgacgagtacaaaggtcagccgccggggtaccgcatgtttaccttgagaccctaggcagtccggcatgcagctctcagatgctaggcatgtctactagatattctggcctctctctcgtcattgattcgcccatctggactgtcctccctcatcgcacgtcgtcttacagggcccaccgctcctcagttcatgatgtttagttgcataggcgcaccccctcgctgactcttatcgtggcttattcgtagtggtgctcgtgtatatctaccggcttgttccctctgcctctcccgcttgcctccttcgtctccctgacgcacaagggaagaaagaggagacgggcagatcgtgcttcgcattgcgcatcccgagaccgcctccctccccctcctctcgaggctttgacagcccctgcgagagccgctgtctgtcctttttgctattcgtgtatcgcgggctcctggatatcagatatcagattgatcggtaccagcaatcctcctggttctggctggagtttggggcggctgtcggataagtgcatgcatacaacacctagccaaaccccgctctctgctatttacacccacctgcaaagcccacaacaaagtccacacatccacacaccgcgacattgattcgcagcaacccaatccaaacatttttcttgcgacccaacgactaccaatcccagtactagggtctgccaggcacgaatcacagcaagggcgaacgaggccattgtttattaatagggaccaaccgagccagctatctccaataccctggccacttttcaacatcccatctcagtctattgccaaatcctcagattgcttcatcaccgcccaattgctccatcaacgacaccttgaatcagcacgatcacgcatctcttgctacagaactctgctgccatcgctcacgcagacactcagcgcttttcgaagggcacttaattacgctagccatctctacttgcaactcgaaagaaccttgctcgcattgtctaaagatagcatctagggccgaagtcaagacgaatagccgaagccagaacccaaagcggctactagagacaacacggcacccgtctaatctggacacatcccaccccttgtgtcctcaatccactccggcctccgcacgtcgatcgtctggagcaaaggatattgaagagttatctgccaccaatgaagtaagcaacgactttcttcgcaagttttaggaagtcgaaattaataccacgaatcagcgcacgcatccgtataagatctggctctcgaggtgcatcaaggcaccgtcaaaccgaagatagctattccgaggacgacagtaatcagcgcaccacgtcatatgagagctcatcagattgggagtcagatgaattagcagacgaagacgacgacgacgacgacgaacttgacccatcagattctgcctctgcaagtccccaaaggcatcgccgtgctgacagccggcatccaggcgagtctcaacgcagactcactcatcggtctgcttcttcccattatcggggcacatcgcgcccacctacaggcgctctggatccatatgattatgactatgccggccgtggtggcccgtatgcaccaccggccggctatggctatgggcgtggtccacctggctacccccaaagccaggttggaggatatggcccagtagtccctcatgcggcgcaccatggatttcgagaccatccaggtaatccattcgccccgggacctggaccctcgggtggtaactacttcaacaatgagcattggggtagaggcgatatgatgccgtatggtcaacaatacttcgatcccaggggttatggtatgccggcccagctgcagcaatatggtggatggggccacgcaccacccccacctccaaccgaaattggtccgccgaagacacccagtcctgaagataggccggatcctgagaaggaggccatgaagaagcagcttgctgaaatcaaggccgagcaaaagaagagagaagacgaagctaagcagaaggaattagaagcgcgcattagagaagaggctgagcaagcgtttcagcgcaaaatggaccaaatgagacgagatgaagaagttcgtgctgaagagagacgtattgcgctagaaaaggccaagaaggaaatcgaggatgcgcgaaaagacgccgaaaaggcagcccgcgaagccatcgaagcggaacgtaaagcggcagccgaacaagccaaaagagaggccgaagccattgctcgggccgagagagaagcgcgggacagattggaagccgagcggaaacaagagacagagaggcagaagagagaagccgaagctgttgctcgagccgaaagagaggcacgtgacaagctggaagctgaagcaaaagccgctgccgagaagcaaaagcgagatgctgaagccgctgcattggcggaggctgccgctcgacttaagttagaggctgctatcaaggctgaagccgaagctaaagaagctgcggcaaagaaagcagcagaggaggcagagtggagaaagaatctagaggaggaagcgaaactcaaagccgagatcgaggctcgcaaaaagatcgaagacgagaagaaggccgccgacgctgccgctgctgatgccgaggcgaagaagaaggcagacgaattattcaaaaaacaagctcttgaggaagctaagatcaaggcagaagaagcaaatcggaaaactatggggaaggacaaagatcccattcggtttaaagatgctgttggcagaaaatttagcttccctttccacatctgtcaaacctggcagggtatggaagacttgattaaacaagcctttgcacacgtcgacgtcattggtccacacgtacaggccggccattacgatctcatcggacctaatggcgagattattttgcctcaagtctgggataaggtcatcgagcctgactgggcagtaactatgcacatgtggcctatggaccagcgaccacccccgggtccgcaaatgggtcgtgggccaggtggacctcctaggatggggatgcccatgggcggtagaatggcaggaccagctggtcggccaggtggtataccagtaccgccacatcatcaccccggtgccggtcgaccgatgatggatcgcccaggggggggaccgcctccgcaggtcatcaatgtgacaaagccttccggcaagaagtcgagcaagggccaaaagggagtcctttcatggataggcggaggagccaaacccccaaagtcgagcaagaagaaaacacgttgatatgccaagacgtcttgaatgaagaaaactgttctatgtttgtgaatggaggcggtgcaaatatttctttcttggtgcgagcgtcgcgcatagcattcgcatcgcctttcccccttgtcctttttagagcatccggtgatgttatcccggttggattcccttcgtctcaactgattctgcattatacccccggctcgagatggtttcgtggttttatagcgacatcggcgcggcttttccttccaaaaacaaaagtattgtaaggattgggattggaggctgggttcactggcaaatactccactagctaaatacctatcaccttcacatatgtcgtatattcaagcagacccctaatgcgacgcactacaacctagccacatctgactgtggcttagggagagggacgagacaaagatgagatgattgcatgaagaaacttcggaacggggagaataggtgggatgagaggctatccagctgttactcgactgaacaaacgagtcggggcggcgccgaaggggacgatttacatgagtggatgcagttgagattctgcactatagcaatttagattatgctcatgttgaaaacataaaatctagatttgttctatatacactaaacagctatgcttactatgtcttcaatctgtctttgtcttgagctgcctctaattttacagtgatatacaaatacaacgatgtatatgtatttgccgcctttcatgcttgaccctttctaaaccaaataatatctagctcctagccgccggcaaaatcttgttgtttttcctctcggctagatgagtgtcgaacgcttgaatgcttttgattcctctcgtagagggtataattacacccctttcgatgaatgtgtcgctaaggcaatcagctgctgtaccggtcacgagcagcctcctcatactatctagaatcgcgtgcctcaatctcaagaaccaagcactttcctcgccctctcgacgaaagcctcgatcatgaagggcgcgactttatcagcgacggcggaactcacggcgccgtataacggattagcaaactgaaagcggatatttagatggacgtcgctccactctcttctatcgccctcgaccttcacaggcgcaacagtccatgtcgtgacaagtgtcttgaaaactccttcctcatccactcctctcccgctattcccatcactcagctcatctgtgatgccatgcgcagctaggacatcggcaggaataccacttttagctccgtccccgcttagtgcctcgacgatggaccctggaatgcagtgcacgcggctcgtgtatgtttgttccagtccgccccagcctgctgtgaggtctgcgcgcgtcggccatttgcggttgtagattgggtctggcgtggatgtccagtgtgttacgcgggatgaggaacagtacgggaggaatgacgagtaggagtctatgtcggatattagggtgtacagtggtttatggtcgtagggaagccgtcgagaggccgtgagtgtttgtgttgcttctggagaacttgggagattttggaggagtgaagagaggaatgttcggcgttggatgtggtggttggatgttagaggaagagctcgtggggggagccagagaggtggttttggtggcattttggggataagttggttgttgaagagctcaggatgagtaagagagaaaaatggcaagaattgatgctataagaaatccatagcacagacttgggaatcaattaatgcgatataatcgtcatatgcttgcgatgtgatttggacaatttggatgtagaggcgcaaatcgg

SEQ ID NO: 14372 - DNA, 966 bp, Muscodor strobelii
  misc_feature: SGI cDNA ID NO. 564735
  misc_feature: Encodes the peptide sequence at SEQ ID NO 14373
atgtcttcctcacttcttcaccccccaagccacctgccaccagcgactgcgttgcaacactcgcagcaagctcctgcaattctcgagaacaccacaggcgctgtatcatcatcgatgcttcagtcgctcttggcctcttcggagaccaatgaactatggacaacttacgagaacctccttttgtcatgcctccgaactggcgacgatgagtccgctcatcagtgtctgggtaggctcgccaaaagatttggcgatgaaaatgaacgtgtcatggctttaaaggggctcttgaaggaagccactgcaaatgacaaatcaactttagatatggtcctccaggagtatgaagacatcctacgcgataatccgtcaaatctacctatagtaaaacgccgagctgcgttattacggtctataggtcgcatttcagagtctgttaacactctaaactcattactcgacgtctccccgacagatgctgaagcatgggccgagctggccgatgtctacctatcacagggcttgtactcgcaggccgtctttgcccaggaggaagtgcttgtgcttcaacctaatgcctggaatattcatgcgcggctaggcgagatgctgctcatggcgtccaaaacatctgatgggcccaaaaggctagcagaggcagtcaaacgattctgccgaagtattgagctttgtgacaactatctacgtggctattatggcctgaaattggccacgcaacagctgctaagtgagtcttcgaaaaattccaaacagatggagtcggacggatggtctttgccagactctagcaccctacagaaactggatgagctggcaaccagtaaaattgccgaaatcgttcggcgcaactcggctggagaaaaggattggcaaggctatgacaaagccgaaataacggcagcacgggagcttcttgattccagctccacggccactgtgaggtga

SEQ ID NO: 14373 - protein, 321 aa, Muscodor strobelii
  misc_feature: SGI Peptide ID NO. 564735
  misc_feature (160)..(193): Pfam Id: PF07719 Pfam Desc: Tetratricopeptide repeat
  misc_feature (1)..(321): NCBI GI: 256731275 Blast Desc: NECHADRAFT_49244 [Nectria haematococca mpVI 77-13-4]
  misc_feature (1)..(321): NCBI GI: 46126103 Blast Desc: FG07429.1 [Gibberella zeae PH-1]
  misc_feature (1)..(318): NCBI GI: 145609279 Blast Desc: MGG_07480 [Magnaporthe grisea 70-15] gi|145016668|gb|EDK01098.1| MGG_07480 [Magnaporthe grisea 70-15]
  misc_feature (1)..(312): NCBI GI: 171692261 Blast Desc: protein product [Podospora anserina] gi|170946079|emb|CAP72880.1| protein product [Podospora anserina]
  misc_feature (1)..(312): NCBI GI: 85092034 Blast Desc: NCU04651 [Neurospora crassa OR74A] gi|21622318|emb|CAD37021.1| conserved [Neurospora crassa] gi|28920596|gb|EAA29958.1| conserved [Neurospora crassa OR74A]
  misc_feature (1)..(321): NCBI GI: 116206704 Blast Desc: CHGG_02645 [Chaetomium globosum CBS 148.51] gi|88183242|gb|EAQ90710.1| CHGG_02645 [Chaetomium globosum CBS 148.51]
  misc_feature (1)..(279): NCBI GI: 261355649 Blast Desc: tetratricopeptide repeat protein [Verticillium albo-atrum VaMs.102]
  misc_feature (1)..(312): NCBI GI: 225680792 Blast Desc: conserved [Paracoccidioides brasiliensis Pb03]
  misc_feature (14)..(313): NCBI GI: 261201250 Blast Desc: tetratricopeptide repeat domain-containing protein [Ajellomyces dermatitidis SLH14081] gi|239592084|gb|EEQ74665.1| tetratricopeptide repeat domain-containing protein [Ajellomyces
  misc_feature (14)..(313): NCBI GI: 154278844 Blast Desc: conserved [Ajellomyces capsulatus NAm1] gi|150412178|gb|EDN07565.1| conserved [Ajellomyces capsulatus NAm1]
MSSSLLHPPSHLPPATALQHSQQAPAILENTTGAVSSSMLQSLLASSETNELWTTYENLLLSCLRTGDDESAHQCLGRLAKRFGDENERVMALKGLLKEATANDKSTLDMVLQEYEDILRDNPSNLPIVKRRAALLRSIGRISESVNTLNSLLDVSPTDAEAWAELADVYLSQGLYSQAVFAQEEVLVLQPNAWNIHARLGEMLLMASKTSDGPKRLAEAVKRFCRSIELCDNYLRGYYGLKLATQQLLSESSKNSKQMESDGWSLPDSSTLQKLDELATSKIAEIVRRNSAGEKDWQGYDKAEITAARELLDSSSTATVR

SEQ ID NO: 14374 - DNA, 3425 bp, Muscodor strobelii
  misc_feature: SGI EST ID NO. CUFF.34518.0
  misc_feature: Variant of the nucleotide sequence at SEQ ID NO 14372
cgaagagttccaaattcactgtatcgtaaagagcgctggcatcaaacgtggtgctaatatcacgtttgtcgtgcctcagatctcgcgccgccatcatcctgtactcgtgtctatatctcgaggatctgcaacgccaccatcgactgtgaagtgagacacaacagcgccttctcctggacaccaggcgactctcacaatgtcttcctcacttcttcaccccccaagccacctgccaccagcgactgcgttgcaacactcgcagcaagctcctgcaattctcgagaacaccacaggcgctgtatcatcatcgatgcttcagtcgctcttggcctcttcggagaccaatgaactatggacaacttacgagaacctccttttgtcatgcctccgaactggcgacgatgagtccgctcatcagtgtctgggtaggctcgccaaaagatttggcgatgaaaatgaacgtgtcatggctttaaaggggctcttgaaggaagccactgcaaatgacaaatcaactttagatatggtcctccaggagtatgaagacatcctacgcgataatccgtcaaatctacctatagtaaaacgccgagctgcgttattacggtctataggtcgcatttcagagtctgttaacactctaaactcattactcgacgtctccccgacagatgctgaagcatgggccgagctggccgatgtctacctatcacagggcttgtactcgcaggccgtctttgcccaggaggaagtgcttgtgcttcaacctaatgcctggaatattcatgcgcggctaggcgagatgctgctcatggcgtccaaaacatctgatgggcccaaaaggctagcagaggcagtcaaacgattctgccgaagtattgagctttgtgacaactatctacgtggctattatggcctgaaattggccacgcaacagctgctaagtgagtcttcgaaaaattccaaacagatggagtcggacggatggtctttgccagactctagcaccctacagaaactggatgagctggcaaccagtaaaattgccgaaatcgttcggcgcaactcggctggagaaaaggattggcaaggctatgacaaagccgaaataacggcagcacgggagcttcttgattccagctccacggccactgtgaggtgatgctgccaatgcttgttggtatgctcgacaatgcgtctggaaatgtgagtaacccagcagtagttggattgagactgatggaatgtcccctcgtgcatggcccgctatgccttgtcctgcctcttactattgcctactggacggtgaagctacccaacgcgtgaacagcatttgaggtggagcgttgggcctagagttgatgccctatccgacgaatctgatgaggccgagtggaaccttgggccggaatcaactcagcgttcttccatagaccattatgatacctattcacaaccaatcgtccaagcactgtaattgttccaaaggcacgtggctccagcgacgaggttccctctcgttcttctgcccgtctatacgattcatagcgtaggtcagatgcattttctattattatgcctgtgtctgttgcagatgcagatccgactgtgtacaacagtccaatcagccctgaagtccgcgcagtaagagacagccttggttccttttcctagacgacgaaattaaagtgaatgtgcataaatcaacgaatcaagacactaggctgacgatgacggacgggtctagccgctgtcagactgcatccatccttgagctggtaccacaacgtgccacattaacgatcatcagcactttttattacgattacctctttgagcccggatactttggatgctcggctttgctggcaacgtactattatctagaaggatcgtgtagtcaaaaagagtgatgaagtgtcgcattcgagatccgctcacacagttacctagcgacgcaagctacctagtaggatgatcattggatttgtcgcgttaagtatttgtagagaaagggcgccgagtgaatccatacctatgacggccaacttacacacatcataccctttatcgaactctcatccgaaatgtgaatgacacgagatgcgtattgaatcaagtgtcattacttcttggaagtcgtgtgattaaggcagtgtggtaccatatgcattctcggcagcagtccaatatcacaacatacgatgacgggtgcaagaccgcgccgagatcgatcgcccatttgccgaatgaagaggttgtccttgtgagaattctcgtgcgacctttctaacaaataaatcttgcaagaattggatcttcactaatatccctcgaacactagccaggcagaaagagtaggacatgaaaggtcatccgttgcgctaccgttggcccgttggcattttgggcttgctcgtaaggccgagatgagttttgccactggaaatgaaagacttcagataatttaactctgaagctactatcaactggactgcgagcccaacgactaaagtttggaaccggaggtgtcatgttagggcgagcgacaggacgaaatagctaaagattttggatgctgggcgcccaatgtttcggtgtaagtactgggcagagcggtaaaagggaggtcgacagtgatggagctggccccatcgtcaatccaaaccagtgtcgctattgggtcattgggcattcccctccatttgattccggcctgcatggtcagtcagaagtcagtctctcaaaatcatcggacaatccaaggatccagatgctgctgagtggatgcatttgttcccggccactattccagcagcggtgtgggcttacgagtggaaaggtcggcaggctgttctagttgtatgtcgcctttccttctcttcggttagttggacccaaccaactcgaacaacacaaagaaagcgaacagctccgagcaccgcccccaacactttcaaacaagtcgtaacacttgtccaatacccttgcgctactcactcttattagtcctgccagccctgcagcattgaagacatatcccagcgtgatgcccaattcagcctaggcaatcactcgccactatccttcttgcttcgcctcagagacggcgtgtatgcttcaaaacctccttgttacccctcctcgacactcacacaacacttgcgcaactgtggttctcccgagcgattttgcatctgacgtgtttacagctaagctagcataagacccgaattacaaagaatacagattgtgtattccatccaaggaattgttggtcgcactgagtctctcatttctgtaagacgcttttcattttggtctgtagcattgtatgaaatatgtcactctatcccattcctctgttgttagtcaactgttttgcaatacagatcaccatagaattcctcttgaatcaggttaag

SEQ ID NO: 14375 - DNA, 3084 bp, Muscodor strobelii
  misc_feature: SGI cDNA ID NO. 564736
  misc_feature: Encodes the peptide sequence at SEQ ID NO 14376
atgggcggcaggtttgaaaagtctctatacgacctcatccgaggcttgaggagccacaagggcaacgagagggagtatatccaacagagcttgaaggaatgtcgcgccgagattcgcagccaggacatggacctcaaggctacggccctgttaaagctcatatacctggagatgatgggccacgacatgtcctgggcctccttcaacgtcctcgaggtcatggcttctcccaagtatcaccagaagcgcgtggggtatctgggtgctatccagagctttcgcccggatactgaggtgttgatgcttgctacgaacctgctcaagaaggatttgaccgcagcgtcgacaaccaccatcgcccttcccatcgccacccttccgcacgtcattactccctccctcgctttatcagttctgtccgacctcctcccacgcctgagccacagcaacccagccattcgcaaaaagaccatcgtcactctctaccgactagccctcgtataccccgaaacactccgcgcggcttggcccaagatcaaagaacgcttgatggacaaatctgaagatcccagcgtcaccgctgccatcgtaaatgttgtgtgcgagctaggatggcgtcggcccaacgatttcctccccctcgcgccgagactattcgagctgctcgtggacagcgggaacaactggatggctattaaactgatcaagttgtttgcgacactcacacccctcgagccgagactcgttcgaaagcttctgcccccgttgacagaaatcatccagacgacgcccgccatgtctttactgtatgagtgtatcaatggcattattcagggcggtattctaggaagtggcgaagacacggcagggaaggaagagattgcctcgctctgcgtaaacaaactgcgtagcatggtgctagtcgatggtgacccgaacttaaaatatgtggcactgcttgccttcaacaagatcgtcgatactcatccttggcttgtggctcaacaggaggatgtcatattagaatgcatcgatagtacggacatctctatccgcatcaaagctttagatttagttcagggcatggttagcaacgaaaacttggtctcgatagtcagtcgcttgatgagacagctcaaactatcgtcttcaaatgatcgccaaaacggaggacctacatcaagctcgacccctggtgattcctcagaagacgatctggaaagaaatatcaaccccgcacaaaagtcttcgaatcaactaccgcctcttcctgatgattacagagttgatgtgatcaacagaatcttaacaatgtgttctcagaacaactatagctatctaaccgatttcgagtggtacatcgatatcctcacgcaattagtgcggattgctcccctgccgaaaatggtggatgacaacaacgattctccaggaactgggaagtcaagtcataatgacatatctgagaagatcggcagtgagcttcgaaacgtcgcagtcaaggtgcaagctgtccgctccgcctgtatgcaggccgcagagaccatcgtctctcagctcaaccaagacaccccagctggccgtcttatcatctcccgggcactgggaccagcaacttggatactgggagaatatgcctcagagctgtccatacccgaggacactctggggttgttgctccaggttatcccaaaaatcaactctccggagcctctggccgcaagtcttcaggcggccatgaaagtcttttcgctaactactggagaccaattgcaacgatggagtgcggagcgaaagtccaagatacagctcctgatggcgcgcctcattcatactttcgaaacattcattctgcaccccaatttagaagttcaagagcgggctgttgagttcacagaattgctcaaactgacagcggaagctgcttccagtcaagaagcgtcgaacgaaatggtccatcaggaccctccgctccttcttacccaagccataccgtctttatttgctgggctggaacttcattccgtggctgccggcgcacagaaaaacgtgccgttaccggacggtctagatctcgacgaaccgattcaccctaacctcaactacttactcgcatcggctgattcgatttcgctgcctgctgatgaagtcgatgagttcgaaacgtattatcatcagcgtccaccggcagccagtatctcatccgagccggctatcaaacgcttagtcgaggaaccagagagcgaggtaaactcttaccagcagccaacggaagaatcgtatcttgatgcggacattcttgcgcgacgcagagcggaaagaatagagaagaatcgtgatgatcccttctacattggagagagcagctccttgcagagatcttcgacaccaattcataatatcctacagaactcaaatggtcccgacctcgatgtcgactcgatccctattatggagcttgatctagataaactcagtgccggggtgaaccacgcgcccacgaaaccatcgaagccttccaggccgcgacctcgtcagcaaattgtcattgcggcggacgaaaatctcgctagtagtggtgcgagtacgcccaggaacgactctgaaaacgactctggttcatttgtgtcaaaatctgcgcgtgctaaaaggctaaaacagtctctcctcggtgtcgattcagcaaatattggaagtttcaacctcgagggtgatccagagagtggtgcttacgatcccgaggcgcagcagcgggaggaagtcgaaatggccaaagctatgaaagaagtcgagcgccttcgacttgaaatgcagcgtgccaacgaacgtattcaagttgctcagggtgtcgacgccgctggcactgtcgtcaagaaaaagaaagcatcgacgaaagcaaagaagaagacaagtcccgaagatgatggcgaagctgatggcgaaccaatcaagattgtaaagaagaaaaagaagaaggtagcagagatcgacgaaggcacgggggagacagagcagagtactgtggtgaagccgaagaagaggaaaaaggcaaagccacctgttgagatcgatgaaggggcttga

SEQ ID NO: 14376 - protein, 1027 aa, Muscodor strobelii
  misc_feature: SGI Peptide ID NO. 564736
  misc_feature (23)..(639): Pfam Id: PF01602 Pfam Desc: Adaptin N terminal region
  misc_feature (23)..(376): Pfam Id: PF01602 Pfam Desc: Adaptin N terminal region
  misc_feature (538)..(639): Pfam Id: PF01602 Pfam Desc: Adaptin N terminal region
  misc_feature (424)..(464): Pfam Id: PF01602 Pfam Desc: Adaptin N terminal region
  misc_feature (43)..(957): NCBI GI: 39972359 Blast Desc: MGG_07481 [Magnaporthe grisea 70-15] gi|145016669|gb|EDK01099.1| MGG_07481 [Magnaporthe grisea 70-15]
  misc_feature (58)..(957): NCBI GI: 256731273 Blast Desc: NECHADRAFT_71662 [Nectria haematococca mpVI 77-13-4]
  misc_feature (4)..(954): NCBI GI: 171692259 Blast Desc: protein product [Podospora anserina] gi|170946078|emb|CAP72879.1| protein product [Podospora anserina]
  misc_feature (63)..(957): NCBI GI: 46126109 Blast Desc: FG07432.1 [Gibberella zeae PH-1]
  misc_feature (44)..(950): NCBI GI: 85092036 Blast Desc: NCU04652 [Neurospora crassa OR74A] gi|21622319|emb|CAD37022.1| conserved [Neurospora crassa] gi|28920597|gb|EAA29959.1| conserved [Neurospora crassa OR74A]
  misc_feature (42)..(790): NCBI GI: 116206706 Blast Desc: CHGG_02646 [Chaetomium globosum CBS 148.51] gi|88183243|gb|EAQ90711.1| CHGG_02646 [Chaetomium globosum CBS 148.51]
  misc_feature (5)..(681): NCBI GI: 261355651 Blast Desc: AP-3 complex subunit delta [Verticillium albo-atrum VaMs.102]
  misc_feature (5)..(945): NCBI GI: 189193997 Blast Desc: AP-3 complex subunit delta [Pyrenophora tritici-repentis Pt-1C-BFP] gi|187978901|gb|EDU45527.1| AP-3 complex subunit delta [Pyrenophora tritici-repentis Pt-1C-BFP]
  misc_feature (119)..(954): NCBI GI: 156042914 Blast Desc: SS1G_11256 [Sclerotinia sclerotiorum 1980] gi|154695641|gb|EDN95379.1| SS1G_11256 [Sclerotinia sclerotiorum 1980]
  misc_feature (4)..(973): NCBI GI: 239611751 Blast Desc: AP-3 complex subunit delta [Ajellomyces dermatitidis ER-3]
MGGRFEKSLYDLIRGLRSHKGNEREYIQQSLKECRAEIRSQDMDLKATALLKLIYLEMMGHDMSWASFNVLEVMASPKYHQKRVGYLGAIQSFRPDTEVLMLATNLLKKDLTAASTTTIALPIATLPHVITPSLALSVLSDLLPRLSHSNPAIRKKTIVTLYRLALVYPETLRAAWPKIKERLMDKSEDPSVTAAIVNVVCELGWRRPNDFLPLAPRLFELLVDSGNNWMAIKLIKLFATLTPLEPRLVRKLLPPLTEIIQTTPAMSLLYECINGIIQGGILGSGEDTAGKEEIASLCVNKLRSMVLVDGDPNLKYVALLAFNKIVDTHPWLVAQQEDVILECIDSTDISIRIKALDLVQGMVSNENLVSIVSRLMRQLKLSSSNDRQNGGPTSSSTPGDSSEDDLERNINPAQKSSNQLPPLPDDYRVDVINRILTMCSQNNYSYLTDFEWYIDILTQLVRIAPLPKMVDDNNDSPGTGKSSHNDISEKIGSELRNVAVKVQAVRSACMQAAETIVSQLNQDTPAGRLIISRALGPATWILGEYASELSIPEDTLGLLLQVIPKINSPEPLAASLQAAMKVFSLTTGDQLQRWSAERKSKIQLLMARLIHTFETFILHPNLEVQERAVEFTELLKLTAEAASSQEASNEMVHQDPPLLLTQAIPSLFAGLELHSVAAGAQKNVPLPDGLDLDEPIHPNLNYLLASADSISLPADEVDEFETYYHQRPPAASISSEPAIKRLVEEPESEVNSYQQPTEESYLDADILARRRAERIEKNRDDPFYIGESSSLQRSSTPIHNILQNSNGPDLDVDSIPIMELDLDKLSAGVNHAPTKPSKPSRPRPRQQIVIAADENLASSGASTPRNDSENDSGSFVSKSARAKRLKQSLLGVDSANIGSFNLEGDPESGAYDPEAQQREEVEMAKAMKEVERLRLEMQRANERIQVAQGVDAAGTVVKKKKASTKAKKKTSPEDDGEADGEPIKIVKKKKKKVAEIDEGTGETEQSTVVKPKKRKKAKPPVEIDEGA

SEQ ID NO: 14377 - DNA, 3581 bp, Muscodor strobelii
  misc_feature: SGI EST ID NO. CUFF.34321.2
  misc_feature: Variant of the nucleotide sequence at SEQ ID NO 14375
cgccgaacgataggtatcaacaagcttgggtggggcaggtctgacgacagtctacgtggggtcgagtctagagttgcttgggacgggtcggcgggagggacagtcgtgacctacctgcatgtacatactaaatcacgacctacttgtgcatatcatcaccacacacgcgaccgtagctgtggccacgacgctgacggcttgcatctggctcgttcctagactgcgttcctctgagccgcttcgtcgtaatcatgctgcttccgaaatcaaacatcgctatcgttccggatttatgaatgcgatcgcgcatcccgcagtttagcactggaggagctggcgccgccgaggtgccacttggcccatcatgtttgaaaagtctctatacgacctcatccgaggcttgaggagccacaagggcaacgagagggagtatatccaacagagcttgaaggaatgtcgcgccgagattcgcagccaggacatggacctcaaggctacggccctgttaaagctcatatacctggagatgatgggccacgacatgtcctgggcctccttcaacgtcctcgaggtcatggcttctcccaagtatcaccagaagcgcgtggggtatctgggtgctatccagagctttcgcccggatactgaggtgttgatgcttgctacgaacctgctcaagaaggatttgaccgcagcgtcgacaaccaccatcgcccttcccatcgccacccttccgcacgtcattactccctccctcgctttatcagttctgtccgacctcctcccacgcctgagccacagcaacccagccattcgcaaaaagaccatcgtcactctctaccgactagccctcgtataccccgaaacactccgcgcggcttggcccaagatcaaagaacgcttgatggacaaatctgaagatcccagcgtcaccgctgccatcgtaaatgttgtgtgcgagctaggatggcgtcggcccaacgatttcctccccctcgcgccgagactattcgagctgctcgtggacagcgggaacaactggatggctattaaactgatcaagttgtttgcgacactcacacccctcgagccgagactcgttcgaaagcttctgcccccgttgacagaaatcatccagacgacgcccgccatgtctttactgtatgagtgtatcaatggcattattcagggcggtattctaggaagtggcgaagacacggcagggaaggaagagattgcctcgctctgcgtaaacaaactgcgtagcatggtgctagtcgatggtgacccgaacttaaaatatgtggcactgcttgccttcaacaagatcgtcgatactcatccttggcttgtggctcaacaggaggatgtcatattagaatgcatcgatagtacggacatctctatccgcatcaaagctttagatttagttcagggcatggttagcaacgaaaacttggtctcgatagtcagtcgcttgatgagacagctcaaactatcgtcttcaaatgatcgccaaaacggaggacctacatcaagctcgacccctggtgattcctcagaagacgatctggaaagaaatatcaaccccgcacaaaagtcttcgaatcaactaccgcctcttcctgatgattacagagttgatgtgatcaacagaatcttaacaatgtgttctcagaacaactatagctatctaaccgatttcgagtggtacatcgatatcctcacgcaattagtgcggattgctcccctgccgaaaatggtggatgacaacaacgattctccaggaactgggaagtcaagtcataatgacatatctgagaagatcggcagtgagcttcgaaacgtcgcagtcaaggtgcaagctgtccgctccgcctgtatgcaggccgcagagaccatcgtctctcagctcaaccaagacaccccagctggccgtcttatcatctcccgggcactgggaccagcaacttggatactgggagaatatgcctcagagctgtccatacccgaggacactctggggttgttgctccaggttatcccaaaaatcaactctccggagcctctggccgcaagtcttcaggcggccatgaaagtcttttcgctaactactggagaccaattgcaacgatggagtgcggagcgaaagtccaagatacagctcctgatggcgcgcctcattcatactttcgaaacattcattctgcaccccaatttagaagttcaagagcgggctgttgagttcacagaattgctcaaactgacagcggaagctgcttccagtcaagaagcgtcgaacgaaatggtccatcaggaccctccgctccttcttacccaagccataccgtctttatttgctgggctggaacttcattccgtggctgccggcgcacagaaaaacgtgccgttaccggacggtctagatctcgacgaaccgattcaccctaacctcaactacttactcgcatcggctgattcgatttcgctgcctgctgatgaagtcgatgagttcgaaacgtattatcatcagcgtccaccggcagccagtatctcatccgagccggctatcaaacgcttagtcgaggaaccagagagcgaggtaaactcttaccagcagccaacggaagaatcgtatcttgatgcggacattcttgcgcgacgcagagcggaaagaatagagaagaatcgtgatgatcccttctacattggagagagcagctccttgcagagatcttcgacaccaattcataatatcctacagaactcaaatggtcccgacctcgatgtcgactcgatccctattatggagcttgatctagataaactcagtgccggggtgaaccacgcgcccacgaaaccatcgaagccttccaggccgcgacctcgtcagcaaattgtcattgcggcggacgaaaatctcgctagtagtggtgcgagtacgcccaggaacgactctgaaaacgactctggttcatttgtgtcaaaatctgcgcgtgctaaaaggctaaaacagtctctcctcggtgtcgattcagcaaatattggaagtttcaacctcgagggtgatccagagagtggtgcttacgatcccgaggcgcagcagcgggaggaagtcgaaatggccaaagctatgaaagaagtcgagcgccttcgacttgaaatgcagcgtgccaacgaacgtattcaagttgctcagggtgtcgacgccgctggcactgtcgtcaagaaaaagaaagcatcgacgaaagcaaagaagaagacaagtcccgaagatgatggcgaagctgatggcgaaccaatcaagattgtaaagaagaaaaagaagaaggtagcagagatcgacgaaggcacgggggagacagagcagagtactgtggtgaagccgaagaagaggaaaaaggcaaagccacctgttgagatcgatgaaggggcttgaaggatcaaaagccagttggaagttttaccaacctcgcaagaagaacggacatgctgcagggaaagttcagtaaataaatagaattgcatagcagaaatacatattttttcgctcgggacaattatcactatattcttccatt

SEQ ID NO: 14378 - DNA, 2553 bp, Muscodor strobelii
  misc_feature: SGI cDNA ID NO. 564737
  misc_feature: Encodes the peptide sequence at SEQ ID NO 14379
atgccgggctttacagactccttctggacaccggactatgctgcaggactgggagtcctgtttagcaaactccagcagggtgtccaggagaatcaacagatcctgaccatagcccgcatgcgagccgaggccgaagagatatatggtcaacgtcttggagacatcaccccaacagccgacaagctcgctggcggcttcgctcgtgacgacggcgcgactgtgcgcaaggcttacgatggcatgcgaagcgagatggcagacgctggccggaaccacaagaagatagcacagagcatccgagacctcgtcgtcaacccctttgcacgctggtgcgacgcccacgagtctcgcatccaggattcgcaagatgagctgcagtctcgcatcaaggcccacgatcgtcaagccgaggcagtcaagaagctacggagcaactacttcaacaagtgtcgcttggtagaggacatcgaggaggagaacaagctggctttccaggatcccgagagcagcccaaagggcaaccagaacatccccgagatcaaggtgtctcctcagaaggaggaagaggaggaagaggaagtctacgagatcggagacgagacgtaccaggccgcgcaagtcaagacgatcctgacacacatgatgaataccatcaagatgggcgataccaaagttccgatcttgggtacttatctgaacacctcttgcggttcggacattgttgaatacctgcagagacatatgggttcgaccagtgtcagctacgctgaacgcatcggtcaagatcttgtcgccaatggcttcctgcgcctggttggcaatgttggaaacaattttgcaaacagctccaagctgttctaccagtggcgtcccaaggcttttcagatgtctggactgccagagaaaaaggctgccatctcgcgaactttctctatgcccaatggctctgacgatggctccgactctcccatcactgggatgttggccaactggaacattctcaacaaccaatacccgaatgagacgcccccggaacgtttgcgccgtgaaggcagagaggccgatgacaagtacaaggccggcgtcaagaggctggacgacctgcgttgcgacttggaggaagccatctttgttcacttgcggttcctcgagcgttgcgagttggataggctgaaggctatcaagaccgtaatcctcgacttttcgggcactatcggcaatgttattcccagcttgcaatctagcgtggaccagatggtactctaccaagaaaccatccagcccgtcggcgatctacggtatctactcgagaactaccgaacaggtcgttttgctcccaaggtcatcacgtatgagaactactacaacaaggttgatgagcagaccttcggtgtagatctggaggcccgcgcaagagccgacaagaagcgtgttcccatcatcgtgacaacactgcttacatatcttgatcatcactatccagaccttgaaggcgacgaggccagacgaggaatatggctcacggatgtacaacttcctcaagtccactcgttgcgggccaaggtcaataacggcaaagctgtcgccccggaaatcctcgcagaatatgacgttccaactattgcccacctattaaagctttatctactagagttgcccgactcacttgtttcctctcacgtttatgaaattgttcgaactatttacactacccctactactgctgagtcttcagacgaggggcgcattgccgtcttacagcaaactctttcacagctacgccttacgaatatcgccacgcttgatgcctgcatgaaccattttacgagactgatagatcttacctcggcggatgaggaatatgtctccaacttggcattggtattggctccctgtatcctgagaccaagaacggaaacatccttgacgatggaagagaagcacgcctgccgcctcatcagggatttattcacccataaggatgccattttcagtgagctgaagcgcatgtcgagtctgacccactcgacctccgtcactcaaaacaatcggccccgagctattagtacagacgagagcaatagaagagctcacatggaggaacgccaacgtgccctactcgagcagaaggcaggaggaccccgtggccgcgacagaagcccggcgcctagtccgcgtggtcacagacgcgaccgtagtaccggtggtccagagacacgcttccccatcatcgccagcccaactgctgctgggaacgagcgccaccgcagcagtctcggtgcatctctgaataagaggcagagtctcgaggttcccgacggagctggtctcccacctgcggaagtgaacggtggctcgaacggggctgattcaccaaagcaggatggcgaaggccctttatcgaagcgtgatagtctgggacggaccggcgccaggttcgtaggtggtcgacgagtcacgcaaggaagtgcgccaggaaccccaaaactcggggctactgaggaacaggaagatcggggtgtgacacttgtcgatgcgccgatgaacgactag

SEQ ID NO: 14379 - protein, 850 aa, Muscodor strobelii
  misc_feature: SGI Peptide ID NO. 564737
  misc_feature (214)..(296): Pfam Id: PF00610 Pfam Desc: Domain found in Dishevelled, Egl-10, and Pleckstrin
  misc_feature (6)..(99): Pfam Id: PF00611 Pfam Desc: Fes/CIP4 homology domain
  misc_feature (479)..(643): Pfam Id: PF00620 Pfam Desc: RhoGAP domain
  misc_feature (514)..(643): Pfam Id: PF00620 Pfam Desc: RhoGAP domain
  misc_feature (1)..(850): NCBI GI: 145602644 Blast Desc: MGG_09531 [Magnaporthe grisea 70-15] gi|145011035|gb|EDJ95691.1| MGG_09531 [Magnaporthe grisea 70-15]
  misc_feature (3)..(850): NCBI GI: 189193649 Blast Desc: Rho-GTPase-activating protein 8 [Pyrenophora tritici-repentis Pt-1C-BFP] gi|187978727|gb|EDU45353.1| Rho-GTPase-activating protein 8 [Pyrenophora tritici-repentis
  misc_feature (2)..(779): NCBI GI: 156061885 Blast Desc: SS1G_03088 [Sclerotinia sclerotiorum 1980] gi|154700489|gb|EDO00228.1| SS1G_03088 [Sclerotinia sclerotiorum 1980]
  misc_feature (2)..(779): NCBI GI: 154311720 Blast Desc: BC1G_06319 [Botryotinia fuckeliana B05.10] gi|150850830|gb|EDN26023.1| BC1G_06319 [Botryotinia fuckeliana B05.10]
  misc_feature (3)..(850): NCBI GI: 169601600 Blast Desc: SNOG_03668 [Phaeosphaeria nodorum SN15] gi|160705973|gb|EAT88873.2| SNOG_03668 [Phaeosphaeria nodorum SN15]
  misc_feature (1)..(850): NCBI GI: 119177063 Blast Desc: CIMG_07524 [Coccidioides immitis RS]
  misc_feature (1)..(850): NCBI GI: 240107779 Blast Desc: RhoGAP domain containing protein [Coccidioides posadasii C735 delta SOWgp]
  misc_feature (1)..(850): NCBI GI: 258564486 Blast Desc: conserved [Uncinocarpus reesii 1704] gi|237908495|gb|EEP82896.1| conserved [Uncinocarpus reesii 1704]
  misc_feature (1)..(850): NCBI GI: 119482648 Blast Desc: RhoGAP and Fes/CIP4 domain protein [Neosartorya fischeri NRRL 181] gi|119409507|gb|EAW19455.1| RhoGAP and Fes/CIP4 domain protein [Neosartorya fischeri NRRL 181]
  misc_feature (1)..(850): NCBI GI: 154275876 Blast Desc: conserved [Ajellomyces capsulatus NAm1] gi|150413856|gb|EDN09221.1| conserved [Ajellomyces capsulatus NAm1]
MPGFTDSFWTPDYAAGLGVLFSKLQQGVQENQQILTIARMRAEAEEIYGQRLGDITPTADKLAGGFARDDGATVRKAYDGMRSEMADAGRNHKKIAQSIRDLVVNPFARWCDAHESRIQDSQDELQSRIKAHDRQAEAVKKLRSNYFNKCRLVEDIEEENKLAFQDPESSPKGNQNIPEIKVSPQKEEEEEEEVYEIGDETYQAAQVKTILTHMMNTIKMGDTKVPILGTYLNTSCGSDIVEYLQRHMGSTSVSYAERIGQDLVANGFLRLVGNVGNNFANSSKLFYQWRPKAFQMSGLPEKKAAISRTFSMPNGSDDGSDSPITGMLANWNILNNQYPNETPPERLRREGREADDKYKAGVKRLDDLRCDLEEAIFVHLRFLERCELDRLKAIKTVILDFSGTIGNVIPSLQSSVDQMVLYQETIQPVGDLRYLLENYRTGRFAPKVITYENYYNKVDEQTFGVDLEARARADKKRVPIIVTTLLTYLDHHYPDLEGDEARRGIWLTDVQLPQVHSLRAKVNNGKAVAPEILAEYDVPTIAHLLKLYLLELPDSLVSSHVYEIVRTIYTTPTTAESSDEGRIAVLQQTLSQLRLTNIATLDACMNHFTRLIDLTSADEEYVSNLALVLAPCILRPRTETSLTMEEKHACRLIRDLFTHKDAIFSELKRMSSLTHSTSVTQNNRPRAISTDESNRRAHMEERQRALLEQKAGGPRGRDRSPAPSPRGHRRDRSTGGPETRFPIIASPTAAGNERHRSSLGASLNKRQSLEVPDGAGLPPAEVNGGSNGADSPKQDGEGPLSKRDSLGRTGARFVGGRRVTQGSAPGTPKLGATEEQEDRGVTLVDAPMND

SEQ ID NO: 14380 - DNA, 3526 bp, Muscodor strobelii
  misc_feature: SGI EST ID NO. CUFF.34223.0
  misc_feature: Variant of the nucleotide sequence at SEQ ID NO 14378
ccgaactggagaaacacgaaacggcaggcaggattcgtttcgtctgatattgttttgctcgctcttgaatcttttttcaattcttgtgtgctgacgacacggcggatcttgcttgtattacgatttgtatcctagaatacttacctcattttgacacgcctgcctgcattttattttttctgttctttgtctgtacctaagcagcgtgcaggtccgggtctgcgccatccaatcgacgacgcatcgcaccgcgaattggaacggccgcctgagttgtgacacctccctgtagatcagcagtcgattgcacagagagcaaacgggcggcgtcgctcgttgcttctattctcagccaccgtcgacaatcgcgaatcgcaagtcgcacgactgtctaaaccgacccgtcaccccattttccatccagactcccactttcgattaatccgagctctacgtgcagcccctatcgacgacgacgacgcaccaacgcctgcggcccaaccaacaaccacttcgacctggaattttgtgcgccgtcgccatgccgggctttacagactccttctggacaccggactatgctgcaggactgggagtcctgtttagcaaactccagcagggtgtccaggagaatcaacagatcctgaccatagcccgcatgcgagccgaggccgaagagatatatggtcaacgtcttggagacatcaccccaacagccgacaagctcgctggcggcttcgctcgtgacgacggcgcgactgtgcgcaaggcttacgatggcatgcgaagcgagatggcagacgctggccggaaccacaagaagatagcacagagcatccgagacctcgtcgtcaacccctttgcacgctggtgcgacgcccacgagtctcgcatccaggattcgcaagatgagctgcagtctcgcatcaaggcccacgatcgtcaagccgaggcagtcaagaagctacggagcaactacttcaacaagtgtcgcttggtagaggacatcgaggaggagaacaagctggctttccaggatcccgagagcagcccaaagggcaaccagaacatccccgagatcaaggtgtctcctcagaaggaggaagaggaggaagaggaagtctacgagatcggagacgagacgtaccaggccgcgcaagtcaagacgatcctgacacacatgatgaataccatcaagatgggcgataccaaagttccgatcttgggtacttatctgaacacctcttgcggttcggacattgttgaatacctgcagagacatatgggttcgaccagtgtcagctacgctgaacgcatcggtcaagatcttgtcgccaatggcttcctgcgcctggttggcaatgttggaaacaattttgcaaacagctccaagctgttctaccagtggcgtcccaaggcttttcagatgtctggactgccagagaaaaaggctgccatctcgcgaactttctctatgcccaatggctctgacgatggctccgactctcccatcactgggatgttggccaactggaacattctcaacaaccaatacccgaatgagacgcccccggaacgtttgcgccgtgaaggcagagaggccgatgacaagtacaaggccggcgtcaagaggctggacgacctgcgttgcgacttggaggaagccatctttgttcacttgcggttcctcgagcgttgcgagttggataggctgaaggctatcaagaccgtaatcctcgacttttcgggcactatcggcaatgttattcccagcttgcaatctagcgtggaccagatggtactctaccaagaaaccatccagcccgtcggcgatctacggtatctactcgagaactaccgaacaggtcgttttgctcccaaggtcatcacgtatgagaactactacaacaaggttgatgagcagaccttcggtgtagatctggaggcccgcgcaagagccgacaagaagcgtgttcccatcatcgtgacaacactgcttacatatcttgatcatcactatccagaccttgaaggcgacgaggccagacgaggaatatggctcacggatgtacaacttcctcaagtccactcgttgcgggccaaggtcaataacggcaaagctgtcgccccggaaatcctcgcagaatatgacgttccaactattgcccacctattaaagctttatctactagagttgcccgactcacttgtttcctctcacgtttatgaaattgttcgaactatttacactacccctactactgctgagtcttcagacgaggggcgcattgccgtcttacagcaaactctttcacagctacgccttacgaatatcgccacgcttgatgcctgcatgaaccattttacgagactgatagatcttacctcggcggatgaggaatatgtctccaacttggcattggtattggctccctgtatcctgagaccaagaacggaaacatccttgacgatggaagagaagcacgcctgccgcctcatcagggatttattcacccataaggatgccattttcagtgagctgaagcgcatgtcgagtctgacccactcgacctccgtcactcaaaacaatcggccccgagctattagtacagacgagagcaatagaagagctcacatggaggaacgccaacgtgccctactcgagcagaaggcaggaggaccccgtggccgcgacagaagcccggcgcctagtccgcgtggtcacagacgcgaccgtagtaccggtggtccagagacacgcttccccatcatcgccagcccaactgctgctgggaacgagcgccaccgcagcagtctcggtgcatctctgaataagaggcagagtctcgaggttcccgacggagctggtctcccacctgcggaagtgaacggtggctcgaacggggctgattcaccaaagcaggatggcgaaggccctttatcgaagcgtgatagtctgggacggaccggcgccaggttcgtaggtggtcgacgagtcacgcaaggaagtgcgccaggaaccccaaaactcggggctactgaggaacaggaagatcggggtgtgacacttgtcgatgcgccgatgaacgactagtagtccactcttcgcccaatatgagacagtgtagttgatcaacctatctagcgaccgatggaggcggaggcaaactgtgtggaatacataatgacaagacaagacagaactcactttcaaggttgaaagtgagaagtgagctgaagtgttatttagtgtataatgttctttgggagccggtgctgaattaaatcttcgatttatgacaaaggctatatcatgactttccttcgtggcgcggatcgtgcttacggttgttggttatacgaggaattcgcattcctgtacgcagcaatgtgattgtacgtatcgtggtaatgatcacagtctgctttcggttgacgtgttacaaacattccatttcatcaaccaagagcagtgacaagaaccaacataatgccaacgacaacaaagctttgtcgtatggcttat

SEQ ID NO: 14381 - DNA, 1371 bp, Muscodor strobelii
  misc_feature: SGI cDNA ID NO. 564738
  misc_feature: Encodes the peptide sequence at SEQ ID NO 14382
atgtccgataagcttctcctcgaagaggatatctcgaaacggcaaccaccaagctcgagaaagccattggcaaaagcattcgtgctgaccactttactactaactcttctcggaacactcacgattccaaggacacaatgcactcaagctatcaatggtgccttcaacggcagaatgtccgttgagggtcgagctcataatattctctcaaagaccccattgattgacggacacaatgacctcgcaataatgatccgcgtgttatacaacaaccacatctataactccaacttcactgagcccttcgagaagggcggtatgcgacagcatgtcgatctccctcgtctacgtgacggacaaaacggcggagccttctggagtgtgttcacaccatgcccggaaaatggccaggactactcagatgacaattatgctgccagcgtgcagctgaccctccagcaaatcgatctcatgacacggctacaagccctctatccagactcattctcgggtctcccactatccgccacgggcgccaaatctgcttttaaagaaggaaagctcatctctcccctgggaatcgaagggctccaccaaatcggtaattctgtcgccaacttgcgacgctttcacgctcttggtgttagatatgcaacattaacacataactgcggaaatatttacgccgacgcggcattatgggagaaccccttccacaaggctcctgcatactggggcggtgtctctcttaagggtagacaactgattaatgagatgaacagaattggcatgattgtcgatctgagccataccagtgtggacactatggtcgatgtgctgaaggggagagatggatggacgggaagcagggcaccggtcatgtttagtcatagcagcgcttttgcgctttgcccgcacccgagaaatgtgccggattttgtgctaaaacttgtcaaggagacgaattcagtcgtcatgatcaattttgcccctgactttgtcagctgtgtcgataacgggaacgaaaacggggttccggatctgttcccgcccaacaacaccctttcgcatgttgttgatcacatcacgtatatcggcgatttaatcgggtatgagcacgtcggtcttggcagtgactttgatgggataggttccacgcccgagggactggacgacgtatcgaagtatccagatctcgtagctgagctattgcgtcgtggtgtgtcggatgaggatgcggccaaggtcgttggcggcaatatcttacgcgtatgggaggacgttgagaaggtagctgcgaagatgcaggctgatggcgagccggttatggaggacgatttaccgagctttgggcactttgcacttgattag

SEQ ID NO: 14382 - protein, 456 aa, Muscodor strobelii
  misc_feature: SGI Peptide ID NO. 564738
  misc_feature (67)..(427): Pfam Id: PF01244 Pfam Desc: Membrane dipeptidase (Peptidase family M19)
  misc_feature (60)..(450): NCBI GI: 85091142 Blast Desc: NCU09538 [Neurospora crassa OR74A] gi|28920141|gb|EAA29521.1| NCU09538 [Neurospora crassa OR74A] gi|38566866|emb|CAE76172.1| related to membrane dipeptidase
  misc_feature (11)..(448): NCBI GI: 39961443 Blast Desc: MGG_09530 [Magnaporthe grisea 70-15] gi|145011033|gb|EDJ95689.1| MGG_09530 [Magnaporthe grisea 70-15]
  misc_feature (56)..(450): NCBI GI: 256731271 Blast Desc: [Nectria haematococca mpVI 77-13-4]
  misc_feature (17)..(450): NCBI GI: 261355653 Blast Desc: dipeptidase [Verticillium albo-atrum VaMs.102]
  misc_feature (56)..(450): NCBI GI: 46126119 Blast Desc: FG07437.1 [Gibberella zeae PH-1]
  misc_feature (20)..(447): NCBI GI: 154311722 Blast Desc: BC1G_06320 [Botryotinia fuckeliana B05.10] gi|150850831|gb|EDN26024.1| BC1G_06320 [Botryotinia fuckeliana B05.10]
  misc_feature (13)..(447): NCBI GI: 145230551 Blast Desc: An01g11740 [Aspergillus niger] gi|134055703|emb|CAK44076.1| protein product [Aspergillus niger]
  misc_feature (59)..(448): NCBI GI: 238490948 Blast Desc: dipeptidase, [Aspergillus flavus NRRL3357] gi|220697124|gb|EED53465.1| dipeptidase, [Aspergillus flavus NRRL3357]
  misc_feature (61)..(451): NCBI GI: 242803425 Blast Desc: membrane dipeptidase GliJ [Talaromyces stipitatus ATCC 10500] gi|218717516|gb|EED16937.1| membrane dipeptidase GliJ [Talaromyces stipitatus ATCC 10500]
  misc_feature (60)..(448): NCBI GI: 212539906 Blast Desc: dipeptidase, [Penicillium marneffei ATCC 18224] gi|210067407|gb|EEA21499.1| dipeptidase, [Penicillium marneffei ATCC 18224]
  misc_feature (64)..(447): SWISSPROT Homolog: EC 3.4.13.19 Membrane dipeptidase
MSDKLLLEEDISKRQPPSSRKPLAKAFVLTTLLLTLLGTLTIPRTQCTQAINGAFNGRMSVEGRAHNILSKTPLIDGHNDLAIMIRVLYNNHIYNSNFTEPFEKGGMRQHVDLPRLRDGQNGGAFWSVFTPCPENGQDYSDDNYAASVQLTLQQIDLMTRLQALYPDSFSGLPLSATGAKSAFKEGKLISPLGIEGLHQIGNSVANLRRFHALGVRYATLTHNCGNIYADAALWENPFHKAPAYWGGVSLKGRQLINEMNRIGMIVDLSHTSVDTMVDVLKGRDGWTGSRAPVMFSHSSAFALCPHPRNVPDFVLKLVKETNSVVMINFAPDFVSCVDNGNENGVPDLFPPNNTLSHVVDHITYIGDLIGYEHVGLGSDFDGIGSTPEGLDDVSKYPDLVAELLRRGVSDEDAAKVVGGNILRVWEDVEKVAAKMQADGEPVMEDDLPSFGHFALD

SEQ ID NO: 14383 - DNA, 2055 bp, Muscodor strobelii
  misc_feature: SGI EST ID NO. CUFF.34228.0
  misc_feature: Variant of the nucleotide sequence at SEQ ID NO 14381
agttgacctcgtaacgggagatgaccagcttggaacaaatctgagcgggatctcaaaactatgaggataacgagatgcgaactcatgttctcaggatttgacagctggcgccgacagagaggatgcgacgtcagtttcagccctatcgtcgccaatatatcatgatccgccattcgggtttaaactacccagtgctttcgggaattcaggggtggacgacgctaggctggctaatgtaacgccgcttacatatcaccgtgatgtgaagacgaccttatcagacaactcgatgcggatgaaacggacattgcattgagaagactgaagtttcttcagcagctagatcatatcacttcttgttgtagagtgacatcccgtttaccgagctttcggatctggaacccccacgaaatctaaatgaaattagcttaacgtctaccgcgagaacgtttccaagatgtccgataagcttctcctcgaagaggatatctcgaaacggcaaccaccaagctcgagaaagccattggcaaaagcattcgtgctgaccactttactactaactcttctcggaacactcacgattccaaggacacaatgcactcaagctatcaatggtgccttcaacggcagaatgtccgttgagggtcgagctcataatattctctcaaagaccccattgattgacggacacaatgacctcgcaataatgatccgcgtgttatacaacaaccacatctataactccaacttcactgagcccttcgagaagggcggtatgcgacagcatgtcgatctccctcgtctacgtgacggacaaaacggcggagccttctggagtgtgttcacaccatgcccggaaaatggccaggactactcagatgacaattatgctgccagcgtgcagctgaccctccagcaaatcgatctcatgacacggctacaagccctctatccagactcattctcgggtctcccactatccgccacgggcgccaaatctgcttttaaagaaggaaagctcatctctcccctgggaatcgaagggctccaccaaatcggtaattctgtcgccaacttgcgacgctttcacgctcttggtgttagatatgcaacattaacacataactgcggaaatatttacgccgacgcggcattatgggagaaccccttccacaaggctcctgcatactggggcggtgtctctcttaagggtagacaactgattaatgagatgaacagaattggcatgattgtcgatctgagccataccagtgtggacactatggtcgatgtgctgaaggggagagatggatggacgggaagcagggcaccggtcatgtttagtcatagcagcgcttttgcgctttgcccgcacccgagaaatgtgccggattttgtgctaaaacttgtcaaggagacgaattcagtcgtcatgatcaattttgcccctgactttgtcagctgtgtcgataacgggaacgaaaacggggttccggatctgttcccgcccaacaacaccctttcgcatgttgttgatcacatcacgtatatcggcgatttaatcgggtatgagcacgtcggtcttggcagtgactttgatgggataggttccacgcccgagggactggacgacgtatcgaagtatccagatctcgtagctgagctattgcgtcgtggtgtgtcggatgaggatgcggccaaggtcgttggcggcaatatcttacgcgtatgggaggacgttgagaaggtagctgcgaagatgcaggctgatggcgagccggttatggaggacgatttaccgagctttgggcactttgcacttgattagagcgcattggttcgaccacttcagcatcatctcggacatgaaatctaaggctcgaacaccaagctctattgatttatttggacatataaatagacgattggaacacaatgtgatgggttcttaaaatagtggtctaaactaatgcgtttgggaattgtgtacaagaacagttagttctcataagaaacacaatagcgtaacacttcagtagctcaattgctctccat

SEQ ID NO: 14384 - DNA, 375 bp, Muscodor strobelii
  misc_feature: SGI cDNA ID NO. 564739
  misc_feature: Encodes the peptide sequence at SEQ ID NO 14385
atggtttccatattaggagcaaacttccacgagaggaagctcgtcaagaaagccctcgagagcttctacggcctcgggccccaggcctccgcacgcatcatggccaaatacacaatccatccgaccgcacgactcggaactatagccgcgaagacggtaaccgcattgacagccgagctatcgaatatgaccatagaaaacgatgcccggcgcattgtacaagacaacatcaagcgcctcagagatatgggtacgtaccgcggtcgtcgccacgccatgggtctgcccgttcgtggccagagaacacgcacgcagattgagacggccaagaaattgaacacgctcgagcgtggtggatacggaagacgtggttag

SEQ ID NO: 14385 - protein, 124 aa, Muscodor strobelii
  misc_feature: SGI Peptide ID NO. 564739
  misc_feature (3)..(111): Pfam Id: PF00416 Pfam Desc: Ribosomal protein S13/S18
  misc_feature (4)..(104): Pfam Id: PF00416 Pfam Desc: Ribosomal protein S13/S18
  misc_feature (1)..(119): NCBI GI: 85091144 Blast Desc: NCU09539 [Neurospora crassa OR74A] gi|28920142|gb|EAA29522.1| NCU09539 [Neurospora crassa OR74A] gi|38566865|emb|CAE76171.1| ribosomal protein S13 [Neurospora
  misc_feature (1)..(117): NCBI GI: 39961431 Blast Desc: MGG_09529 [Magnaporthe grisea 70-15] gi|145011032|gb|EDJ95688.1| MGG_09529 [Magnaporthe grisea 70-15]
  misc_feature (1)..(117): NCBI GI: 261355654 Blast Desc: mitochondrial 37S ribosomal protein SWS2 [Verticillium albo-atrum VaMs.102]
  misc_feature (1)..(119): NCBI GI: 171693473 Blast Desc: protein product [Podospora anserina] gi|170946685|emb|CAP73488.1| protein product [Podospora anserina]
  misc_feature (1)..(119): NCBI GI: 46126121 Blast Desc: FG07438.1 [Gibberella zeae PH-1]
  misc_feature (1)..(119): NCBI GI: 116206296 Blast Desc: CHGG_02441 [Chaetomium globosum CBS 148.51] gi|88183038|gb|EAQ90506.1| CHGG_02441 [Chaetomium globosum CBS 148.51]
  misc_feature (1)..(122): NCBI GI: 189193877 Blast Desc: 30S ribosomal protein S13 [Pyrenophora tritici-repentis Pt-1C-BFP] gi|187978841|gb|EDU45467.1| 30S ribosomal protein S13 [Pyrenophora tritici-repentis Pt-1C-BFP]
  misc_feature (1)..(119): NCBI GI: 256730898 Blast Desc: [Nectria haematococca mpVI 77-13-4]
  misc_feature (1)..(113): NCBI GI: 169602162 Blast Desc: SNOG_03960 [Phaeosphaeria nodorum SN15] gi|160706096|gb|EAT89165.2| SNOG_03960 [Phaeosphaeria nodorum SN15]
  misc_feature (1)..(117): NCBI GI: 240107114 Blast Desc: mitochondrial 37S ribosomal protein SWS2, [Coccidioides posadasii C735 delta SOWgp]
MVSILGANFHERKLVKKALESFYGLGPQASARIMAKYTIHPTARLGTIAAKTVTALTAELSNMTIENDARRIVQDNIKRLRDMGTYRGRRHAMGLPVRGQRTRTQIETAKKLNTLERGGYGRRG

SEQ ID NO: 14386 - DNA, 811 bp, Muscodor strobelii
  misc_feature: SGI EST ID NO. CUFF.34238.0
  misc_feature: Variant of the nucleotide sequence at SEQ ID NO 14384
gcgagtttgaagtcatccatcgaaacgagttgccaaccttaggcgtgaggagtctgaccacagcctaagatggtttccatattaggagcaaacttccacgagaggaagctcgtcaagaaagccctcgagagcttctacggcctcgggccccaggcctccgcacgcatcatggccaaatacacaatccatccgaccgcacgactcggaactatagccgcgaagacggtaaccgcattgacagccgagctatcgaatatgaccatagaaaacgatgcccggcgcattgtacaagacaacatcaagcgcctcagagatatgggtacgtaccgcggtcgtcgccacgccatgggtctgcccgttcgtggccagagaacacgcacgcagattgagacggccaagaaattgaacacgctcgagcgtggtggatacggaagacgtggttagagtatcggtgatgggatatcatgatcaatttatggacctgagctataccaacgattccccgaattgcttcgcgcatggacgatgatcgaagacggaactcgactcatcataaaagctgacggacggaactgagggatatgcgatgaatgagggagtaaatcgcaaaaaaatagtgagaaatccacctacgccgcaatcagatggcctgttgtgagattgatgttgtatctctacaatttgcatgatatattagggcggcgttatagaaggatggcaagaattgccagaaaagatgtaccaccatcatgctgagagtcttgcagccatttgtataataaaaacaaaattcacacgtaacctaggtcca

SEQ ID NO: 14387 - DNA, 867 bp, Muscodor strobelii
  misc_feature: SGI cDNA ID NO. 564740
  misc_feature: Encodes the peptide sequence at SEQ ID NO 14388
atgttgaaccttcgcaacttctttctcggcgtcttgctgatgctgggcatcagcgtggccctgctctcccagcccgctgaagccaccaagggtcccaagatcacccacaaggtctacttcgacatccagcagggcgacgaggttctcggccgcgtcacctttggtctgtacggcaagaccgtccccaagaccgccgagaacttccgtgcccttgccactggcgagaatggttatggctacaagggctcgaccttccaccgtgtcatcaagcagttcatgatccagggcggtgacttcaccaaccacgacggcactggtggcaagtccatctacggcaacaagttccccgatgagaacttcaagctgaagcactccaagcccggtctgttgtccatggccaacgccggcaaggacaccaacggctcccagttcttcattaccaccgtcatcacctcctggcttgacggccgtcatgtcgtcttcggcgaggtgctggagggcatggacattataaccaagattgagaacaccaagaccaagccaggcgataagcccgaggtcactatcagcatcgcggatagcggcgagttggaggttccacccgaagaactcaagatcctctatggtcacgccgagtgggcatcaggccactcggacgagatcgaggagtctggcagcagcgaacccgacctgccctacaaggccgccacacccagccttggcgagatggcatccaccgctgagggctctgccgtgcaaaaaggtgtcttgttcttcattgttatcggcgccatagctggttacatccgctggacgagaaagagggaagaggtgaatactcaggggtgggagaagactatggcgtag

SEQ ID NO: 14388 - protein, 288 aa, Muscodor strobelii
  misc_feature: SGI Peptide ID NO. 564740
  misc_feature (37)..(197): Pfam Id: PF00160 Pfam Desc: Cyclophilin type peptidyl-prolyl cis-trans isomerase/CLD
  misc_feature (1)..(206): NCBI GI: 116199101 Blast Desc: CHGG_07706 [Chaetomium globosum CBS 148.51] gi|88178985|gb|EAQ86453.1| CHGG_07706 [Chaetomium globosum CBS 148.51]
  misc_feature (8)..(284): NCBI GI: 164426125 Blast Desc: peptidyl-prolyl cis-trans isomerase B precursor [Neurospora crassa OR74A] gi|166215079|sp|Q7S7Z6.3|PPIB_NEUCR RecName: Full=Peptidyl-prolyl cis-trans isomerase B; Short=PPIase
  misc_feature (1)..(206): NCBI GI: 261355655 Blast Desc: peptidyl-prolyl cis-trans isomerase B [Verticillium albo-atrum VaMs.102]
  misc_feature (1)..(206): NCBI GI: 171692901 Blast Desc: protein product [Podospora anserina] gi|170946399|emb|CAP73200.1| protein product [Podospora anserina]
  misc_feature (8)..(206): NCBI GI: 164426123 Blast Desc: peptidyl-prolyl cis-trans isomerase B precursor [Neurospora crassa OR74A] gi|18376309|emb|CAD21421.1| cyclophilin [Neurospora crassa] gi|157071207|gb|EDO65213.1| peptidyl-prolyl B
  misc_feature (1)..(277): NCBI GI: 156042834 Blast Desc: peptidyl-prolyl cis-trans isomerase B [Sclerotinia sclerotiorum 1980] gi|154695601|gb|EDN95339.1| peptidyl-prolyl cis-trans isomerase B [Sclerotinia sclerotiorum 1980]
  misc_feature (1)..(277): NCBI GI: 154313502 Blast Desc: BC1G_05448 [Botryotinia fuckeliana B05.10] gi|150849517|gb|EDN24710.1| BC1G_05448 [Botryotinia fuckeliana B05.10]
  misc_feature (1)..(206): NCBI GI: 256731270 Blast Desc: [Nectria haematococca mpVI 77-13-4]
  misc_feature (20)..(245): NCBI GI: 212537639 Blast Desc: peptidyl-prolyl cis-trans isomerase (CypB), [Penicillium marneffei ATCC 18224] gi|210068717|gb|EEA22808.1| peptidyl-prolyl cis-trans isomerase (CypB), [Penicillium ATCC
  misc_feature (1)..(212): NCBI GI: 189193875 Blast Desc: peptidyl-prolyl cis-trans isomerase B precursor [Pyrenophora tritici-repentis Pt-1C-BFP] gi|187978840|gb|EDU45466.1| peptidyl-prolyl cis-trans isomerase B
  misc_feature (8)..(284): SWISSPROT Homolog: EC 5.2.1.8 Peptidylprolyl isomerase
MLNLRNFFLGVLLMLGISVALLSQPAEATKGPKITHKVYFDIQQGDEVLGRVTFGLYGKTVPKTAENFRALATGENGYGYKGSTFHRVIKQFMIQGGDFTNHDGTGGKSIYGNKFPDENFKLKHSKPGLLSMANAGKDTNGSQFFITTVITSWLDGRHVVFGEVLEGMDIITKIENTKTKPGDKPEVTISIADSGELEVPPEELKILYGHAEWASGHSDEIEESGSSEPDLPYKAATPSLGEMASTAEGSAVQKGVLFFIVIGAIAGYIRWTRKREEVNTQGWEKTMA

SEQ ID NO: 14389 - DNA, 1647 bp, Muscodor strobelii
  misc_feature: SGI EST ID NO. CUFF.34240.0
  misc_feature: Variant of the nucleotide sequence at SEQ ID NO 14387
cttagacggtagatagcagaattgggggtccttcgggtttcaccccgcatgccattcgcaagctgtgacgctagactcgcagcccattcaggggggtcgtatcggattgaacaccaccacacctttgaagcttctgtgtcctctttctcctctctctttctttaaatagcgtagcagttggaccatcacatcccgctgtccactactcgatcagttttctcttctgttcaatcttaattggttgatcgaggacatcgttaaccatgttgaaccttcgcaacttctttctcggcgtcttgctgatgctgggcatcagcgtggccctgctctcccagcccgctgaagccaccaagggtcccaagatcacccacaaggtctacttcgacatccagcagggcgacgaggttctcggccgcgtcacctttggtctgtacggcaagaccgtccccaagaccgccgagaacttccgtgcccttgccactggcgagaatggttatggctacaagggctcgaccttccaccgtgtcatcaagcagttcatgatccagggcggtgacttcaccaaccacgacggcactggtggcaagtccatctacggcaacaagttccccgatgagaacttcaagctgaagcactccaagcccggtctgttgtccatggccaacgccggcaaggacaccaacggctcccagttcttcattaccaccgtcatcacctcctggcttgacggccgtcatgtcgtcttcggcgaggtgctggagggcatggacattataaccaagattgagaacaccaagaccaagccaggcgataagcccgaggtcactatcagcatcgcggatagcggcgagttggaggttccacccgaaggtattcacgtggagctatagatacacacacacaattgcactgaacacataccataccacccccgaacacatgtatcgtaccgcatttcttttaaaatggctggtcggctcgtgaaaatcagaggaagaaagaaaaaagcatcattactagaaccgcttgccgttccgtacattcccatttgccattgtgtcgtacatcttaatcaagtcagatcgctgatacgtagtgtcttccgcatgaatagaactcaagatcctctatggtcacgccgagtgggcatcaggccactcggacgagatcgaggagtctggcagcagcgaacccgacctgccctacaaggccgccacacccagccttggcgagatggcatccaccgctgagggctctgccgtgcaaaaaggtgtcttgttcttcattgttatcggcgccatagctggttacatccgctggacgagaaagagggaagaggtgaatactcaggggtgggagaagactatggcgtagagaatttgtataaagcagaactgtatatgggactgagattttggtgaggatagagtatacatatcttggaatttctagattttttttgggctcggtggatgatgacggatgctgggggctgttgtattatatgagttgcttcttggagatatgtttgataatagtgaaacatgttggaagatctgtaccacattgattcccaaacattactgttccctgccttgatgtccgaatttggacgtcatgctccgtatcgtcctgattgggctatca

SEQ ID NO: 14390 - DNA, 384 bp, Muscodor strobelii
  misc_feature: SGI cDNA ID NO. 564741
  misc_feature: Reduced expression when VOC is produced
  misc_feature: Encodes the peptide sequence at SEQ ID NO 14391
atgaaagtcctaagcctaaacttcctgacctgcgcggtcaaagcctgcaagacgaactcagactcatacccactgcaccctaaggatgcagagctggtatcagacgacatcgagttgaatgaggagtttatcgtcaatcttctgcctagaatcgattggcctgggcttgcgaccacagctacagagctcggctttccacccctccccgccatagcgccgacccctgagtctttacgtgcagacgagaagacaatgaaagacctgcataatctacttctcgagacacagatgatggagggcaagctcatctgcaaggcctgtggccacgagtatcaggtgcgagagggtattgcgaatttcttgttgccatctcacctcgtctaa

SEQ ID NO: 14391 - protein, 127 aa, Muscodor strobelii
  misc_feature: SGI Peptide ID NO. 564741
  misc_feature (2)..(116): Pfam Id: PF03966 Pfam Desc: Trm112p-like protein
  misc_feature (1)..(127): NCBI GI: 261355656 Blast Desc: trm112p-like protein [Verticillium albo-atrum VaMs.102]
  misc_feature (1)..(127): NCBI GI: 46126125 Blast Desc: FG07440.1 [Gibberella zeae PH-1]
  misc_feature (1)..(127): NCBI GI: 145612073 Blast Desc: MGG_12272 [Magnaporthe grisea 70-15] gi|145019319|gb|EDK03547.1| MGG_12272 [Magnaporthe grisea 70-15]
  misc_feature (1)..(127): NCBI GI: 85103652 Blast Desc: NCU01201 [Neurospora crassa OR74A] gi|47606194|sp|Q8X0S4.1|TR112_NEUCR RecName: Full=Protein trm-112; AltName: Full=tRNA methyltransferase 112 conserved
  misc_feature (1)..(127): NCBI GI: 171692903 Blast Desc: protein product [Podospora anserina] gi|170946400|emb|CAP73201.1| protein product [Podospora anserina]
  misc_feature (1)..(127): NCBI GI: 156061823 Blast Desc: SS1G_03057 [Sclerotinia sclerotiorum 1980] gi|154700458|gb|EDO00197.1| SS1G_03057 [Sclerotinia sclerotiorum 1980]
  misc_feature (1)..(126): NCBI GI: 70991349 Blast Desc: adoMet-dependent tRNA methyltransferase (MTase) complex subunit Trm112 [Aspergillus fumigatus Af293] gi|66848156|gb|EAL88485.1| adoMet-dependent tRNA (MTase) complex
  misc_feature (1)..(126): NCBI GI: 121709860 Blast Desc: DUF343 domain protein [Aspergillus clavatus NRRL 1] gi|119400696|gb|EAW11120.1| DUF343 domain protein [Aspergillus clavatus NRRL 1]
  misc_feature (1)..(127): NCBI GI: 242786325 Blast Desc: adoMet-dependent tRNA methyltransferase (MTase) complex subunit Trm112, [Talaromyces stipitatus ATCC 10500] gi|218720930|gb|EED20349.1| adoMet-dependent tRNA (MTase) complex
  misc_feature (1)..(127): NCBI GI: 255938626 Blast Desc: Pc14g00890 [Penicillium chrysogenum Wisconsin 54-1255] gi|211584704|emb|CAP74230.1| Pc14g00890 [Penicillium chrysogenum Wisconsin 54-1255]
  misc_feature: Useful for introducing or modulating the production of volatile compounds
MKVLSLNFLTCAVKACKTNSDSYPLHPKDAELVSDDIELNEEFIVNLLPRIDWPGLATTATELGFPPLPAIAPTPESLRADEKTMKDLHNLLLETQMMEGKLICKACGHEYQVREGIANFLLPSHLV

SEQ ID NO: 14392 - DNA, 1052 bp, Muscodor strobelii
  misc_feature: SGI EST ID NO. CUFF.34276.0
  misc_feature: Variant of the nucleotide sequence at SEQ ID NO 14390
cggttgacagattgccttgagtttgggatagttgaaaggcggtagtgttgtacaattaaacttccccggattttgagagcctcacactatcaaacatcccacctaaaaatttccgataacgaacacaccccactacctatctcaccttcaacttataccacttccaacgacactcacacataaacataacgtcaataagactcatctgctcatatcacttcccgaaatacaagctaaataattagatcatcaatactggaaggaaatttgaagagcgatgaaagtcctaagcctaaacttcctgacctgcgcggtcaaagcctgcaagacgaactcagactcatacccactgcaccctaaggatgcagagctggtatcagacgacatcgagttgaatgaggagtttatcgtcaatcttctgcctagaatcgattggcctgggcttgcgaccacagctacagagctcggctttccacccctccccgccatagcgccgacccctgagtctttacgtgcagacgagaagacaatgaaagacctgcataatctacttctcgagacacagatgatggagggcaagctcatctgcaaggcctgtggccacgagtatcaggtgcgagagggtattgcgaatttcttgttgccatctcacctcgtctaagtgtaaacgcaactatgcgaaaacggcggaggaaaagaggcgtgcaatgaaaaataaaatgatctaggagttgtggatgatggtctccaatgacctggtgaactcgcagacatctttagcgatgttaggggagtgtgaagattgaccatggatgaaattcctgagcgacgggaacgaggatacggaaaaacgatatgcatgaccgggaatggtgaaagtagcataagataggggaaacgcggaacattgatggcgggagtagaggatcagatcttcgtaggagaccgccgccatctcgggataggcagacacatcaatgataccactgaaatttgggaactaagtgatgagctcccactgaacaactccattttatccgatgtagactgac

SEQ ID NO: 14393 - DNA, 807 bp, Muscodor strobelii
  misc_feature: SGI cDNA ID NO. 564742
  misc_feature: Encodes the peptide sequence at SEQ ID NO 14394
atgcgtctctccactaccgcggccatcgcaggtttctgcgccggagcccacgccttttccgactcgtctcctttcatcatcttctcttctgcaaaactatcttcccccaaaagcgaagcacagctccaatccagcacatccattctcgaatctacaaagcacatcttatcatcctgcccaacagaccgctacgttctcgtctcccagccgaacctaaacgcagcgcatctctcttcccaaaatgccgttccaaggctcagagagtcgctcgacggcgcaagcagcagctataccgtctccgaagtcgctggagatttggacttgaaggccatcgcgtcttatatcaaggagacctgcggaacgcccaactacgccatcgatgaggtaaaccttgcgcccttgccctcgggcagcgtggataaggtactggaggacaatgatatccactttgactctgtcctctcgcaccagcgtagctccggcgaatccctgaccgtcatctacacaggcggtcctcgtaccgagaccccccagacgtacactgccgagttcccagaccacggcgttggggagctcaggagacgcgacgacggagctatcaagcggaaagagaagaaggagaaggataaccggccgctgttcgagaagtaccagtttttcactcctggtatcttcatggcactcatcgtcctgatcatccttatgtccatcttgtacgcgggtatctcggccgtggctagtctccaggtctcgtatggtgcgtttgataaggagatgggtcctgctgcgcaaaagaagcagaactaa

SEQ ID NO: 14394 - protein, 268 aa, Muscodor strobelii
  misc_feature: SGI Peptide ID NO. 564742
  misc_feature (1)..(267): Pfam Id: PF08319 Pfam Desc: ER protein BIG1
  misc_feature (208)..(267): Pfam Id: PF08319 Pfam Desc: ER protein BIG1
  misc_feature (1)..(120): Pfam Id: PF08319 Pfam Desc: ER protein BIG1
  misc_feature (17)..(268): NCBI GI: 171692905 Blast Desc: protein product [Podospora anserina] gi|170946401|emb|CAP73202.1| protein product [Podospora anserina]
  misc_feature (1)..(267): NCBI GI: 116199099 Blast Desc: CHGG_07705 [Chaetomium globosum CBS 148.51] gi|88178984|gb|EAQ86452.1| CHGG_07705 [Chaetomium globosum CBS 148.51]
  misc_feature (1)..(268): NCBI GI: 85103656 Blast Desc: NCU01202 [Neurospora crassa OR74A] gi|18376307|emb|CAD21419.1| conserved [Neurospora crassa] gi|28923115|gb|EAA32332.1| [Neurospora crassa OR74A]
  misc_feature (1)..(266): NCBI GI: 39945920 Blast Desc: MGG_08080 [Magnaporthe grisea 70-15] gi|145019318|gb|EDK03546.1| MGG_08080 [Magnaporthe grisea 70-15]
  misc_feature (1)..(267): NCBI GI: 256730897 Blast Desc: NECHADRAFT_84583 [Nectria haematococca mpVI 77-13-4]
  misc_feature (1)..(268): NCBI GI: 261355657 Blast Desc: conserved [Verticillium albo-atrum VaMs.102]
  misc_feature (1)..(267): NCBI GI: 46126127 Blast Desc: FG07441.1 [Gibberella zeae PH-1]
  misc_feature (1)..(267): NCBI GI: 156061857 Blast Desc: SS1G_03074 [Sclerotinia sclerotiorum 1980] gi|154700475|gb|EDO00214.1| SS1G_03074 [Sclerotinia sclerotiorum 1980]
  misc_feature (41)..(267): NCBI GI: 154311686 Blast Desc: BC1G_06302 [Botryotinia fuckeliana B05.10] gi|150850813|gb|EDN26006.1| BC1G_06302 [Botryotinia fuckeliana B05.10]
  misc_feature (1)..(268): NCBI GI: 169765506 Blast Desc: [Aspergillus oryzae RIB40] gi|238482059|ref|XP_002372268.1| conserved [Aspergillus flavus NRRL3357] gi|83765079|dbj|BAE55222.1| protein product oryzae]
MRLSTTAAIAGFCAGAHAFSDSSPFIIFSSAKLSSPKSEAQLQSSTSILESTKHILSSCPTDRYVLVSQPNLNAAHLSSQNAVPRLRESLDGASSSYTVSEVAGDLDLKAIASYIKETCGTPNYAIDEVNLAPLPSGSVDKVLEDNDIHFDSVLSHQRSSGESLTVIYTGGPRTETPQTYTAEFPDHGVGELRRRDDGAIKRKEKKEKDNRPLFEKYQFFTPGIFMALIVLIILMSILYAGISAVASLQVSYGAFDKEMGPAAQKKQN

SEQ ID NO: 14395 - DNA, 1214 bp, Muscodor strobelii
  misc_feature: SGI EST ID NO. CUFF.34264.0
  misc_feature: Variant of the nucleotide sequence at SEQ ID NO 14393
attccgcagcctagctccaagcttcaacctcaagctaccttatcaactcaacagcaacgacacggcctcacatcgccttctacatctgcaagtacaccgaccaatagccgatagaaaaggcagaaggacgggactagcggagacacgatgcgtctctccactaccgcggccatcgcaggtttctgcgccggagcccacgccttttccgactcgtctcctttcatcatcttctcttctgcaaaactatcttcccccaaaagcgaagcacagctccaatccagcacatccattctcgaatctacaaagcacatcttatcatcctgcccaacagaccgctacgttctcgtctcccagccgaacctaaacgcagcgcatctctcttcccaaaatgccgttccaaggctcagagagtcgctcgacggcgcaagcagcagctataccgtctccgaagtcgctggagatttggacttgaaggccatcgcgtcttatatcaaggagacctgcggaacgcccaactacgccatcgatgaggtaaaccttgcgcccttgccctcgggcagcgtggataaggtactggaggacaatgatatccactttgactctgtcctctcgcaccagcgtagctccggcgaatccctgaccgtcatctacacaggcggtcctcgtaccgagaccccccagacgtacactgccgagttcccagaccacggcgttggggagctcaggagacgcgacgacggagctatcaagcggaaagagaagaaggagaaggataaccggccgctgttcgagaagtaccagtttttcactcctggtatcttcatggcactcatcgtcctgatcatccttatgtccatcttgtacgcgggtatctcggccgtggctagtctccaggtctcgtatggtgcgtttgataaggagatgggtcctgctgcgcaaaagaagcagaactaatctactgctttactgtacggggtgtcatacggtgtagtacgagttggaattcgaaacaaagaaataggaacatatgtgtatgtgtacgattgtggcatctggagtttgggcggtgtcagcatccctagaagcaagtcgcttcgggcaactagtactgtgggttgtgtatatgatataagggtagaatattcagaccataattgtttcttcttttgcccctgcgcttgtgtgctctagtatagaaatggacttgacgggaa

SEQ ID NO: 14396 - DNA, 675 bp, Muscodor strobelii
  misc_feature: SGI cDNA ID NO. 564743
  misc_feature: Reduced expression when VOC is produced
  misc_feature: Encodes the peptide sequence at SEQ ID NO 14397
atgttcgcccgcccccgaccaaagaaacatcccctcccacccccgaagcggcgcaaagtccaccactccatcgaagaaataaaattcgaccccgaggcacgaacagagtacctaacaggcttccacaagcgcaaagtccagcgcatcaagaacgcccaggaccaagcagcgaaacgggcacgggaggagaaactcgagctacggaaacagataagagaagaccgcaagcgagaaatcgaagaacacgtctccaacgtaaactctatcctcaaagaagcgcaggcagcgggctacatctccgacgactcctctgaagacgaagtcgaggagtggaccgggtttaatgacacgaccagtgaaacacctgcgaaggacgacataatagatcacgaagaagagtacatcgacgaggacagatacaccaccgtcaccatagagtccgtcagtgtctctagggatggattggagagctcaaggcctgacgaggaagagaacgacggagaggcaaacgaggacggaaacgatagggcaaaggaagaggctttgcagaagaggaaaggtaggcaagatgacggcaagaagaagaagaagaaattcagatacgagaccaaggatgagaggaagttgaccaacctcaagcagaaggcaaagaataaaaggagacgaggggaatga

SEQ ID NO: 14397 - protein, 224 aa, Muscodor strobelii
  misc_feature: SGI Peptide ID NO. 564743
  misc_feature (1)..(217): NCBI GI: 39945918 Blast Desc: MGG_08079 [Magnaporthe grisea 70-15] gi|145019317|gb|EDK03545.1| MGG_08079 [Magnaporthe grisea 70-15]
  misc_feature (1)..(223): NCBI GI: 116199097 Blast Desc: CHGG_07704 [Chaetomium globosum CBS 148.51] gi|88178983|gb|EAQ86451.1| CHGG_07704 [Chaetomium globosum CBS 148.51]
  misc_feature (1)..(223): NCBI GI: 46126129 Blast Desc: FG07442.1 [Gibberella zeae PH-1]
  misc_feature (1)..(210): NCBI GI: 171692907 Blast Desc: protein product [Podospora anserina] gi|170946402|emb|CAP73203.1| protein product [Podospora anserina]
  misc_feature (1)..(214): NCBI GI: 261355658 Blast Desc: conserved [Verticillium albo-atrum VaMs.102]
  misc_feature (1)..(221): NCBI GI: 85103659 Blast Desc: NCU01203 [Neurospora crassa OR74A] gi|18376306|emb|CAD21418.1| conserved [Neurospora crassa] gi|28923116|gb|EAA32333.1| [Neurospora crassa OR74A]
  misc_feature (1)..(216): NCBI GI: 154311688 Blast Desc: BC1G_06303 [Botryotinia fuckeliana B05.10] gi|150850814|gb|EDN26007.1| BC1G_06303 [Botryotinia fuckeliana B05.10]
  misc_feature (13)..(223): NCBI GI: 169601604 Blast Desc: SNOG_03670 [Phaeosphaeria nodorum SN15] gi|111067755|gb|EAT88875.1| SNOG_03670 [Phaeosphaeria nodorum SN15]
  misc_feature (13)..(222): NCBI GI: 189193645 Blast Desc: conserved [Pyrenophora tritici-repentis Pt-1C-BFP] gi|187978725|gb|EDU45351.1| conserved [Pyrenophora tritici-repentis Pt-1C-BFP]
  misc_feature (16)..(221): NCBI GI: 255953493 Blast Desc: Pc21g04530 [Penicillium chrysogenum Wisconsin 54-1255] gi|211589210|emb|CAP95350.1| Pc21g04530 [Penicillium chrysogenum Wisconsin 54-1255]
  misc_feature: Useful for introducing or modulating the production of volatile compounds
MFARPRPKKHPLPPPKRRKVHHSIEEIKFDPEARTEYLTGFHKRKVQRIKNAQDQAAKRAREEKLELRKQIREDRKREIEEHVSNVNSILKEAQAAGYISDDSSEDEVEEWTGFNDTTSETPAKDDIIDHEEEYIDEDRYTTVTIESVSVSRDGLESSRPDEEENDGEANEDGNDRAKEEALQKRKGRQDDGKKKKKKFRYETKDERKLTNLKQKAKNKRRRGE

SEQ ID NO: 14398 - DNA, 2401 bp, Muscodor strobelii
  misc_feature: SGI EST ID NO. CUFF.34477.0
  misc_feature: Variant of the nucleotide sequence at SEQ ID NO 14396
ttctaatcgacaagatatcgccaatatcgccaacaaacatacaaacgccaaacagcctcgctactacatcacagcctctgcacaatattcaatcttcaaaacaaaatctgagcctcacataaacacccaagatgttcgcccgcccccgaccaaagaaacatcccctcccacccccgaagcggcgcaaagtccaccactccatcgaagaaataaaattcgaccccgaggcacgaacagagtacctaacaggcttccacaagcgcaaagtccagcgcatcaagaacgcccaggaccaagcagcgaaacgggcacgggaggagaaactcgagctacggaaacagataagagaagaccgcaagcgagaaatcgaagaacacgtctccaacgtaaactctatcctcaaagaagcgcaggcagcgggctacatctccgacgactcctctgaagacgaagtcgaggagtggaccgggtttaatgacacgaccagtgaaacacctgcgaaggacgacataatagatcacgaagaagagtacatcgacgaggacagatacaccaccgtcaccatagagtccgtcagtgtctctagggatggattggagagctcaaggcctgacgaggaagagaacgacggagaggcaaacgaggacggaaacgatagggcaaaggaagaggctttgcagaagaggaaaggtaggcaagatgacggcaagaagaagaagaagaaattcagatacgagaccaaggatgagaggaagttgaccaacctcaagcagaaggcaaagaataaaaggagacgaggggaatgagaagcctcgttgaaaataaaaataaagatacccatctgcaagccaccttccctgcgcaagatcgatattcgtaacgtgcatatcaattgcccccgtgcacaatacataaaaaggggctgttgcgaaaacgcgtgcttggtttatgagggttgtcgatttgttctcacattatctgcctgcatgcccactgcacttttgctgctatagccacagaattaaccccgtgccaaagtctaccgacagagactcaacagccaacagcaagccagctgcactccatcaggggtacagacaccgactccaggtaagccgaaacacaaaaaggccaatagacgaaagacaactttcccgtcgccaggacttctccatatactcgtcacgccataaccactacccatgctgctctcacatcgcttctctcgaccgtgctcgtgccgggtgcggggccggtgtatcttcgtcgcaggacggggaagtctagatgttgccaatctcgatctgcaggtcgtccaactccttctggagggtcgtgtgcttcttggccatctcctcgtacttggactcccactggtcgcgctcgttctcgagggcctgtaccttgcgctcaaagtgaccggcttttacgtcagtctggcgaagcctgcataattaagagtaattagcaacttaggcagacactaaaaccgaaagagatggaaagaaaacgaagggcaaaaaagaaagacttacttctcatttgtctcacgcagggtcttgtcggcctgctcggcctcctcctcgagcagctggagtcttcgttgcagggtctcgttgtgcgtaccatgttgctggctctcatcggccgtcttcttcaggtccttgaccgaagtgtccaacttctcgttctcgctctcgagcaggccgttcttgtgggtgagcgaggtgatctcctgctccttggctaggttctcctgctcgagggccttgatcttggtctgcagctcctcgaccttggccgcgttctcgtcagcctccaggcggagctggttcattctctgtccacgagggtaatcgcatgttagcatattgtttccattcacggtaagcttctggtcaggcgtttcgtcgttttcaatgaatagagaagtaattcaagcaatgtgatgaatgtgctaggattcccattttaaacccctcgtactggaacaagacatgggcttcgtcatggctggcattgcctgtttgtgtgcgaggaaatggcttgttgatgttgttgctgcggtgcatggtggggtaaaagaaaggggactgggatggtggtagctctggtctctcacctccttgatacggtccatggtggaatgtgtatgggttggaagatcggatatgtacgaggaaatgtaagtaaaacaagatgggaaagcagggctcttgatgcgacgaggaagtgttgaacggcgttgaaagaagcgatcaggcagtggtatgaaagcagattgaggaaagggagtaataaaggccgggacgtgtgttgattgatcgccgttagaatggggtggaatttggtgtgtactggctgatgtgtaccatacccccctttcgtcacccgcaactgc

SEQ ID NO: 14399 - DNA, 486 bp, Muscodor strobelii
  misc_feature: SGI cDNA ID NO. 564744
  misc_feature: Elevated expression when VOC is produced
  misc_feature: Encodes the peptide sequence at SEQ ID NO 14400
atggaccgtatcaaggagagaatgaaccagctccgcctggaggctgacgagaacgcggccaaggtcgaggagctgcagaccaagatcaaggccctcgagcaggagaacctagccaaggagcaggagatcacctcgctcacccacaagaacggcctgctcgagagcgagaacgagaagttggacacttcggtcaaggacctgaagaagacggccgatgagagccagcaacatggtacgcacaacgagaccctgcaacgaagactccagctgctcgaggaggaggccgagcaggccgacaagaccctgcgtgagacaaatgagaagcttcgccagactgacgtaaaagccggtcactttgagcgcaaggtacaggccctcgagaacgagcgcgaccagtgggagtccaagtacgaggagatggccaagaagcacacgaccctccagaaggagttggacgacctgcagatcgagattggcaacatctag

SEQ ID NO: 14400 - protein, 161 aa, Muscodor strobelii
  misc_feature: SGI Peptide ID NO. 564744
  misc_feature (1)..(161): NCBI GI: 46126131 Blast Desc: FG07443.1 [Gibberella zeae PH-1]
  misc_feature (1)..(161): NCBI GI: 256730896 Blast Desc: [Nectria haematococca mpVI 77-13-4]
  misc_feature (1)..(161): NCBI GI: 171692909 Blast Desc: protein product [Podospora anserina] gi|170946403|emb|CAP73204.1| protein product [Podospora anserina]
  misc_feature (1)..(161): NCBI GI: 261355659 Blast Desc: actin lateral binding protein [Verticillium albo-atrum VaMs.102]
  misc_feature (1)..(161): NCBI GI: 116199095 Blast Desc: CHGG_07703 [Chaetomium globosum CBS 148.51] gi|88178982|gb|EAQ86450.1| CHGG_07703 [Chaetomium globosum CBS 148.51]
  misc_feature (1)..(161): NCBI GI: 85103663 Blast Desc: NCU01204 [Neurospora crassa OR74A] gi|28923117|gb|EAA32334.1| NCU01204 [Neurospora crassa OR74A]
  misc_feature (1)..(161): NCBI GI: 226284558 Blast Desc: tropomyosin-1 [Paracoccidioides brasiliensis Pb01]
  misc_feature (1)..(161): NCBI GI: 225680389 Blast Desc: actin lateral binding protein [Paracoccidioides brasiliensis Pb03] gi|226289460|gb|EEH44966.1| tropomyosin [Paracoccidioides brasiliensis Pb18]
  misc_feature (1)..(161): NCBI GI: 39945916 Blast Desc: MGG_08078 [Magnaporthe grisea 70-15] gi|145019316|gb|EDK03544.1| MGG_08078 [Magnaporthe grisea 70-15]
  misc_feature (1)..(161): NCBI GI: 156061853 Blast Desc: SS1G_03072 [Sclerotinia sclerotiorum 1980] gi|154700473|gb|EDO00212.1| SS1G_03072 [Sclerotinia sclerotiorum 1980]
  misc_feature: Useful for introducing or modulating the production of volatile compounds
MDRIKERMNQLRLEADENAAKVEELQTKIKALEQENLAKEQEITSLTHKNGLLESENEKLDTSVKDLKKTADESQQHGTHNETLQRRLQLLEEEAEQADKTLRETNEKLRQTDVKAGHFERKVQALENERDQWESKYEEMAKKHTTLQKELDDLQIEIGNI

SEQ ID NO: 14401 - DNA, 1680 bp, Muscodor strobelii
  misc_feature: SGI EST ID NO. CUFF.34478.1
  misc_feature: Variant of the nucleotide sequence at SEQ ID NO 14399
cgaaaggggggtatggtacacatcagccagtacacaccaaattccaccccattctaacggcgatcaatcaacacacgtcccggcctttattactccctttcctcaatctgctttcataccactgcctgatcgcttctttcaacgccgttcaacacttcctcgtcgcatcaagagccctgctttcccatcttgttttacttacatttcctcgtacatatccgatcttccaacccatacacattccaccatggaccgtatcaaggagagaatgaaccagctccgcctggaggctgacgagaacgcggccaaggtcgaggagctgcagaccaagatcaaggccctcgagcaggagaacctagccaaggagcaggagatcacctcgctcacccacaagaacggcctgctcgagagcgagaacgagaagttggacacttcggtcaaggacctgaagaagacggccgatgagagccagcaacatggtacgcacaacgagaccctgcaacgaagactccagctgctcgaggaggaggccgagcaggccgacaagaccctgcgtgagacaaatgagaagcttcgccagactgacgtaaaagccggtcactttgagcgcaaggtacaggccctcgagaacgagcgcgaccagtgggagtccaagtacgaggagatggccaagaagcacacgaccctccagaaggagttggacgacctgcagatcgagattggcaacatctagacttccccgtcctgcgacgaagatacaccggccccgcacccggcacgagcacggtcgagagaagcgatgtgagagcagcatgggtagtggttatggcgtgacgagtatatggagaagtcctggcgacgggaaagttgtctttcgtctattggcctttttgtgtttcggcttacctggagtcggtgtctgtacccctgatggagtgcagctggcttgctgttggctgttgagtctctgtcggtagactttggcacggggttaattctgtggctatagcagcaaaagtgcagtgggcatgcaggcagataatgtgagaacaaatcgacaaccctcataaaccaagcacgcgttttcgcaacagcccctttttatgtattgtgcacgggggcaattgatatgcacgttacgaatatcgatcttgcgcagggaaggtggcttgcagatgggtatctttatttttattttcaacgaggcttctcattcccctcgtctccttttattctttgccttctgcttgaggttggtcaacttcctctcatccttggtctcgtatctgaatttcttcttcttcttcttgccgtcatcttgcctacctttcctcttctgcaaagcctcttcctttgccctatcgtttccgtcctcgtttgcctctccgtcgttctcttcctcgtcaggccttgagctctccaatccatccctagagacactgacggactctatggtgacggtggtgtatctgtcctcgtcgatgtactcttcttcgtgatctattatgtcgtccttcgcaggtgtttcactggtcgtgtcattaaacccggtccactcctcgacttcgtcttcagaggagtcgtcggagatgtagcccgctgcctgcgcttctttgaggatagagtttacgttggagacgtgttcttcgatttctcgcttgcggtcttctcttatctata

SEQ ID NO: 14402 - DNA, 1548 bp, Muscodor strobelii
  misc_feature: SGI cDNA ID NO. 564745
  misc_feature: Encodes the peptide sequence at SEQ ID NO 14403
atgctcgccgcccgcgatcaggagaatctggcgtttagccaccaacatggcgccgctgttaagcaacagcagaaccaggccaaaatgccaggagccagatatcccaagactcctatgaaggtgcctttgaacgacgagaatggcgcccatgctatcggaggagctaagaacctcatgacccgcggcaacgagaatgccatgacttcgaggaagggaaagggtgtggacaagtctggttttgtcactccgatgggtatgcaacatatcaagtatcatgatatatctaacagcctgaagctaacagacggcgaaccagctcgtggcgccagaccagctctaggaaacaagacaaccaacgccaaagctaagggcctccagagtgtgaatgtcaaatccgcagtccgcgagattgagcagtctcaagcaaagccccaaaccaccatcaagccaaaacagaaacaaccatcggccgagacatcgaagctccaggtccacgccgaagaagacgcttcaccactcgaagacgaagaagtcgagtactgcccgcccaaacccaaagacctaccttacgagtcagatgtgtttcctgatggggtattaaacttcgatgttctgaggccggagaacagattcaagggatactatcaattttacttcaaccccatcggcgaggatggtgtctcgttgatggataaggagttagatgagaagaccaggaaggcgttggagctgggagagaagcgctgccaggaagagatcaatagtatcaattggggactggaagatgaactctcccccgagaagcctcccgctgctaaaaaggcgcctgctcccatcaagagcttgcctggtaagacaacgggtacggtcagaaaaccactatcaagcatccgttcgaagactgctgcgaatgcgatgagcatgaacgataccacgaagtctcttcagcgacgagccgccaggactgaagtcgccaagccattgcacaagaaatctgcaagtttcgccatcccgactttcagctccggatcgaaagcagtgccgtcaagcatcccgaagagatctcccgcagagttagatgcaaactctagaactactattgggtacaacaagggacgtgcaacggcctcacttctgcacgaacgaagcgtgagcgtggctactacacgcccacctgctaccaccagacctttcaaccgtgctgctaccaccacttctacttccacctccaaaacgtcagcctcaagctcaaataccgcatccaaacaaagaaccaccacacccctccaccgctccgagacagtattgtccgattcctcaaacgagacaatcacaccagcccgctttcacaaacactctcagtccgaggtagaggacgaagacaaggagtggagggaacgagttcctttcctgagtatcttcaatcctgaggattgcttgggtgccagtgatgaggaagaagaggatgatgatcccctgggtatcaaggggagaactcttgattttctggatgaggaggaggagtttgtcatggctatgcctgagtaa

SEQ ID NO: 14403 - protein, 515 aa, Muscodor strobelii
  misc_feature: SGI Peptide ID NO. 564745
  misc_feature (1)..(482): NCBI GI: 116199093 Blast Desc: CHGG_07702 [Chaetomium globosum CBS 148.51] gi|88178981|gb|EAQ86449.1| CHGG_07702 [Chaetomium globosum CBS 148.51]
  misc_feature (1)..(513): NCBI GI: 256731268 Blast Desc: NECHADRAFT_48729 [Nectria haematococca mpVI 77-13-4]
  misc_feature (1)..(491): NCBI GI: 261355660 Blast Desc: conserved [Verticillium albo-atrum VaMs.102]
  misc_feature (1)..(509): NCBI GI: 39945914 Blast Desc: MGG_08077 [Magnaporthe grisea 70-15] gi|145019315|gb|EDK03543.1| MGG_08077 [Magnaporthe grisea 70-15]
  misc_feature (1)..(512): NCBI GI: 171692911 Blast Desc: protein product [Podospora anserina] gi|170946404|emb|CAP73205.1| protein product [Podospora anserina]
  misc_feature (1)..(474): NCBI GI: 46126133 Blast Desc: FG07444.1 [Gibberella zeae PH-1]
  misc_feature (1)..(513): NCBI GI: 156061851 Blast Desc: SS1G_03071 [Sclerotinia sclerotiorum 1980] gi|154700472|gb|EDO00211.1| SS1G_03071 [Sclerotinia sclerotiorum 1980]
  misc_feature (1)..(513): NCBI GI: 154311692 Blast Desc: BC1G_06305 [Botryotinia fuckeliana B05.10] gi|150850816|gb|EDN26009.1| BC1G_06305 [Botryotinia fuckeliana B05.10]
  misc_feature (1)..(380): NCBI GI: 67539034 Blast Desc: AN5687.2 [Aspergillus nidulans FGSC A4] gi|40743590|gb|EAA62780.1| AN5687.2 [Aspergillus nidulans FGSC A4] gi|259484839|tpe|CBF81404.1| TPA: conserved [Aspergillus FGSC
  misc_feature (1)..(384): NCBI GI: 119482628 Blast Desc: NFIA_025170 [Neosartorya fischeri NRRL 181] gi|119409497|gb|EAW19445.1| conserved [Neosartorya fischeri NRRL 181]
MLAARDQENLAFSHQHGAAVKQQQNQAKMPGARYPKTPMKVPLNDENGAHAIGGAKNLMTRGNENAMTSRKGKGVDKSGFVTPMGMQHIKYHDISNSLKLTDGEPARGARPALGNKTTNAKAKGLQSVNVKSAVREIEQSQAKPQTTIKPKQKQPSAETSKLQVHAEEDASPLEDEEVEYCPPKPKDLPYESDVFPDGVLNFDVLRPENRFKGYYQFYFNPIGEDGVSLMDKELDEKTRKALELGEKRCQEEINSINWGLEDELSPEKPPAAKKAPAPIKSLPGKTTGTVRKPLSSIRSKTAANAMSMNDTTKSLQRRAARTEVAKPLHKKSASFAIPTFSSGSKAVPSSIPKRSPAELDANSRTTIGYNKGRATASLLHERSVSVATTRPPATTRPFNRAATTTSTSTSKTSASSSNTASKQRTTTPLHRSETVLSDSSNETITPARFHKHSQSEVEDEDKEWRERVPFLSIFNPEDCLGASDEEEEDDDPLGIKGRTLDFLDEEEEFVMAMPE

SEQ ID NO: 14404 - DNA, 2243 bp, Muscodor strobelii
  misc_feature: SGI EST ID NO. CUFF.34266.0
  misc_feature: Variant of the nucleotide sequence at SEQ ID NO 14402
tgtccaccacctctaggcacagctagctgccacagcaggtgcaggggcctagagcaaccactgcaactgccttgtgtgtttcattggctgaaactacggaagttgctcggtcaacaatcaagaatgggaaacaaccaagcagtccaaccttgccttccagcaccgaccaacgtcaagtgacttggaccacttcatggtaatgaaactgcaaattgcagccatacatgttcaccagtacagcagttgacttcaccgccatctcatcaaccccggatccaatcgacatcaccaattcaaccattaactattagcttcaagaactccgactgcatacagtgtacatcgaaaccttcctcaatctgaattggattgttggaaggacgggtttttccttaccactccgacgtcatctaacaacgccaactcgatatccaacatctcgatatgctcgccgcccgcgatcaggagaatctggcgtttagccaccaacatggcgccgctgttaagcaacagcagaaccaggccaaaatgccaggagccagatatcccaagactcctatgaaggtgcctttgaacgacgagaatggcgcccatgctatcggaggagctaagaacctcatgacccgcggcaacgagaatgccatgacttcgaggaagggaaagggtgtggacaagtctggttttgtcactccgatggctcgtggcgccagaccagctctaggaaacaagacaaccaacgccaaagctaagggcctccagagtgtgaatgtcaaatccgcagtccgcgagattgagcagtctcaagcaaagccccaaaccaccatcaagccaaaacagaaacaaccatcggccgagacatcgaagctccaggtccacgccgaagaagacgcttcaccactcgaagacgaagaagtcgagtactgcccgcccaaacccaaagacctaccttacgagtcagatgtgtttcctgatggggtattaaacttcgatgttctgaggccggagaacagattcaagggatactatcaattttacttcaaccccatcggcgaggatggtgtctcgttgatggataaggagttagatgagaagaccaggaaggcgttggagctgggagagaagcgctgccaggaagagatcaatagtatcaattggggactggaagatgaactctcccccgagaagcctcccgctgctaaaaaggcgcctgctcccatcaagagcttgcctggtaagacaacgggtacggtcagaaaaccactatcaagcatccgttcgaagactgctgcgaatgcgatgagcatgaacgataccacgaagtctcttcagcgacgagccgccaggactgaagtcgccaagccattgcacaagaaatctgcaagtttcgccatcccgactttcagctccggatcgaaagcagtgccgtcaagcatcccgaagagatctcccgcagagttagatgcaaactctagaactactattgggtacaacaagggacgtgcaacggcctcacttctgcacgaacgaagcgtgagcgtggctactacacgcccacctgctaccaccagacctttcaaccgtgctgctaccaccacttctacttccacctccaaaacgtcagcctcaagctcaaataccgcatccaaacaaagaaccaccacacccctccaccgctccgagacagtattgtccgattcctcaaacgagacaatcacaccagcccgctttcacaaacactctcagtccgaggtagaggacgaagacaaggagtggagggaacgagttcctttcctgagtatcttcaatcctgaggattgcttgggtgccagtgatgaggaagaagaggatgatgatcccctgggtatcaaggggagaactcttgattttctggatgaggaggaggagtttgtcatggctatgcctgagtaaggtaaaatatacggttaacaaaaggagacggaatactccttaagtacgttgtactgctttgactaagaacaaggttttgtgtagttcggcgtttggctgatgggttcggtcgttgatgactgaatcgttcattgagacttgtcatgtttgattagattagggggcgatagaactgggcttgttgactacccagtatgtctgctctagcattgcccctttggcttggaaaatgaatcgttcgacacttaacggtttgtgtatgaatacaaaattctgctaggttgagcagatagtatttcttgataaaaacatgc

SEQ ID NO: 14405 - DNA, 1485 bp, Muscodor strobelii
  misc_feature: SGI cDNA ID NO. 564746
  misc_feature: Encodes the peptide sequence at SEQ ID NO 14406
atgctcgccgcccgcgatcaggagaatctggcgtttagccaccaacatggcgccgctgttaagcaacagcagaaccaggccaaaatgccaggagccagatatcccaagactcctatgaaggtgcctttgaacgacgagaatggcgcccatgctatcggaggagctaagaacctcatgacccgcggcaacgagaatgccatgacttcgaggaagggaaagggtgtggacaagtctggttttgtcactccgatggctcgtggcgccagaccagctctaggaaacaagacaaccaacgccaaagctaagggcctccagagtgtgaatgtcaaatccgcagtccgcgagattgagcagtctcaagcaaagccccaaaccaccatcaagccaaaacagaaacaaccatcggccgagacatcgaagctccaggtccacgccgaagaagacgcttcaccactcgaagacgaagaagtcgagtactgcccgcccaaacccaaagacctaccttacgagtcagatgtgtttcctgatggggtattaaacttcgatgttctgaggccggagaacagattcaagggatactatcaattttacttcaaccccatcggcgaggatggtgtctcgttgatggataaggagttagatgagaagaccaggaaggcgttggagctgggagagaagcgctgccaggaagagatcaatagtatcaattggggactggaagatgaactctcccccgagaagcctcccgctgctaaaaaggcgcctgctcccatcaagagcttgcctggtaagacaacgggtacggtcagaaaaccactatcaagcatccgttcgaagactgctgcgaatgcgatgagcatgaacgataccacgaagtctcttcagcgacgagccgccaggactgaagtcgccaagccattgcacaagaaatctgcaagtttcgccatcccgactttcagctccggatcgaaagcagtgccgtcaagcatcccgaagagatctcccgcagagttagatgcaaactctagaactactattgggtacaacaagggacgtgcaacggcctcacttctgcacgaacgaagcgtgagcgtggctactacacgcccacctgctaccaccagacctttcaaccgtgctgctaccaccacttctacttccacctccaaaacgtcagcctcaagctcaaataccgcatccaaacaaagaaccaccacacccctccaccgctccgagacagtattgtccgattcctcaaacgagacaatcacaccagcccgctttcacaaacactctcagtccgaggtagaggacgaagacaaggagtggagggaacgagttcctttcctgagtatcttcaatcctgaggattgcttgggtgccagtgatgaggaagaagaggatgatgatcccctgggtatcaaggggagaactcttgattttctggatgaggaggaggagtttgtcatggctatgcctgagtaa

SEQ ID NO: 14406 - protein, 494 aa, Muscodor strobelii
  misc_feature: SGI Peptide ID NO. 564746
  misc_feature (1)..(461): NCBI GI: 116199093 Blast Desc: CHGG_07702 [Chaetomium globosum CBS 148.51] gi|88178981|gb|EAQ86449.1| CHGG_07702 [Chaetomium globosum CBS 148.51]
  misc_feature (1)..(492): NCBI GI: 256731268 Blast Desc: NECHADRAFT_48729 [Nectria haematococca mpVI 77-13-4]
  misc_feature (1)..(491): NCBI GI: 171692911 Blast Desc: protein product [Podospora anserina] gi|170946404|emb|CAP73205.1| protein product [Podospora anserina]
  misc_feature (1)..(470): NCBI GI: 261355660 Blast Desc: conserved [Verticillium albo-atrum VaMs.102]
  misc_feature (1)..(488): NCBI GI: 39945914 Blast Desc: MGG_08077 [Magnaporthe grisea 70-15] gi|145019315|gb|EDK03543.1| MGG_08077 [Magnaporthe grisea 70-15]
  misc_feature (1)..(453): NCBI GI: 46126133 Blast Desc: FG07444.1 [Gibberella zeae PH-1]
  misc_feature (1)..(492): NCBI GI: 156061851 Blast Desc: SS1G_03071 [Sclerotinia sclerotiorum 1980] gi|154700472|gb|EDO00211.1| SS1G_03071 [Sclerotinia sclerotiorum 1980]
  misc_feature (1)..(492): NCBI GI: 154311692 Blast Desc: BC1G_06305 [Botryotinia fuckeliana B05.10] gi|150850816|gb|EDN26009.1| BC1G_06305 [Botryotinia fuckeliana B05.10]
  misc_feature (1)..(272): NCBI GI: 85103667 Blast Desc: NCU01205 [Neurospora crassa OR74A] gi|18376304|emb|CAD21416.1| [Neurospora crassa] gi|28923118|gb|EAA32335.1| [Neurospora crassa OR74A]
  misc_feature (1)..(359): NCBI GI: 67539034 Blast Desc: AN5687.2 [Aspergillus nidulans FGSC A4] gi|40743590|gb|EAA62780.1| AN5687.2 [Aspergillus nidulans FGSC A4] gi|259484839|tpe|CBF81404.1| TPA: conserved [Aspergillus FGSC
MLAARDQENLAFSHQHGAAVKQQQNQAKMPGARYPKTPMKVPLNDENGAHAIGGAKNLMTRGNENAMTSRKGKGVDKSGFVTPMARGARPALGNKTTNAKAKGLQSVNVKSAVREIEQSQAKPQTTIKPKQKQPSAETSKLQVHAEEDASPLEDEEVEYCPPKPKDLPYESDVFPDGVLNFDVLRPENRFKGYYQFYFNPIGEDGVSLMDKELDEKTRKALELGEKRCQEEINSINWGLEDELSPEKPPAAKKAPAPIKSLPGKTTGTVRKPLSSIRSKTAANAMSMNDTTKSLQRRAARTEVAKPLHKKSASFAIPTFSSGSKAVPSSIPKRSPAELDANSRTTIGYNKGRATASLLHERSVSVATTRPPATTRPFNRAATTTSTSTSKTSASSSNTASKQRTTTPLHRSETVLSDSSNETITPARFHKHSQSEVEDEDKEWRERVPFLSIFNPEDCLGASDEEEEDDDPLGIKGRTLDFLDEEEEFVMAMPE

SEQ ID NO: 14407 - DNA, 2243 bp, Muscodor strobelii; identical to SEQ ID NO: 14404
  misc_feature: SGI EST ID NO. CUFF.34266.0
  misc_feature: Variant of the nucleotide sequence at SEQ ID NO 14405

SEQ ID NO: 14408 - DNA, 3801 bp, Muscodor strobelii
  misc_feature: SGI cDNA ID NO. 564747
  misc_feature: Reduced expression when VOC is produced
  misc_feature: Encodes the peptide sequence at SEQ ID NO 14409
atggctcctagcgctggctaccgggagttctttcccaatgctcctcgcgctgccagagacaaggccaacgagagagaacgcgagcgctcgtccagatcatctgacatccccgactctcactcttcatctgctgcttctgcccgtgacgtcgccaagcacaacgccgactctgtgcggtctcactctcacgctcacccccaagacacttctgccgagtatacccagggagacatgctcaacggtgtcgggtccgccagctcccacgccagcaccacctcctccgtcttcagcactacggccactaatgtcgctgcccatgcgtcaaatggttacagcagcaatatcactcccctcaccgctgttggctctcccgcacacctgagctcttctcaaccctcttcatcaaagaaggataccgccactgcctctccgtaccccggcagagctggctctacgaatcataacggcactatgaagtcgttgaccacacctcccacttctgccaagcgccctccggctcgagatataacccgttctaccctgggcaccaagtgtacacacgatccctcaaccgataagaccttatcgtcgtcagagaagaagtccatgaagccgaaatacaagactttcgactcgacagatgacgccccccctccagacccacgcctgtcaaagggcagctggctcgactacatcaatgtcgacttccatctgccccaggcgaggttgcgccagaccccttacaacctcaagccctactcatatgatgctgccaccaccatcggctctggccctcccacccaggtcgtggtcagcggtttcaatcccttgattaccttctctaaggtcgcgaacatctttgcttctttcggtgatgtggcagaaagtagtaacaaaatgcatccccataccgggagctacttgggctttgcgactttccgattcagagactctaatcagccacgtcggccgcagatcactggctatgacgccgcgaagagagcagtgaggtcgatgaatgggcggaagatcgagtctcagtatgtcaaggtcgaattcgatcgcgatgggaagcaaagcagacgaatgctggagaacgttctcaggagagaccgagaagaagaggcccgtgctgccgcgaaaccgtctccccctacaggaccaaggaccaatagcgaaagcttccacgcccactcgtcgcggagctctgttgatacgtctgtaccacggccaccggcagatgcctttggacgaccgcctccctctgccccgaaaggtcctgctggtggccgactgcgtccaataacgaacgaacctacaagctgggctcttccatcatccaagccgaaaccccaggccgctgtcgcacagaccataccgagtaccctcaaaggcgacccgtacatatttgtctccgacgaaagcgtgcctgtaatggccactacagtccctcacatgaagaaacgtctcaaggcctttatgtttgacgacattttgactgatcgcgcgggctactatataatattctctaataactcccgtggccgagaggaagcaatcagatgctaccgaacagctaacgaaagctcctttttcacgtatagtatggctatgagccttcacaacgcggcatcgaatacatccttagcaacgagttcgtcacggccgggcgattcggaccgacgcgacccacggtacagagacgaacaccagtatcgccctcgcgaagaacgacgccacctacaggagagcatattagaagaagagaagaagcagcgtggcctgaacttcgatcccgtcaaagaagcaatagaaatcatccgtcaagagttgaaggaccaactcgtcgggcgtatccgaaccgagatttcgaaccctgcgctgctcgattacttgaacccagacaatcacgctgcgaaacggcgcaggctgaatctgcaagatccgttgggtccaaaacccatcatcaacaaagagacctacagcatttcgcctgccagtacgcccaactctcgggccgatccgattgagcgcagaaccgctcgtctcaacgtaacggcactacccagaatcaagaaagtcaagggccaagctgcggcacagcgtaactatggattcacggatccatttgcccgaaacagaccatcagtggcgcgcaatgcatttcgcggcctccatcatcgtctccagccgcctgatagcgatgaggagacctcagatgcagaaggcgagaaatacgtccgggactctgttgcgcgcgatacagaggagcctgactcacgacctcgcagtcggatgagtactgacgaagatgccttcgacacttttgcagacgaggactcgatgacggaagctagctttgtcgtcaacgacactgccactcggcctaagaagaggaagttggatcttcaagtcgaagcagctatcaaacgccaaaagaagtctgacgaggaactctttggagtcactatcgatacattggaaaatgagttccccagcccaactgatgaggttctgcctgatgtcgacagcgcccgcttggatgtggaacgtgccgactctctcacaccctccgacaagcctttgaagggtaagaagaagacgacggtggccaagcccaagaagaaaacgaagaaacagatattcgaagaacgagaggcaatgaagaagcaacaacaggatgcttatgttgaagaggcactagaacaggcatgcaaacaacccacagtcgagccggaagcgccgttgaaaaagccgtcgatcgtggaagaaaaggaggaaccacttcctcaggatgaccggttttctgacaaagttcttcctgctatggcgttgccagaagcattcacgttatcattatcaaccattccatctgttcagtatgaactcaaagatcgaccggatcttagcaaactcaagagaagagcggttccaagcagtataggagaaccgcagctctgggtatggaagcacgaacggatacgtgagctcaacgctagcgaggacttggcgcccaatggttcgcttcccattgacgggtactatgtatcgaatggcacaggctgtgctcgtaccgaaggggtcaaaaagattctcaattctgaaaagtcaaagtacctgccccatcaccttaaagtgcaaaaggtgcgggaagaacgacaacaacgcgctgcgaagaccggcagcaaagatgttgtcgtctctgctgcggaggccgctcgacttgctgctgagagactggttgccaagggcaattcaagagcaaaccgcgtcaacaaccgacgcttcgttgctgatcttaatgatcagaaaaagacgcttggacaagattccgatgtccttcggttcaaccagcttaaaaagcggaagaaacccgtcaagttcgcccgttctgccatccacaactggggactctacgccatggagaatattaacaaagacgacatgattattgagtacgtgggtgaacaagtgcgacaacagatctcggagatccgagaagcccgatacctaaagagcggaattggtagcagctacctgttccgaattgatgacagtactgtcattgatgcaacgaagaagggtggtattgctcgtttcatcaatcacagctgcatgccgaactgtacggccaagatcatcaaagtcgagggcagtaaacgcattgtgatttatgccctccgggacatcgctcagaatgaagagttgacctacgactacaagttcgagcgcgagatcggaagcacggaccgtatcccctgcctttgcggtaccaccgcttgcaagggattcctcaattaa

SEQ ID NO: 14409 - protein, 1266 aa, Muscodor strobelii
  misc_feature: SGI Peptide ID NO. 564747
  misc_feature (1118)..(1247): Pfam Id: PF00856 Pfam Desc: SET domain
  misc_feature (211)..(1266): NCBI GI: 116199091 Blast Desc: CHGG_07701 [Chaetomium globosum CBS 148.51] gi|121922631|sp|Q2GWF3.1|SET1_CHAGB RecName: Full=Histone-lysine N-methyltransferase, H3 lysine-4 specific; AltName: Full=COMPASS
  misc_feature (30)..(1266): NCBI GI: 74697791 Blast Desc: SET1_NEUCR RecName: Full=Histone-lysine N-methyltransferase, H3 lysine-4 specific; AltName: Full=COMPASS component SET1; AltName: Full=SET domain-containing protein 1 to
  misc_feature (3)..(1266): NCBI GI: 256731267 Blast Desc: histone H3 methyltransferase complex protein [Nectria haematococca mpVI 77-13-4]
  misc_feature (104)..(1266): NCBI GI: 164426120 Blast Desc: NCU01206 [Neurospora crassa OR74A] gi|157071206|gb|EAA32336.2| conserved [Neurospora crassa OR74A]
  misc_feature (3)..(1266): NCBI GI: 46126135 Blast Desc: FG07445.1 [Gibberella zeae PH-1] gi|121933649|sp|Q4I5R3.1|SET1_GIBZE RecName: Full=Histone-lysine N-methyltransferase, H3 lysine-4 specific; AltName: Full=COMPASS
  misc_feature (207)..(1266): NCBI GI: 171692915 Blast Desc: protein product [Podospora anserina] gi|170946406|emb|CAP73207.1| protein product [Podospora anserina]
  misc_feature (4)..(1266): NCBI GI: 261355661 Blast Desc: histone-lysine N-methyltransferase [Verticillium albo-atrum VaMs.102]
  misc_feature (2)..(1266): NCBI GI: 156061849 Blast Desc: SS1G_03070 [Sclerotinia sclerotiorum 1980] gi|154700471|gb|EDO00210.1| SS1G_03070 [Sclerotinia sclerotiorum 1980]
  misc_feature (5)..(1266): NCBI GI: 119185079 Blast Desc: CIMG_07257 [Coccidioides immitis RS] gi|121936913|sp|Q1DR06.1|SET1_COCIM RecName: Full=Histone-lysine N-methyltransferase, H3 lysine-4 specific; AltName: Full=COMPASS
  misc_feature (5)..(1266): NCBI GI: 240106533 Blast Desc: SET domain containing protein [Coccidioides posadasii C735 delta SOWgp]
  misc_feature (211)..(1266): SWISSPROT Homolog: EC 2.1.1.43 Histone-lysine N-methyltransferase
  misc_feature: Useful for introducing or modulating the production of volatile compounds
MAPSAGYREFFPNAPRAARDKANERERERSSRSSDIPDSHSSSAASARDVAKHNADSVRSHSHAHPQDTSAEYTQGDMLNGVGSASSHASTTSSVFSTTATNVAAHASNGYSSNITPLTAVGSPAHLSSSQPSSSKKDTATASPYPGRAGSTNHNGTMKSLTTPPTSAKRPPARDITRSTLGTKCTHDPSTDKTLSSSEKKSMKPKYKTFDSTDDAPPPDPRLSKGSWLDYINVDFHLPQARLRQTPYNLKPYSYDAATTIGSGPPTQVVVSGFNPLITFSKVANIFASFGDVAESSNKMHPHTGSYLGFATFRFRDSNQPRRPQITGYDAAKRAVRSMNGRKIESQYVKVEFDRDGKQSRRMLENVLRRDREEEARAAAKPSPPTGPRTNSESFHAHSSRSSVDTSVPRPPADAFGRPPPSAPKGPAGGRLRPITNEPTSWALPSSKPKPQAAVAQTIPSTLKGDPYIFVSDESVPVMATTVPHMKKRLKAFMFDDILTDRAGYYIIFSNNSRGREEAIRCYRTANESSFFTYSMAMSLHNAASNTSLATSSSRPGDSDRRDPRYRDEHQYRPREERRHLQESILEEEKKQRGLNFDPVKEAIEIIRQELKDQLVGRIRTEISNPALLDYLNPDNHAAKRRRLNLQDPLGPKPIINKETYSISPASTPNSRADPIERRTARLNVTALPRIKKVKGQAAAQRNYGFTDPFARNRPSVARNAFRGLHHRLQPPDSDEETSDAEGEKYVRDSVARDTEEPDSRPRSRMSTDEDAFDTFADEDSMTEASFVVNDTATRPKKRKLDLQVEAAIKRQKKSDEELFGVTIDTLENEFPSPTDEVLPDVDSARLDVERADSLTPSDKPLKGKKKTTVAKPKKKTKKQIFEEREAMKKQQQDAYVEEALEQACKQPTVEPEAPLKKPSIVEEKEEPLPQDDRFSDKVLPAMALPEAFTLSLSTIPSVQYELKDRPDLSKLKRRAVPSSIGEPQLWVWKHERIRELNASEDLAPNGSLPIDGYYVSNGTGCARTEGVKKILNSEKSKYLPHHLKVQKVREERQQRAAKTGSKDVVVSAAEAARLAAERLVAKGNSRANRVNNRRFVADLNDQKKTLGQDSDVLRFNQLKKRKKPVKFARSAIHNWGLYAMENINKDDMIIEYVGEQVRQQISEIREARYLKSGIGSSYLFRIDDSTVIDATKKGGIARFINHSCMPNCTAKIIKVEGSKRIVIYALRDIAQNEELTYDYKFEREIGSTDRIPCLCGTTACKGFLN

SEQ ID NO: 14410 - DNA, 5279 bp, Muscodor strobelii
  misc_feature: SGI EST ID NO. CUFF.34589.1
  misc_feature: Variant of the nucleotide sequence at SEQ ID NO 14408
tgcggatcaggagtgctgtaggtacagcagtactcgtgacatcccccctgcgccttgaaacctggactaaggaggccgaccagacttgggcttgctccaaggccagccaaattcaacttttctgcgagacaaatcaacctccttcctctccatcaatccggccctcctgccgccagcgccctcgactggccctcaacctcccgtttttcgacggccccggcaccacaggctctgcgcgaccgtgttgcaccacctcacgcctgccctcgacgtctttgttgcccgtccgcagccaacagtcggccgggcgctttgtctgcgcactccaggtcccacacacgtcagatctacagtcttctcagtcttctgtcgcgtggacgcacgactttcgcgttggcctcttgcatcatcccgcccaccacacatctctcaacccccgctactcatccacagcatcaccattgcagtaccagtacccattatcgtattctctcactttctatgaatgaatgctcccctactcccctgcggcgcgagatatgagggctggcggctagaggaagccacacctgtcatcccgcaataccatggctcctagcgctggctaccgggagttctttcccaatgctcctcgcgctgccagagacaaggccaacgagagagaacgcgagcgctcgtccagatcatctgacatccccgactctcactcttcatctgctgcttctgcccgtgacgtcgccaagcacaacgccgactctgtgcggtctcactctcacgctcacccccaagacacttctgccgagtatacccagggagacatgctcaacggtgtcgggtccgccagctcccacgccagcaccacctcctccgtcttcagcactacggccactaatgtcgctgcccatgcgtcaaatggttacagcagcaatatcactcccctcaccgctgttggctctcccgcacacctgagctcttctcaaccctcttcatcaaagaaggataccgccactgcctctccgtaccccggcagagctggctctacgaatcataacggcactatgaagtcgttgaccacacctcccacttctgccaagcgccctccggctcgagatataacccgttctaccctgggcaccaagtgtacacacgatccctcaaccgataagaccttatcgtcgtcagagaagaagtccatgaagccgaaatacaagactttcgactcgacagatgacgccccccctccagacccacgcctgtcaaagggcagctggctcgactacatcaatgtcgacttccatctgccccaggcgaggttgcgccagaccccttacaacctcaagccctactcatatgatgctgccaccaccatcggctctggccctcccacccaggtcgtggtcagcggtttcaatcccttgattaccttctctaaggtcgcgaacatctttgcttctttcggtgatgtggcagaaagtagtaacaaaatgcatccccataccgggagctacttgggctttgcgactttccgattcagagactctaatcagccacgtcggccgcagatcactggctatgacgccgcgaagagagcagtgaggtcgatgaatgggcggaagatcgagtctcagtatgtcaaggtcgaattcgatcgcgatgggaagcaaagcagacgaatgctggagaacgttctcaggagagaccgagaagaagaggcccgtgctgccgcgaaaccgtctccccctacaggaccaaggaccaatagcgaaagcttccacgcccactcgtcgcggagctctgttgatacgtctgtaccacggccaccggcagatgcctttggacgaccgcctccctctgccccgaaaggtcctgctggtggccgactgcgtccaataacgaacgaacctacaagctgggctcttccatcatccaagccgaaaccccaggccgctgtcgcacagaccataccgagtaccctcaaaggcgacccgtacatatttgtctccgacgaaagcgtgcctgtaatggccactacagtccctcacatgaagaaacgtctcaaggcctttatgtttgacgacattttgactgatcgcgcgggctactatataatattctctaataactcccgtggccgagaggaagcaatcagatgctaccgaacagctaacgaaagctcctttttcacgtatagtatggctatgagccttcacaacgcggcatcgaatacatccttagcaacgagttcgtcacggccgggcgattcggaccgacgcgacccacggtacagagacgaacaccagtatcgccctcgcgaagaacgacgccacctacaggagagcatattagaagaagagaagaagcagcgtggcctgaacttcgatcccgtcaaagaagcaatagaaatcatccgtcaagagttgaaggaccaactcgtcgggcgtatccgaaccgagatttcgaaccctgcgctgctcgattacttgaacccagacaatcacgctgcgaaacggcgcaggctgaatctgcaagatccgttgggtccaaaacccatcatcaacaaagagacctacagcatttcgcctgccagtacgcccaactctcgggccgatccgattgagcgcagaaccgctcgtctcaacgtaacggcactacccagaatcaagaaagtcaagggccaagctgcggcacagcgtaactatggattcacggatccatttgcccgaaacagaccatcagtggcgcgcaatgcatttcgcggcctccatcatcgtctccagccgcctgatagcgatgaggagacctcagatgcagaaggcgagaaatacgtccgggactctgttgcgcgcgatacagaggagcctgactcacgacctcgcagtcggatgagtactgacgaagatgccttcgacacttttgcagacgaggactcgatgacggaagctagctttgtcgtcaacgacactgccactcggcctaagaagaggaagttggatcttcaagtcgaagcagctatcaaacgccaaaagaagtctgacgaggaactctttggagtcactatcgatacattggaaaatgagttccccagcccaactgatgaggttctgcctgatgtcgacagcgcccgcttggatgtggaacgtgccgactctctcacaccctccgacaagcctttgaagggtaagaagaagacgacggtggccaagcccaagaagaaaacgaagaaacagatattcgaagaacgagaggcaatgaagaagcaacaacaggatgcttatgttgaagaggcactagaacaggcatgcaaacaacccacagtcgagccggaagcgccgttgaaaaagccgtcgatcgtggaagaaaaggaggaaccacttcctcaggatgaccggttttctgacaaagttcttcctgctatggcgttgccagaagcattcacgttatcattatcaaccattccatctgttcagtatgaactcaaagatcgaccggatcttagcaaactcaagagaagagcggttccaagcagtataggagaaccgcagctctgggtatggaagcacgaacggatacgtgagctcaacgctagcgaggacttggcgcccaatggttcgcttcccattgacgggtactatgtatcgaatggcacaggctgtgctcgtaccgaaggggtcaaaaagattctcaattctgaaaagtcaaagtacctgccccatcaccttaaagtgcaaaaggtgcgggaagaacgacaacaacgcgctgcgaagaccggcagcaaagatgttgtcgtctctgctgcggaggccgctcgacttgctgctgagagactggttgccaagggcaattcaagagcaaaccgcgtcaacaaccgacgcttcgttgctgatcttaatgatcagaaaaagacgcttggacaagattccgatgtccttcggttcaaccagcttaaaaagcggaagaaacccgtcaagttcgcccgttctgccatccacaactggggactctacgccatggagaatattaacaaagacgacatgattattgagtacgtgggtgaacaagtgcgacaacagatctcggagatccgagaagcccgatacctaaagagcggaattggtagcagctacctgttccgaattgatgacagtactgtcattgatgcaacgaagaagggtggtattgctcgtttcatcaatcacagctgcatgccgaactgtacggccaagatcatcaaagtcgagggcagtaaacgcattgtgatttatgccctccgggacatcgctcagaatgaagagttgacctacgactacaagttcgagcgcgagatcggaagcacggaccgtatcccctgcctttgcggtaccaccgcttgcaagggattcctcaattaatatcaatttttgctctgtatctactattatcatgaatagtggaggctatctactgtcatggattgtcatcacacagtatggagtttttgcgcattgcgtctcaggtttccggctctcttcaccattttacacttctcccggtgcctttggatcaacttcgatacctatataatgcattcaacggccggattgtttgttttttcttctcaccaaaaaaatggacggcgaaacggtcttaaaaggggtgaaaagtgtaccaccaatgacaattctcgacatttgattgcgctcgggtcatgcgcaaaggcgttctcacggcactaggggaactttctacgggtaggagatttcgggtcttttcactgctcgggaataataactggggccttgcctcgtgaaatctttttagacggggaggaagcagatcttttaacaatgcactgcccctggaagttggagatggtgggagttcgaggctttcaacctgcagggtgatggagaggagagagtgcggattggcgatggaatctgctagtgtatataggagtgtgtctatcccatgcggtctcccgcgtcgatttatcatgtcgcgttgaggacgtgggatgacgaacgttgtctatattgaacagagagcacgatgacgatgaatcgtttctgatggattttgtatgctttgatgtggaatgtgaatgcgagatgaattgtgacattgtgtggtgttggaagatatgtatctatctgattgctagaagattttgaaaaccttagtttcgacagcgaatatgcatctctgtgtaacttgaaaactcgtgacaccatctagcttattatgtgtgtttaattctttaattcgaaatgcgtacaaaatgcgtgcgcatccgactctct

SEQ ID NO: 14411 - DNA, 1314 bp, Muscodor strobelii
  misc_feature: SGI cDNA ID NO. 564748
  misc_feature: Encodes the peptide sequence at SEQ ID NO 14412
atgtccgaccagaaaggggccctggccacggagccgaagaccataggtacgtccgacacggaggagtcgacggtcgccgaaactgcgccgctgcctcctaagttaccgatgggcgggttggccggctggctgcaggtcgctgcttcgtttgcgctgtttgggaatacgcttggtctcttaaacagcttcggtgtctaccaaacgtactacgagacaaccctcttaacctcccaatcagcctcagacatatcatggataggctcaattcagtctttcttcctgatggctattggggttttcatcgggccattatatgatgccggccactgtcgcattctcttaatcgtcggtactatcgccgtcacgctgggttacatgttgacgagcattgcaagtcaatattggcaaatattcttggcgcaaggagttttaacaggcatcggcacaagttgtctaacgatcccttcgatcgccttagtgccgccgtattttacgccttctgatcgaccgtgggccatgggcgcagcgacgcttgggagcagtttggcgggtatcatctatccgcttttattccaagcactacagccgcgtattggatttccctgggcagtgaggcttcaaggttttatcatccttctgatgtgtatatttgccgtggtcgttgcgaggccaaggtacggtccaaaaaggcggaagctaacggagctcttcaagtccgccaagttgagcgataagcggtacatggtgtattgcgttgggatattcttcaacaatcttgggctcttcaatccaacgttctacatcctgagttataccgagcttcatggaggcgctggccatgcggtcacgaagtacttgctttcgattctgaacggttcatccatcttcggacgacttgttccgtcgtggctggcgaagagactcggcgttaatatcgcctttctcatcaccgttttcctatcgtccgcgagtgtattttattggacgagtgcatctacgcttggtggaaacatcgccttcgccgtgctttatggattcttctttggtggaacagttgcctttgcatcagtcgttttgactgcgatcactgacgacttgtcctacctcggcactcggcttggagttcttaatatcttgaaaggcgttgcttcagtcgctggagctcccattggcggtgcgctaatacaatccagtggtggctatctaagcatgcagctctttaccggattctctatttttctttcagctttcttctcattgattctgagttacatggtgtttaggagagaagggggactgataccgaataagtag

SEQ ID NO: 14412 - protein, 437 aa, Muscodor strobelii
  misc_feature: SGI Peptide ID NO. 564748
  misc_feature (52)..(388): Pfam Id: PF07690 Pfam Desc: Major Facilitator Superfamily
  misc_feature (11)..(426): NCBI GI: 145244925 Blast Desc: An11g07630 [Aspergillus niger] gi|134079425|emb|CAK45957.1| protein product [Aspergillus niger]
  misc_feature (1)..(412): NCBI GI: 119497229 Blast Desc: monocarboxylate permease homologue, mch4 [Neosartorya fischeri NRRL 181] gi|119413538|gb|EAW23479.1| monocarboxylate permease homologue, mch4 [Neosartorya fischeri NRRL 181]
  misc_feature (3)..(431): NCBI GI: 145229117 Blast Desc: An01g04400 [Aspergillus niger] gi|134054966|emb|CAK36975.1| protein product [Aspergillus niger]
  misc_feature (16)..(416): NCBI GI: 67524577 Blast Desc: AN2746.2 [Aspergillus nidulans FGSC A4] gi|40743998|gb|EAA63180.1| AN2746.2 [Aspergillus nidulans FGSC A4] gi|259486340|tpe|CBF84100.1| TPA: MFS monocarboxylate FGSC
  misc_feature (1)..(412): NCBI GI: 159124837 Blast Desc: monocarboxylate transporter, [Aspergillus fumigatus A1163]
  misc_feature (8)..(431): NCBI GI: 255941146 Blast Desc: Pc16g10320 [Penicillium chrysogenum Wisconsin 54-1255] gi|211585965|emb|CAP93702.1| Pc16g10320 [Penicillium chrysogenum Wisconsin 54-1255]
  misc_feature (1)..(425): NCBI GI: 242803050 Blast Desc: MFS monocarboxylate transporter, [Talaromyces stipitatus ATCC 10500] gi|218717440|gb|EED16861.1| MFS monocarboxylate transporter, [Talaromyces stipitatus ATCC 10500]
  misc_feature (13)..(350): NCBI GI: 145616593 Blast Desc: MGG_10702 [Magnaporthe grisea 70-15] gi|145009408|gb|EDJ94108.1| MGG_10702 [Magnaporthe grisea 70-15]
  misc_feature (39)..(425): NCBI GI: 240111159 Blast Desc: Major Facilitator Superfamily protein [Coccidioides posadasii C735 delta SOWgp]
  misc_feature (39)..(415): NCBI GI: 119189657 Blast Desc: CIMG_04876 [Coccidioides immitis RS]
MSDQKGALATEPKTIGTSDTEESTVAETAPLPPKLPMGGLAGWLQVAASFALFGNTLGLLNSFGVYQTYYETTLLTSQSASDISWIGSIQSFFLMAIGVFIGPLYDAGHCRILLIVGTIAVTLGYMLTSIASQYWQIFLAQGVLTGIGTSCLTIPSIALVPPYFTPSDRPWAMGAATLGSSLAGIIYPLLFQALQPRIGFPWAVRLQGFIILLMCIFAVVVARPRYGPKRRKLTELFKSAKLSDKRYMVYCVGIFFNNLGLFNPTFYILSYTELHGGAGHAVTKYLLSILNGSSIFGRLVPSWLAKRLGVNIAFLITVFLSSASVFYWTSASTLGGNIAFAVLYGFFFGGTVAFASVVLTAITDDLSYLGTRLGVLNILKGVASVAGAPIGGALIQSSGGYLSMQLFTGFSIFLSAFFSLILSYMVFRREGGLIPNK

SEQ ID NO: 14413 - DNA, 2092 bp, Muscodor strobelii
  misc_feature: SGI EST ID NO. CUFF.34297.1
  misc_feature: Variant of the nucleotide sequence at SEQ ID NO 14411
aacgtcagccttccactgcagcataaatactatagtgtaaccctacccagaataaaaagaaattgcatatcatttgcgtccgttctactcatcgtctctcgcctatcttgcctatctcacaacttgcaaacctatcactgattccattttccgtgggaatcacgggtcaattcagtacatgcaaaaattgccatttgggagctatccgggtctcaaaacgcgaatatccaagcatttcgcgctgaatgtaaatctaaacactactgacaatgtgtattcataaccctagtatccccattgaccttctgcttcaccaacatgaacaaataatatttctacgctacctacaagtcgaggatatactgcctacctgacggaacaccccggaaacggcacccgggccgtcagggaatatccatatatggggtatatccgatccgacccagcgagccggcgggcttatattcttactgggccctgaaatgtgagaaattaggaatccttcgaagactaagtaaccagaagtcggatgtaagaaagcgccttgcatgtcatagaaacgccatatcttataaaatgtgatgcccacgtttgttcgtcatttccagatcctgggaatcttggctttatttcctacgtgtgtgggatcttatcaaattgatctagattgcgtgatatggtatagatgaggcttggcatagaattgacatagacatgtccgaccagaaaggggccctggccacggagccgaagaccataggtacgtccgacacggaggagtcgacggtcgccgaaactgcgccgctgcctcctaagttaccgatgggcgggttggccggctggctgcaggtcgctgcttcgtttgcgctgtttgggaatacgcttggtctcttaaacagcttcggtgtctaccaaacgtactacgagacaaccctcttaacctcccaatcagcctcagacatatcatggataggctcaattcagtctttcttcctgatggctattggggttttcatcgggccattatatgatgccggccactgtcgcattctcttaatcgtcggtactatcgccgtcacgctgggttacatgttgacgagcattgcaagtcaatattggcaaatattcttggcgcaaggagttttaacaggcatcggcacaagttgtctaacgatcccttcgatcgccttagtgccgccgtattttacgccttctgatcgaccgtgggccatgggcgcagcgacgcttgggagcagtttggcgggtatcatctatccgcttttattccaagcactacagccgcgtattggatttccctgggcagtgaggcttcaaggttttatcatccttctgatgtgtatatttgccgtggtcgttgcgaggccaaggtacggtccaaaaaggcggaagctaacggagctcttcaagtccgccaagttgagcgataagcggtacatggtgtattgcgttgggatattcttcaacaatcttgggctcttcaatccaacgttctacatcctgagttataccgagcttcatggaggcgctggccatgcggtcacgaagtacttgctttcgattctgaacggttcatccatcttcggacgacttgttccgtcgtggctggcgaagagactcggcgttaatatcgcctttctcatcaccgttttcctatcgtccgcgagtgtattttattggacgagtgcatctacgcttggtggaaacatcgccttcgccgtgctttatggattcttctttggtggaacagttgcctttgcatcagtcgttttgactgcgatcactgacgacttgtcctacctcggcactcggcttggagttcttaatatcttgaaaggcgttgcttcagtcgctggagctcccattggcggtgcgctaatacaatccagtggtggctatctaagcatgcagctctttaccggattctctatttttctttcagctttcttctcattgattctgagttacatggtgtttaggagagaagggggactgataccgaataagtagacagagaacagcgttttgatgcggctgaagaaaatcacctttgatctaaaccttgaagattcgc

SEQ ID NO: 14414 - DNA, 645 bp, Muscodor strobelii
  misc_feature: SGI cDNA ID NO. 564749
  misc_feature: Encodes the peptide sequence at SEQ ID NO 14415
atgaagacctttgtcgctcttattacttttgcttatttagcgtataccaaagcagcttctctgcccaccgaggatttagccatttaccacgggttcccggcgaaccatacattatcgacaatcacttggactctgccgattgttgaaggtggcgaggagtataccttcaatgggacaatagaggatgttttcgcccaagtgaacgacgaacgcatcaagcaaggctttgggccacttgatgatcctctcgacgacatgaatcacgccagggaaatcaatcttggaaatagtcttcaggaccgctcactcaaccataccgaatgcaatattggtcttctaggtgcagcatcgagcgaaaaaataatgaatggtatcaaatacctcgaaaagttgaaaacaaaatgtcgcaatggcgctggccctggtaactgcggacggatctcatgcagttggaactctgccatctactggtgtaatgacaagcctgtcgattccaatgattatgattgctcatccttcgcggcttatgctcgcgagatcttcgacgagtgtaactacagagtcggcttgaatatggatttggtctggggtcagtcttgggacactgacaactttcgcgtgatcattggccttgacccctgttag

SEQ ID NO: 14415 - protein, 214 aa, Muscodor strobelii
  misc_feature: SGI Peptide ID NO. 564749
  misc_feature (27)..(214): NCBI GI: 121717032 Blast Desc: conserved [Aspergillus clavatus NRRL 1] gi|119404141|gb|EAW14558.1| conserved [Aspergillus clavatus NRRL 1]
  misc_feature (26)..(214): NCBI GI: 170940149 Blast Desc: protein product [Podospora anserina]
  misc_feature (3)..(214): NCBI GI: 238839568 Blast Desc: [Microsporum canis CBS 113480]
  misc_feature (13)..(209): NCBI GI: 16945448 Blast Desc: [Neurospora crassa]
  misc_feature (34)..(160): NCBI GI: 171693255 Blast Desc: protein product [Podospora anserina] gi|170946576|emb|CAP73377.1| protein product [Podospora anserina]
  misc_feature (1)..(214): NCBI GI: 238497574 Blast Desc: conserved [Aspergillus flavus NRRL3357] gi|220693296|gb|EED49641.1| conserved [Aspergillus flavus NRRL3357]
  misc_feature (34)..(214): NCBI GI: 39971861 Blast Desc: MGG_07246 [Magnaporthe grisea 70-15] gi|145019746|gb|EDK03974.1| MGG_07246 [Magnaporthe grisea 70-15]
  misc_feature (41)..(187): NCBI GI: 171679114 Blast Desc: protein product [Podospora anserina] gi|170937628|emb|CAP62287.1| protein product [Podospora anserina]
  misc_feature (36)..(214): NCBI GI: 238506391 Blast Desc: conserved [Aspergillus flavus NRRL3357] gi|220689110|gb|EED45461.1| conserved [Aspergillus flavus NRRL3357]
  misc_feature (13)..(165): NCBI GI: 164423885 Blast Desc: NCU07786 [Neurospora crassa OR74A] gi|157070272|gb|EAA29471.2| [Neurospora crassa OR74A]
MKTFVALITFAYLAYTKAASLPTEDLAIYHGFPANHTLSTITWTLPIVEGGEEYTFNGTIEDVFAQVNDERIKQGFGPLDDPLDDMNHAREINLGNSLQDRSLNHTECNIGLLGAASSEKIMNGIKYLEKLKTKCRNGAGPGNCGRISCSWNSAIYWCNDKPVDSNDYDCSSFAAYAREIFDECNYRVGLNMDLVWGQSWDTDNFRVIIGLDPC

SEQ ID NO: 14416 - DNA, 215 bp, Muscodor strobelii
  misc_feature: SGI EST ID NO. CUFF.34280.0
  misc_feature: Variant of the nucleotide sequence at SEQ ID NO 14414
cgaaaaaataatgaatggtatcaaatacctcgaaaagttgaaaacaaaatgtcgcaatggcgctggccctggtaactgcggacggatctcatgcagttggaactctgccatctactggtgtaatgacaagcctgtcgattccaatgattatgattgctcatccttcgcggcttatgctcgcgagatcttcgacgagtgtaactacagagtcggct

SEQ ID NO: 14417 - DNA, 4461 bp, Muscodor strobelii
  misc_feature: SGI cDNA ID NO. 564750
  misc_feature: Reduced expression when VOC is produced
  misc_feature: Encodes the peptide sequence at SEQ ID NO 14418
atggctaacgaaaacgtggaaaaggagacaaagccggcagaccccagcacggaggttggtgcgccacttgactcggagcccacgacaccagtaggaccagattcgccagtaagtccagatacgccaataggtccagatcatgaattcctcgacgaccctgaagagaagatccgcaagagcgcggaatctctcgaggagagagcagatagagatgagctcagacgcaccatgagccatgcgaccgataccagcatcattacacgcacaacaacccgcgcctcggtgccagccacacccaaaaaaccatggtacaagacgccgaatcccttgaaatggggttctgttccgccagtacccaaggagaagggtgaatcaggagaggctcgagctggtttcttgagtaagctgacattccactggatgggcccgattatggatgttggtgcgaaacgtggattggacatgaacgatctgtggaaagtcaatcccgcacggcaagctgaggtgatgagcgaaaagaccaaagcgtcatttgagcggcggttgaaaaatggcgataaatatccgctactttgggccttgcacgagaccttcttttgggaattttggcttggtggctttgcctcattgacttcatccatctttcaggttttgtctccgttcgtcctgagatttttgatccagtatgccacggacgcgtacagcgcgacgcattccggcgctccagaacccccaataagtcatggcgttggtcttgtcattggtgtaactctcatgcagtttgcccagagtctaggaacaggccacttcatctatcgaggtatgatgatcggaggccaagtccgcgccgtgttaatcgccatgatctacgaaaaatcaatgatgatatctaatcgggccaaggctggtggtaaggccatcgaggctggtcctgctggagacgcatctgaaacgaccgaaaaagatgaagggaagaagtcgaaaaagaatgaaaagactgctcaggaaatcaagaacgacaagatgggcattgtaggtgagggtttgggctggagcaacggtcgaatcgtcaatttgatgtccgttgacacatatcgagtcgatcaagcctcagccatgttccatttgggatggacatctccagcggcctgtatcatcacactcgtacttcttcttgtcaacctgggttacagtgcattgtcaggctttgccgtacttgtcatcggtattccggccttgacacgagccatccgcagtttgttcagacggcgtgttgtcattaacaagataacagatcagcgtgtcgggttgatgcaagaaattctgcagtccgtacgctttgtcaagtattttggctgggagcatgcgtttttggagcgcctgaagaagattcgagaccgtgaaattcgcggtattcagtttctgctgggaatccgcaatgccatcaactccgtgagcctatcgctcccaatttacgcctcgtttctcgctttcatcacttactccctcacggatcacggtcttgcccctgccaatgtcttctcgtcacttgccctgtttaacggtcttcggctaccactcaacctgcttcccctcgttattggcaacaccgttgatgcctggtcttctttgaagcgaattcaagaatttatgacttctgaggaccaagaagacaccgccgagttcaacccagaggcagagaaggctgtcgtcatgactgatgcgagtttcacttgggagcggacacccacccaagaaaacgacaagccagaggctaagggcaaaggcaggaagggatcgccgaagaaaatgcccacatccaaagacgagaagaaagcagaggcttcggatgcaagctccgatacggctagtaccctagtggaagagcgtgaagcattcaagctggacgatataagcctagcagttgatcggaaagagctcattgctgtcattggcggtgttggaagtggcaaatcgtctcttctcgcagcattggctggtgacatgagaaagacgtcgggtgaggttgttttgggagcatcacgagctttctgccctcaatatgcctggattcagaacgctacagtccgacagaacattcttttcggtaaagatatggaccgctcgtggtataaggaagtcatcaaagcatgtgctctggagccagatttggatatgctgcccgatggcgatgccactgagatcggcgagagaggcatcacggtctccggcggacaaaaacaacgcttaaacatcgcccgagctatttacttcaacgctgacatcgtgctcatggacgaccccttaagtgccgtcgatgcccacgtcgggcgacatatcatggataatgctatcctcggattgttgaaggacaaatgccgaatccttgccactcatcaactctgggtcctaaatcgatgcgaccgtatagtttggatggatggtggtaggatccgcgctgttgacacatttgaaaacctcatggccaacgaacctggcttcaagcacttgatggataccaccgatcttgaaaagaaggaagaagaagacgacagcgcagaggctgagaagaagccagatgagaagaaaaggaagcaaaagaggaagggcggtggcctcatgcaagccgaagagcgtgccgtttccagtgttccctggtctgtctacggcgaatacgtcagagcgtccggctccatactgaattggccattgacgatgttcatcctcgtcctcgccgtgggcggcaatatcgtcaccagtctttggctgtcatggtggacatcgaacaagttcggcttcgcaaacgcagtctacatcggcgtgtacgcggccttgggcacagtccaggccatcttcttgttcaccttctccattatgctgacaatctatggcacgcgagcgagtaaaaagttgctgcaccaggccgtggtgcggacattacgagcccctatgtctttctttgacacaacgccgctcggtcgtatcaccaaccgattttcgcgcgatgtcgacgtcatggacaacaacatttccgatgccttccgcatgttcttcttgacaattgcacagattctcgccgtgttcgcactgatcattgcgtacttctactacttcgccattgccctcgtacccttggcggtggtcttcgtaatggccgcttcgtattaccgtgcatcagcccgagaagtcaagcgtttcgaatctgttctccggtctagtgtctttgccaaatttagcgaaggtcttacaggcgttgcctccattcgtgcgtatgggcttaaagaccggttcgtcggtgatctatggaaagcaattgacgagatgaactcggcgtattacatcacatttgccaatcagcggtggctatcgctccgcctcgacctcatcggtaacctgctggtctttaccacgggtatcctggtcgtgacatcccggttcagcgtcccgccttcaatcggcgggttggtcctgtcgtatattctgagtatcgtccagatgctgcagttctccgtgaggcagctagccgaagtggagaacggcatgaatgctgtggaacgtctgctgcactatggcacgcagctcgaggaagaggctccggaacatactatcgacgttcgaccttcatggccagagaagggtgaaattagattcgacaacgtcgaaatgagataccgtgccaacctcccactggtgctcaagggcttcgacattcatgtccagggcggcgagcgaatcggtatcgtcggccggacaggcgccggtaaatcctctattatgtcgaccctattccgtctggtagagatctcgggtggccacataaccatcgacgggatcgacatctccactatcggccttcacgatctacgctcacgcctcgccatcattccgcaggacccgacgctcttccacggcacggtgcgcagtaacttggatccattcaacgagcattccgaccatgacctatggtctgcgctccgccaagccgatctcgtgcccgcggacgcgaaaatcgaggataaagacccatcacgcatccacctcgactccgtcgtcgaggaagaaggtctcaacttcagtctcggccagcgacagctcatggcgctggcacgtgccctggtgcgcggatcacgcatcatcgtgtgcgacgaagcaacatcctccgtcgacatggagacggacgacaagatccaaaatacaatggcagccggcttcaaaggccggacactgctctgcatcgcacatcgtctgcgtaccatcatagggtatgacaggatatgcgtcatggacgctgggcgtatagcagaacttggcacgccgttagagttgtacgagaagaccgatgggatattcaggggtatgtgtgaacgcagtgggattagacgggaggatatccaacatgctacgcttgcgcttactgggggcgcggttacaagggatgaggatcggatcgaacctgcgtga

SEQ ID NO: 14418 - protein, 1486 aa, Muscodor strobelii
  misc_feature: SGI Peptide ID NO. 564750
  misc_feature (899)..(1171): Pfam Id: PF00664 Pfam Desc: ABC transporter transmembrane region
  misc_feature (202)..(527): Pfam Id: PF00664 Pfam Desc: ABC transporter transmembrane region
  misc_feature (1242)..(1431): Pfam Id: PF00005 Pfam Desc: ABC transporter
  misc_feature (645)..(816): Pfam Id: PF00005 Pfam Desc: ABC transporter
  misc_feature (904)..(1171): Pfam Id: PF00664 Pfam Desc: ABC transporter transmembrane region
  misc_feature (351)..(527): Pfam Id: PF00664 Pfam Desc: ABC transporter transmembrane region
  misc_feature (51)..(1467): NCBI GI: 85102322 Blast Desc: NCU04161 [Neurospora crassa OR74A] gi|16944648|emb|CAC28731.2| related to ATP-binding cassette transporter protein YOR1 [Neurospora crassa] NCU04161 [Neurospora
  misc_feature (65)..(1464): NCBI GI: 171693987 Blast Desc: protein product [Podospora anserina] gi|170946942|emb|CAP73746.1| protein product [Podospora anserina]
  misc_feature (52)..(1474): NCBI GI: 145612964 Blast Desc: MGG_08309 [Magnaporthe grisea 70-15] gi|145020046|gb|EDK04274.1| MGG_08309 [Magnaporthe grisea 70-15]
  misc_feature (125)..(1473): NCBI GI: 256730980 Blast Desc: NECHADRAFT_63546 [Nectria haematococca mpVI 77-13-4]
  misc_feature (7)..(1480): NCBI GI: 154321159 Blast Desc: conserved [Botryotinia fuckeliana B05.10] gi|150851992|gb|EDN27184.1| conserved [Botryotinia fuckeliana B05.10]
  misc_feature (4)..(1468): NCBI GI: 261355611 Blast Desc: multidrug resistance-associated protein [Verticillium albo-atrum VaMs.102]
  misc_feature (7)..(1468): NCBI GI: 189193977 Blast Desc: multidrug resistance-associated protein 5 [Pyrenophora tritici-repentis Pt-1C-BFP] gi|187978891|gb|EDU45517.1| multidrug resistance-associated protein 5 [Pyrenophora tritici-repentis
  misc_feature (7)..(1464): NCBI GI: 169601636 Blast Desc: SNOG_03688 [Phaeosphaeria nodorum SN15] gi|160705982|gb|EAT88893.2| SNOG_03688 [Phaeosphaeria nodorum SN15]
  misc_feature (20)..(1464): NCBI GI: 240104788 Blast Desc: ABC transporter family protein [Coccidioides posadasii C735 delta SOWgp]
  misc_feature (20)..(1464): NCBI GI: 119178203 Blast Desc: CIMG_07960 [Coccidioides immitis RS]
  misc_feature (127)..(1458): SWISSPROT Homolog: EC 3.6.3.44 Xenobiotic-transporting ATPase
  misc_feature: Useful for introducing or modulating the production of volatile compounds
MANENVEKETKPADPSTEVGAPLDSEPTTPVGPDSPVSPDTPIGPDHEFLDDPEEKIRKSAESLEERADRDELRRTMSHATDTSIITRTTTRASVPATPKKPWYKTPNPLKWGSVPPVPKEKGESGEARAGFLSKLTFHWMGPIMDVGAKRGLDMNDLWKVNPARQAEVMSEKTKASFERRLKNGDKYPLLWALHETFFWEFWLGGFASLTSSIFQVLSPFVLRFLIQYATDAYSATHSGAPEPPISHGVGLVIGVTLMQFAQSLGTGHFIYRGMMIGGQVRAVLIAMIYEKSMMISNRAKAGGKAIEAGPAGDASETTEKDEGKKSKKNEKTAQEIKNDKMGIVGEGLGWSNGRIVNLMSVDTYRVDQASAMFHLGWTSPAACIITLVLLLVNLGYSALSGFAVLVIGIPALTRAIRSLFRRRVVINKITDQRVGLMQEILQSVRFVKYFGWEHAFLERLKKIRDREIRGIQFLLGIRNAINSVSLSLPIYASFLAFITYSLTDHGLAPANVFSSLALFNGLRLPLNLLPLVIGNTVDAWSSLKRIQEFMTSEDQEDTAEFNPEAEKAVVMTDASFTWERTPTQENDKPEAKGKGRKGSPKKMPTSKDEKKAEASDASSDTASTLVEEREAFKLDDISLAVDRKELIAVIGGVGSGKSSLLAALAGDMRKTSGEVVLGASRAFCPQYAWIQNATVRQNILFGKDMDRSWYKEVIKACALEPDLDMLPDGDATEIGERGITVSGGQKQRLNIARAIYFNADIVLMDDPLSAVDAHVGRHIMDNAILGLLKDKCRILATHQLWVLNRCDRIVWMDGGRIRAVDTFENLMANEPGFKHLMDTTDLEKKEEEDDSAEAEKKPDEKKRKQKRKGGGLMQAEERAVSSVPWSVYGEYVRASGSILNWPLTMFILVLAVGGNIVTSLWLSWWTSNKFGFANAVYIGVYAALGTVQAIFLFTFSIMLTIYGTRASKKLLHQAVVRTLRAPMSFFDTTPLGRITNRFSRDVDVMDNNISDAFRMFFLTIAQILAVFALIIAYFYYFAIALVPLAVVFVMAASYYRASAREVKRFESVLRSSVFAKFSEGLTGVASIRAYGLKDRFVGDLWKAIDEMNSAYYITFANQRWLSLRLDLIGNLLVFTTGILVVTSRFSVPPSIGGLVLSYILSIVQMLQFSVRQLAEVENGMNAVERLLHYGTQLEEEAPEHTIDVRPSWPEKGEIRFDNVEMRYRANLPLVLKGFDIHVQGGERIGIVGRTGAGKSSIMSTLFRLVEISGGHITIDGIDISTIGLHDLRSRLAIIPQDPTLFHGTVRSNLDPFNEHSDHDLWSALRQADLVPADAKIEDKDPSRIHLDSVVEEEGLNFSLGQRQLMALARALVRGSRIIVCDEATSSVDMETDDKIQNTMAAGFKGRTLLCIAHRLRTIIGYDRICVMDAGRIAELGTPLELYEKTDGIFRGMCERSGIRREDIQHATLALTGGAVTRDEDRIEPA

SEQ ID NO: 14419 - DNA, 5523 bp, Muscodor strobelii
  misc_feature: SGI EST ID NO. CUFF.34327.0
  misc_feature: Variant of the nucleotide sequence at SEQ ID NO 14417
tagcaagggtcggatctcccgttcgtagatacgagcagggcaaacacccaaagtctatgtatacttggatgggtaggttccatacgttctgcgatcctggtcacgggattagatgtgtagaaacgggattgacgtatcttggataggtctcactgggttatgctgtcatcgaagcagcctattcactatgagtcagtgatacaattgcacttgtattgtagccatagcgttacaaatctgtacattcagagcgcagagaattaaagaagacaaaaataaagaagtaattgtagaagtggtaattctggtgattagtggtatgctcggagtcaaagaaaacaaaacgccgtgtggagaagaaacgaaattcccgagcagtcaaggatgcacggcggcccagtacaggaagaggggccggatgtcaaagcatcatacagtaggtagtcgcagtaaaataaatatatgtcaccaacctctgccggacagaaacccgtctgtatccgtttctgcctgcttattgtggttctcctttgctgtttcttcaaagacctcctgtccggtcacagtgactcgtactatcacactcgcctcttatcacccatggtcttgagaatcgcccgtagcaaacagcattttgtgtaccacatcacacagatctcctaccctgtgtttcgaacttcattgttctcggcgtctttgtcataataatcgacgagctagatctcgatcagggtgaagctcggcgctaaaaagccgttgtgaccgatatcgtggaattgtcgcacgaaagttcgttttacgctataaaacttttggtgccactaccgattcaactgcgctgccacttgggcggcgcatttcgcttgccacacgatggctaacgaaaacgtggaaaaggagacaaagccggcagaccccagcacggaggttggtgcgccacttgactcggagcccacgacaccagtaggaccagattcgccagtaagtccagatacgccaataggtccagatcatgaattcctcgacgaccctgaagagaagatccgcaagagcgcggaatctctcgaggagagagcagatagagatgagctcagacgcaccatgagccatgcgaccgataccagcatcattacacgcacaacaacccgcgcctcggtgccagccacacccaaaaaaccatggtacaagacgccgaatcccttgaaatggggttctgttccgccagtacccaaggagaagggtgaatcaggagaggctcgagctggtttcttgagtaagctgacattccactggatgggcccgattatggatgttggtgcgaaacgtggattggacatgaacgatctgtggaaagtcaatcccgcacggcaagctgaggtgatgagcgaaaagaccaaagcgtcatttgagcggcggttgaaaaatggcgataaatatccgctactttgggccttgcacgagaccttcttttgggaattttggcttggtggctttgcctcattgacttcatccatctttcaggttttgtctccgttcgtcctgagatttttgatccagtatgccacggacgcgtacagcgcgacgcattccggcgctccagaacccccaataagtcatggcgttggtcttgtcattggtgtaactctcatgcagtttgcccagagtctaggaacaggccacttcatctatcgaggtatgatgatcggaggccaagtccgcgccgtgttaatcgccatgatctacgaaaaatcaatgatgatatctaatcgggccaaggctggtggtaaggccatcgaggctggtcctgctggagacgcatctgaaacgaccgaaaaagatgaagggaagaagtcgaaaaagaatgaaaagactgctcaggaaatcaagaacgacaagatgggcattgtaggtgagggtttgggctggagcaacggtcgaatcgtcaatttgatgtccgttgacacatatcgagtcgatcaagcctcagccatgttccatttgggatggacatctccagcggcctgtatcatcacactcgtacttcttcttgtcaacctgggttacagtgcattgtcaggctttgccgtacttgtcatcggtattccggccttgacacgagccatccgcagtttgttcagacggcgtgttgtcattaacaagataacagatcagcgtgtcgggttgatgcaagaaattctgcagtccgtacgctttgtcaagtattttggctgggagcatgcgtttttggagcgcctgaagaagattcgagaccgtgaaattcgcggtattcagtttctgctgggaatccgcaatgccatcaactccgtgagcctatcgctcccaatttacgcctcgtttctcgctttcatcacttactccctcacggatcacggtcttgcccctgccaatgtcttctcgtcacttgccctgtttaacggtcttcggctaccactcaacctgcttcccctcgttattggcaacaccgttgatgcctggtcttctttgaagcgaattcaagaatttatgacttctgaggaccaagaagacaccgccgagttcaacccagaggcagagaaggctgtcgtcatgactgatgcgagtttcacttgggagcggacacccacccaagaaaacgacaagccagaggctaagggcaaaggcaggaagggatcgccgaagaaaatgcccacatccaaagacgagaagaaagcagaggcttcggatgcaagctccgatacggctagtaccctagtggaagagcgtgaagcattcaagctggacgatataagcctagcagttgatcggaaagagctcattgctgtcattggcggtgttggaagtggcaaatcgtctcttctcgcagcattggctggtgacatgagaaagacgtcgggtgaggttgttttgggagcatcacgagctttctgccctcaatatgcctggattcagaacgctacagtccgacagaacattcttttcggtaaagatatggaccgctcgtggtataaggaagtcatcaaagcatgtgctctggagccagatttggatatgctgcccgatggcgatgccactgagatcggcgagagaggcatcacggtctccggcggacaaaaacaacgcttaaacatcgcccgagctatttacttcaacgctgacatcgtgctcatggacgaccccttaagtgccgtcgatgcccacgtcgggcgacatatcatggataatgctatcctcggattgttgaaggacaaatgccgaatccttgccactcatcaactctgggtcctaaatcgatgcgaccgtatagtttggatggatggtggtaggatccgcgctgttgacacatttgaaaacctcatggccaacgaacctggcttcaagcacttgatggataccaccgatcttgaaaagaaggaagaagaagacgacagcgcagaggctgagaagaagccagatgagaagaaaaggaagcaaaagaggaagggcggtggcctcatgcaagccgaagagcgtgccgtttccagtgttccctggtctgtctacggcgaatacgtcagagcgtccggctccatactgaattggccattgacgatgttcatcctcgtcctcgccgtgggcggcaatatcgtcaccagtctttggctgtcatggtggacatcgaacaagttcggcttcgcaaacgcagtctacatcggcgtgtacgcggccttgggcacagtccaggccatcttcttgttcaccttctccattatgctgacaatctatggcacgcgagcgagtaaaaagttgctgcaccaggccgtggtgcggacattacgagcccctatgtctttctttgacacaacgccgctcggtcgtatcaccaaccgattttcgcgcgatgtcgacgtcatggacaacaacatttccgatgccttccgcatgttcttcttgacaattgcacagattctcgccgtgttcgcactgatcattgcgtacttctactacttcgccattgccctcgtacccttggcggtggtcttcgtaatggccgcttcgtattaccgtgcatcagcccgagaagtcaagcgtttcgaatctgttctccggtctagtgtctttgccaaatttagcgaaggtcttacaggcgttgcctccattcgtgcgtatgggcttaaagaccggttcgtcggtgatctatggaaagcaattgacgagatgaactcggcgtattacatcacatttgccaatcagcggtggctatcgctccgcctcgacctcatcggtaacctgctggtctttaccacgggtatcctggtcgtgacatcccggttcagcgtcccgccttcaatcggcgggttggtcctgtcgtatattctgagtatcgtccagatgctgcagttctccgtgaggcagctagccgaagtggagaacggcatgaatgctgtggaacgtctgctgcactatggcacgcagctcgaggaagaggctccggaacatactatcgacgttcgaccttcatggccagagaagggtgaaattagattcgacaacgtcgaaatgagataccgtgccaacctcccactggtgctcaagggcttcgacattcatgtccagggcggcgagcgaatcggtatcgtcggccggacaggcgccggtaaatcctctattatgtcgaccctattccgtctggtagagatctcgggtggccacataaccatcgacgggatcgacatctccactatcggccttcacgatctacgctcacgcctcgccatcattccgcaggacccgacgctcttccacggcacggtgcgcagtaacttggatccattcaacgagcattccgaccatgacctatggtctgcgctccgccaagccgatctcgtgcccgcggacgcgaaaatcgaggataaagacccatcacgcatccacctcgactccgtcgtcgaggaagaaggtctcaacttcagtctcggccagcgacagctcatggcgctggcacgtgccctggtgcgcggatcacgcatcatcgtgtgcgacgaagcaacatcctccgtcgacatggagacggacgacaagatccaaaatacaatggcagccggcttcaaaggccggacactgctctgcatcgcacatcgtctgcgtaccatcatagggtatgacaggatatgcgtcatggacgctgggcgtatagcagaacttggcacgccgttagagttgtacgagaagaccgatgggatattcaggggtatgtgtgaacgcagtgggattagacgggaggatatccaacatgctacgcttgcgcttactgggggcgcggttacaagggatgaggatcggatcgaacctgcgtgagcgaaaaggggagaggaaatagatgatttgttgcgttgcatgcaccaatgtgctggagtttgtggcattttcgttttcagcttgcgttttgatgatgatttactacgggctttgtcgcccgaagtatccaagaagcatatagcattgcatgaatagcattgataatacatggaataacatgatcatgaa

SEQ ID NO: 14420 - DNA, 1005 bp, Muscodor strobelii
  misc_feature: SGI cDNA ID NO. 564751
  misc_feature: Reduced expression when VOC is produced
  misc_feature: Encodes the peptide sequence at SEQ ID NO 14421
atgcgagcccatcacgtcctggttatcctggccgctggtttcgcctcgacgactctagcgcaaggcggcgatgatacatcttcgagctcaaccgaatcgaccgagtcgaccgagtcttcctcctcggcctcgtcgtcggcatcgctccccaacataagcgatgccaccaagacttcatccacgtcgtccgaaacctcgacgtcggacctgccaggcatcacatcatccacaagcactggcactaaaccgccgttaccgactatatctacgaccaccaacaagggcacctacagctatcctgctcctaccgttccgccgaccaacaatgccccatatatgcagaaatcgaccatgccacagggcaccgtcttcattgctgtcggcgctatcctcggcgctttcgctgttgctgttctggtctggcgtgctgtcgtcgcctgcatgctcacccgttctgtcaagcgtgctaatctggctcagcacatggccaacgacaaagccaccttcggcgctccctccactcctttctacaagtacagcgatcatcaatctactcactcccttggcaacgcaatggccggtcgtggcgtccggagaacacagcgtggtcccacgccctctgcgaccccgagccagtccaatctcttcttctcccccacggctcctggaggcggcaattcggctaaccgcgaatcacgattcctcccatcgggcttctatgcttccagcggtgtctcgcctcaacagggccactctcagtccattagtttgaccaacctgaggccggagtctcagggttacgctcgcgcactcgacccaagccccccggactctcccagcttggcgccgcctcacgatatcgggcgcagaaatcctagttccagcacgctcaacctcaacaggccaacgagtggccgtgcccccagtgcctatctcgaggatttgctcgccgacaacccggaacagttccctcccaccaacacgtcgccgcgccgtcgaggttaa

SEQ ID NO: 14421 - protein, 334 aa, Muscodor strobelii
  misc_feature: SGI Peptide ID NO. 564751
  misc_feature (24)..(325): NCBI GI: 256730979 Blast Desc: NECHADRAFT_101608 [Nectria haematococca mpVI 77-13-4]
  misc_feature (25)..(325): NCBI GI: 46125891 Blast Desc: FG07323.1 [Gibberella zeae PH-1]
  misc_feature (8)..(325): NCBI GI: 171693985 Blast Desc: protein product [Podospora anserina] gi|170946941|emb|CAP73745.1| protein product [Podospora anserina]
  misc_feature (59)..(325): NCBI GI: 85102317 Blast Desc: NCU04160 [Neurospora crassa OR74A] gi|12718466|emb|CAC28732.1| related to CSI2 protein [Neurospora crassa] gi|28922859|gb|EAA32080.1| NCU04160 [Neurospora crassa
  misc_feature (8)..(323): NCBI GI: 116197977 Blast Desc: CHGG_07144 [Chaetomium globosum CBS 148.51] gi|88178423|gb|EAQ85891.1| CHGG_07144 [Chaetomium globosum CBS 148.51]
  misc_feature (85)..(318): NCBI GI: 145601781 Blast Desc: MGG_14270 [Magnaporthe grisea 70-15] gi|145010287|gb|EDJ94943.1| MGG_14270 [Magnaporthe grisea 70-15]
  misc_feature (72)..(324): NCBI GI: 154311682 Blast Desc: BC1G_06300 [Botryotinia fuckeliana B05.10] gi|150850811|gb|EDN26004.1| BC1G_06300 [Botryotinia fuckeliana B05.10]
  misc_feature (85)..(332): NCBI GI: 156061861 Blast Desc: SS1G_03076 [Sclerotinia sclerotiorum 1980] gi|154700477|gb|EDO00216.1| SS1G_03076 [Sclerotinia sclerotiorum 1980]
  misc_feature (1)..(322): NCBI GI: 121711297 Blast Desc: conserved [Aspergillus clavatus NRRL 1] gi|119401415|gb|EAW11838.1| conserved [Aspergillus clavatus NRRL 1]
  misc_feature (55)..(320): NCBI GI: 238844884 Blast Desc: conserved [Microsporum canis CBS 113480]
  misc_feature: Useful for introducing or modulating the production of volatile compounds
MRAHHVLVILAAGFASTTLAQGGDDTSSSSTESTESTESSSSASSSASLPNISDATKTSSTSSETSTSDLPGITSSTSTGTKPPLPTISTTTNKGTYSYPAPTVPPTNNAPYMQKSTMPQGTVFIAVGAILGAFAVAVLVWRAVVACMLTRSVKRANLAQHMANDKATFGAPSTPFYKYSDHQSTHSLGNAMAGRGVRRTQRGPTPSATPSQSNLFFSPTAPGGGNSANRESRFLPSGFYASSGVSPQQGHSQSISLTNLRPESQGYARALDPSPPDSPSLAPPHDIGRRNPSSSTLNLNRPTSGRAPSAYLEDLLADNPEQFPPTNTSPRRRG

SEQ ID NO: 14422 - DNA, 1756 bp, Muscodor strobelii
  misc_feature: SGI EST ID NO. CUFF.34300.0
  misc_feature: Variant of the nucleotide sequence at SEQ ID NO 14420
accaactcctcctttcctgccagcctagtcaacatcgacattcacgtcgttgccattccctctcaagcatgatactgtgacgcacgagagccctccacacgcgcaacaggtcatgcagtctttgacgttttattcctgctagtcctcgggttatcgtatctgctttgtttctttttcccgcgccagtctttcgttcgtaacatctcaaactctgaaccacggcgcctgtagctgcacgcccgaactatttgctaccgaattccatcttcgaccagtctattatatcgcgccgtctctcgacgggattcgcccaccatgcgagcccatcacgtcctggttatcctggccgctggtttcgcctcgacgactctagcgcaaggcggcgatgatacatcttcgagctcaaccgaatcgaccgagtcgaccgagtcttcctcctcggcctcgtcgtcggcatcgctccccaacataagcgatgccaccaagacttcatccacgtcgtccgaaacctcgacgtcggacctgccaggcatcacatcatccacaagcactggcactaaaccgccgttaccgactatatctacgaccaccaacaagggcacctacagctatcctgctcctaccgttccgccgaccaacaatgccccatatatgcagaaatcgaccatgccacagggcaccgtcttcattgctgtcggcgctatcctcggcgctttcgctgttgctgttctggtctggcgtgctgtcgtcgcctgcatgctcacccgttctgtcaagcgtgctaatctggctcagcacatggccaacgacaaagccaccttcggcgctccctccactcctttctacaagtacagcgatcatcaatctactcactcccttggcaacgcaatggccggtcgtggcgtccggagaacacagcgtggtcccacgccctctgcgaccccgagccagtccaatctcttcttctcccccacggctcctggaggcggcaattcggctaaccgcgaatcacgattcctcccatcgggcttctatgcttccagcggtgtctcgcctcaacagggccactctcagtccattagtttgaccaacctgaggccggagtctcagggttacgctcgcgcactcgacccaagccccccggactctcccagcttggcgccgcctcacgatatcgggcgcagaaatcctagttccagcacgctcaacctcaacaggccaacgagtggccgtgcccccagtgcctatctcgaggatttgctcgccgacaacccggaacagttccctcccaccaacacgtcgccgcgccgtcgaggttaaaaatgtcgtttattcatctttgctagggtttgatctcggctcgtagaacatcgagaactctgatagaccttaagaaacaagcgattcagcgaagaaacgaattagacaagcaagagaagcgggaggaagagtcgatagacagacctaaagcacatatacacgcagctactcgacattaagcggaagagcattggtatggagtggaaaagaactatggattgatccggtgtaaaaccccatgtaatggcatagtatttgggccggcgtttagacggagttggtctggtagggctttttcaggagcggttcccgtcatattagtatctagtactacgcccagttgttagattaaggcgtccttctttcaattaatagttacatctactatatttgcgcacgcatctcggataaggaccaacaccctatgacttgccgt

SEQ ID NO: 14423 - DNA, 573 bp, Muscodor strobelii
  misc_feature: SGI cDNA ID NO. 564752
  misc_feature: Encodes the peptide sequence at SEQ ID NO 14424
atgggtgtcgccaagaagaccagaaagtttggtgccgtcaaacgcatcatctcccgacgagacaatcgtctgaagcagaacgcgggcaaagccgatgagaagaaccccgagaagagcaagactgctggtccttcaaatgaggtcgtccgtgtggtacctcaggctccgagctctatgttcttccttcacaatgaggccctggttccaccctaccatgtccttgtagacaccaatttcctcagtcacacggtgcagcgcaaactgccgctgttggagagcatgatggatgcgctgatggctaaatgtataccgaccttgagaaacttggacccaaatacagacttgctctacgtgattgctcgcgatgagagatgggaacgcatcaagtgtgaccacaagggtacatatgctgatgactgtatcgtcgaccgctgtatgaaacacagaatctacatcgttgcaacaaacgataaagacctagttagacgagtgcgaaaaatacccggagtgcctatcatgaatgttgcgcgaggcaaatatgttattgagcgtctccccggagctcctcagtaa

SEQ ID NO: 14424 - protein, 190 aa, Muscodor strobelii
  misc_feature: SGI Peptide ID NO. 564752
  misc_feature (95)..(185): Pfam Id: PF04900 Pfam Desc: Fcf1
  misc_feature (1)..(190): NCBI GI: 156061859 Blast Desc: SS1G_03075 [Sclerotinia sclerotiorum 1980] gi|154700476|gb|EDO00215.1| SS1G_03075 [Sclerotinia sclerotiorum 1980]
  misc_feature (1)..(190): NCBI GI: 154311684 Blast Desc: BC1G_06301 [Botryotinia fuckeliana B05.10] gi|150850812|gb|EDN26005.1| BC1G_06301 [Botryotinia fuckeliana B05.10]
  misc_feature (1)..(190): NCBI GI: 238840319 Blast Desc: rRNA-processing protein FCF1 [Microsporum canis CBS 113480]
  misc_feature (1)..(190): NCBI GI: 119179519 Blast Desc: CIMG_08502 [Coccidioides immitis RS]
  misc_feature (1)..(190): NCBI GI: 258577745 Blast Desc: UREG_02570 [Uncinocarpus reesii 1704] gi|237903320|gb|EEP77721.1| UREG_02570 [Uncinocarpus reesii 1704]
  misc_feature (1)..(190): NCBI GI: 255938618 Blast Desc: Pc14g00850 [Penicillium chrysogenum Wisconsin 54-1255] gi|211584700|emb|CAP74226.1| Pc14g00850 [Penicillium chrysogenum Wisconsin 54-1255]
  misc_feature (1)..(190): NCBI GI: 261188145 Blast Desc: FCF1 small subunit [Ajellomyces dermatitidis SLH14081] gi|239593364|gb|EEQ75945.1| FCF1 small subunit [Ajellomyces dermatitidis SLH14081] gi|239609106|gb|EEQ86093.1| DUF652 protein
  misc_feature (1)..(190): NCBI GI: 225555114 Blast Desc: DUF652 domain-containing protein [Ajellomyces capsulatus G186AR]
  misc_feature (1)..(188): NCBI GI: 70989239 Blast Desc: DUF652 domain protein [Aspergillus fumigatus Af293] gi|66847100|gb|EAL87431.1| DUF652 domain protein [Aspergillus fumigatus Af293]
  misc_feature (1)..(190): NCBI GI: 240281323 Blast Desc: DUF652 domain-containing protein [Ajellomyces capsulatus H143]
MGVAKKTRKFGAVKRIISRRDNRLKQNAGKADEKNPEKSKTAGPSNEVVRVVPQAPSSMFFLHNEALVPPYHVLVDTNFLSHTVQRKLPLLESMMDALMAKCIPTLRNLDPNTDLLYVIARDERWERIKCDHKGTYADDCIVDRCMKHRIYIVATNDKDLVRRVRKIPGVPIMNVARGKYVIERLPGAPQ

SEQ ID NO: 14425 - DNA, 466 bp, Muscodor strobelii
  misc_feature: SGI EST ID NO. CUFF.34303.1
  misc_feature: Variant of the nucleotide sequence at SEQ ID NO 14423
ccgcatcccacctacatgtatactgccattaaaaccacaactaaacattcgaggcgcaaagacggagaacgtctagttggccaactgtcaaaatgggtgtcgccaagaagaccagaaagtttggtgccgtcaaacgcatcatctcccgacgagacaatcgtctgaagcagaacgcgggcaaagccgatgagaagaaccccgagaagagcaagactgctggtccttcaaatgaggtcgtccgtgtggtacctcaggctccgagctctatgttcttccttcacaatgaggccctggttccaccctaccatgtccttgtagacaccaatttcctcagtcacacggtgcagcgcaaactgccgctgttggagagcatgatggatgcgctgatggctaaatgtataccgactatctcaagttgtgtcatggcagaacttgagaaacttggacccaaatacagacttgctct

SEQ ID NO: 14426 - DNA, 465 bp, Muscodor strobelii
  misc_feature: SGI cDNA ID NO. 564753
  misc_feature: Encodes the peptide sequence at SEQ ID NO 14427
atgagatttttcgccttccttatcgccgcttcattgcagcttattgtcgctactccctccttctcgagccgtgatgggctttcatcctatgataccgtgtcgaccattacttggagcctacctatcgtcgaaggtggcgagaactacacctttaccgggacaatagaggcactaaatcaagagactcgacaggaggtcatcgaccaagtgaacaacgagcgcgccaaactcggcatagagcctattgacattccactcaacgaaacagagagtccggatcacagcgctcttcacgagcgctcgtatacgacctgcgactgcaacaaaggccgcaatggcccagccaccgatcagaggatcctggcaggaattaagtatctagaaggcttaaaaaccacctgtcgcaatggtcctgggccgggaaactgcgggcggatatcttgttcttggaactctgccatctag

SEQ ID NO: 14427 - protein, 154 aa, Muscodor strobelii
  misc_feature: SGI Peptide ID NO. 564753
  misc_feature (1)..(154): NCBI GI: 171680404 Blast Desc: protein product [Podospora anserina] gi|170939829|emb|CAP65054.1| protein product [Podospora anserina]
  misc_feature (106)..(154): NCBI GI: 171679719 Blast Desc: protein product [Podospora anserina] gi|170939485|emb|CAP64713.1| protein product [Podospora anserina]
  misc_feature (13)..(154): NCBI GI: 171693255 Blast Desc: protein product [Podospora anserina] gi|170946576|emb|CAP73377.1| protein product [Podospora anserina]
  misc_feature (22)..(154): NCBI GI: 121717032 Blast Desc: conserved [Aspergillus clavatus NRRL 1] gi|119404141|gb|EAW14558.1| conserved [Aspergillus clavatus NRRL 1]
  misc_feature (1)..(154): NCBI GI: 169785397 Blast Desc: [Aspergillus oryzae RIB40] gi|83775907|dbj|BAE66026.1| protein product [Aspergillus oryzae]
  misc_feature (1)..(154): NCBI GI: 238506391 Blast Desc: conserved [Aspergillus flavus NRRL3357] gi|220689110|gb|EED45461.1| conserved [Aspergillus flavus NRRL3357]
  misc_feature (1)..(154): NCBI GI: 85111034 Blast Desc: NCU09372 [Neurospora crassa OR74A] gi|28925468|gb|EAA34507.1| [Neurospora crassa OR74A]
  misc_feature (7)..(154): NCBI GI: 170940149 Blast Desc: protein product [Podospora anserina]
  misc_feature (6)..(154): NCBI GI: 46117564 Blast Desc: FG04624.1 [Gibberella zeae PH-1]
  misc_feature (106)..(154): NCBI GI: 171690458 Blast Desc: protein product [Podospora anserina] gi|170945177|emb|CAP71288.1| protein product [Podospora anserina]
MRFFAFLIAASLQLIVATPSFSSRDGLSSYDTVSTITWSLPIVEGGENYTFTGTIEALNQETRQEVIDQVNNERAKLGIEPIDIPLNETESPDHSALHERSYTTCDCNKGRNGPATDQRILAGIKYLEGLKTTCRNGPGPGNCGRISCSWNSAI

SEQ ID NO: 14428 - DNA, 2034 bp, Muscodor strobelii
  misc_feature: SGI cDNA ID NO. 564754
  misc_feature: Reduced expression when VOC is produced
  misc_feature: Encodes the peptide sequence at SEQ ID NO 14429
atggcttcgagccatggctctccaggtgttgcgggcggtgcatcctggtcaaggatgacgagccctgtggacacccccgaagacgactcgcagtcgcgctccaactcgcccgacaatgccaatgccagcatggtggagggtgatggctcaagtcgtgggaaacggaagtctagagtctccggtgccaacacggctgctccctcgggcgccttccagacggtcggcaagatccgccatctgaagaaggaagatggcgagcctctctggagacgcgacatccagtacgacttcctccgcgaggtcttcgacaacgatgacaagcacttcaccaacagctatgacctccagtccaacgacaaacagagctttgccgacctgtacatcgacaccatggccagaagtagcaagacgagtaaggttcttagagataagctgctcagtgatcgcgaagctgccaagggcatggccatggtctgcctgctggtcaacgtcggccgtatgaacacgaccctcaacttcttccccgagatgcgggctcaactacgaacataccacgccatcccatccctgcaagcacacgccgatgccacggcatacaagcagctgcaagatgcccctcgcctgaagtccatcctgaaaggcgcggcggaagacagagaccacgagccgcacgaccttacacaattcaaagacatgaaagctccgcgatccaaccctgtcaacctgatcttcctcatctgcgcccaggccaccaacatcgccgagttacacttccccaagggacacgaattccatgatctcatcatgaagacgaactacacgagcaagtcccgtgcacaggcattcctttggctcatgtggcagtacctcgagtcagattttacggaagagggctgtgaagagaatccctttggggctggtgtggactacgagctgggcctggctaaccagggcgtcccacgcatggaggagatgacaccagagcaggaggcattggagaacatcgatacacctgaggagattgagttcggtaaccagcgccaagaacaccgggccaagttgatcgccgccgaccagtacttggtggatcatcagtccaaacgtgggcctcgcgccaagctcctcgaggacagcccctcggcggccatactgccgcgcattcgaccctcaaagcacgagtcggacatggatagtacccggtccactccaccaccgagggccctttcccgcctgggagctatcagcactggccgtcgcggcggcgcttccctcaagtaccagattctggagtcgtcgccggcgccaggagcacatggtatcgaaggcattgtcccgcgcaagcctcggccccctactgcacatcagctagctgtagagcgaagccggaaccagcgtgtcacacacattcttgatcgtggtctacgacgttctcatcatgagtcccgaaaagtgcgccgtcgagagggcatcttgagtcgtactaggcgccggctggatgctatgacggatggagaagcattcgctgacagtgacgaggaggatatgaaggcttatgctaataacaataagtcacagttccgtgaccatggcctgggtggtctatgtcaacttagagacgaggacgataactttggcgaggagcctacgcctttgctgccgggctcagaagggccaatcgtcgacttgagagatggcacacacaaggatagctttgcagagatgcccgtcgatatggacagcttcgatggaagtccagataaactggcagctacacgttccctcaagaacagacagcctcgcatcaacggtgatgctcatgtctctaatggcgacgtgacaatggaggatgctgacgctcttgacgacgtggataaggaactcctcggcctcgagagcgatggcgaggacggtgaaggcgagggcgagggcgaagcagagcttgagcctgaggacaaagacgacgacgacgcgcttgacggcatagataagactctgcttggtcttgacgatgacgaagacacggagaactcgtaa

SEQ ID NO: 14429 - protein, 677 aa, Muscodor strobelii
  misc_feature: SGI Peptide ID NO. 564754
  misc_feature (52)..(675): NCBI GI: 171693495 Blast Desc: protein product [Podospora anserina] gi|170946696|emb|CAP73499.1| protein product [Podospora anserina]
  misc_feature (28)..(547): NCBI GI: 46125877 Blast Desc: FG07316.1 [Gibberella zeae PH-1]
  misc_feature (25)..(547): NCBI GI: 256731361 Blast Desc: [Nectria haematococca mpVI 77-13-4]
  misc_feature (20)..(547): NCBI GI: 85099083 Blast Desc: NCU01362 [Neurospora crassa OR74A] gi|7635839|emb|CAB88643.1| conserved [Neurospora crassa] gi|28922232|gb|EAA31478.1| conserved [Neurospora crassa OR74A]
  misc_feature (27)..(547): NCBI GI: 116206344 Blast Desc: CHGG_02465 [Chaetomium globosum CBS 148.51] gi|88183062|gb|EAQ90530.1| CHGG_02465 [Chaetomium globosum CBS 148.51]
  misc_feature (73)..(668): NCBI GI: 261355612 Blast Desc: INO80 chromatin remodeling complex Ies1 [Verticillium albo-atrum VaMs.102]
  misc_feature (17)..(672): NCBI GI: 154321129 Blast Desc: BC1G_01439 [Botryotinia fuckeliana B05.10] gi|150851977|gb|EDN27169.1| BC1G_01439 [Botryotinia fuckeliana B05.10]
  misc_feature (24)..(537): NCBI GI: 156054452 Blast Desc: SS1G_06074 [Sclerotinia sclerotiorum 1980] gi|154703854|gb|EDO03593.1| SS1G_06074 [Sclerotinia sclerotiorum 1980]
  misc_feature (28)..(547): NCBI GI: 145612960 Blast Desc: MGG_08312 [Magnaporthe grisea 70-15] gi|145020043|gb|EDK04271.1| MGG_08312 [Magnaporthe grisea 70-15]
  misc_feature (21)..(513): NCBI GI: 169602156 Blast Desc: SNOG_03957 [Phaeosphaeria nodorum SN15] gi|160706093|gb|EAT89162.2| SNOG_03957 [Phaeosphaeria nodorum SN15]
  misc_feature: Useful for introducing or modulating the production of volatile compounds
MASSHGSPGVAGGASWSRMTSPVDTPEDDSQSRSNSPDNANASMVEGDGSSRGKRKSRVSGANTAAPSGAFQTVGKIRHLKKEDGEPLWRRDIQYDFLREVFDNDDKHFTNSYDLQSNDKQSFADLYIDTMARSSKTSKVLRDKLLSDREAAKGMAMVCLLVNVGRMNTTLNFFPEMRAQLRTYHAIPSLQAHADATAYKQLQDAPRLKSILKGAAEDRDHEPHDLTQFKDMKAPRSNPVNLIFLICAQATNIAELHFPKGHEFHDLIMKTNYTSKSRAQAFLWLMWQYLESDFTEEGCEENPFGAGVDYELGLANQGVPRMEEMTPEQEALENIDTPEEIEFGNQRQEHRAKLIAADQYLVDHQSKRGPRAKLLEDSPSAAILPRIRPSKHESDMDSTRSTPPPRALSRLGAISTGRRGGASLKYQILESSPAPGAHGIEGIVPRKPRPPTAHQLAVERSRNQRVTHILDRGLRRSHHESRKVRRREGILSRTRRRLDAMTDGEAFADSDEEDMKAYANNNKSQFRDHGLGGLCQLRDEDDNFGEEPTPLLPGSEGPIVDLRDGTHKDSFAEMPVDMDSFDGSPDKLAATRSLKNRQPRINGDAHVSNGDVTMEDADALDDVDKELLGLESDGEDGEGEGEGEAELEPEDKDDDDALDGIDKTLLGLDDDEDTENS

SEQ ID NO: 14430 - DNA, 3245 bp, Muscodor strobelii
  misc_feature: SGI EST ID NO. CUFF.34340.0
  misc_feature: Variant of the nucleotide sequence at SEQ ID NO 14428
ctgtgaaggcggactgggccaaaagtttaacacgctcacgcctctaagcaggcggcacacgcctgggccaaagggtcgacgggcgacgcatcctgaacacgacagctcgtcccaacaagctcgcgaagagtgcacccttcccatccccttcacaatgcaccagcctgacctgatgactcgccccacgcccactttcgagtttgttccatcctgcaaacgcagaaagctaccatcgtcggtgctcagcctgtgacaatagcttcttccgtcatttaccttaatcgtccaaggcctcgtcccgtcccaatgacctgactacaccctatctccgtcattgaatgttataataatacctcgcccacactctctttgcgcgtgactctctatgcatcaccattctcaccttcaccttcacaaatccctcccgctccgccgcgcgttatcgtcaccactgccacccaccaacagctagccacaagcttgctgttgctgctgccgccggggccgtcattgctgcgcgctatccgacggcagaatactcacctgcccacttcattcacgcaccatcagcgtcgcgcaaggcagactttgtcgcccacatcctctactacctctactccctgccgccgacacaaacacactgtccctcattttgattgacccaagctcaacaccatcatggcttcgagccatggctctccaggtgttgcgggcggtgcatcctggtcaaggatgacgagccctgtggacacccccgaagacgactcgcagtcgcgctccaactcgcccgacaatgccaatgccagcatggtggagggtgatggctcaagtcgtgggaaacggaagtctagagtctccggtgccaacacggctgctccctcgggcgccttccagacggtcggcaagatccgccatctgaagaaggaagatggcgagcctctctggagacgcgacatccagtacgacttcctccgcgaggtcttcgacaacgatgacaagcacttcaccaacagctatgacctccagtccaacgacaaacagagctttgccgacctgtacatcgacaccatggccagaagtagcaagacgagtaaggttcttagagataagctgctcagtgatcgcgaagctgccaagggcatggccatggtctgcctgctggtcaacgtcggccgtatgaacacgaccctcaacttcttccccgagatgcgggctcaactacgaacataccacgccatcccatccctgcaagcacacgccgatgccacggcatacaagcagctgcaagatgcccctcgcctgaagtccatcctgaaaggcgcggcggaagacagagaccacgagccgcacgaccttacacaattcaaagacatgaaagctccgcgatccaaccctgtcaacctgatcttcctcatctgcgcccaggccaccaacatcgccgagttacacttccccaagggacacgaattccatgatctcatcatgaagacgaactacacgagcaagtcccgtgcacaggcattcctttggctcatgtggcagtacctcgagtcagattttacggaagagggctgtgaagagaatccctttggggctggtgtggactacgagctgggcctggctaaccagggcgtcccacgcatggaggagatgacaccagagcaggaggcattggagaacatcgatacacctgaggagattgagttcggtaaccagcgccaagaacaccgggccaagttgatcgccgccgaccagtacttggtggatcatcagtccaaacgtgggcctcgcgccaagctcctcgaggacagcccctcggcggccatactgccgcgcattcgaccctcaaagcacgagtcggacatggatagtacccggtccactccaccaccgagggccctttcccgcctgggagctatcagcactggccgtcgcggcggcgcttccctcaagtaccagattctggagtcgtcgccggcgccaggagcacatggtatcgaaggcattgtcccgcgcaagcctcggccccctactgcacatcagctagctgtagagcgaagccggaaccagcgtgtcacacacattcttgatcgtggtctacgacgttctcatcatgagtcccgaaaagtgcgccgtcgagagggcatcttgagtcgtactaggcgccggctggatgctatgacggatggagaagcattcgctgacagtgacgaggaggatatgaaggcttatgctaataacaataagtcacagttccgtgaccatggcctgggtggtctatgtcaacttagagacgaggacgataactttggcgaggagcctacgcctttgctgccgggctcagaagggccaatcgtcgacttgagagatggcacacacagtcggcccagggcgttgttgcaccattcaagcgtcgatcgaccgtgaaaattgcagaggatagctttgcagagatgcccgtcgatatggacagcttcgatggaagtccagataaactggcagctacacgttccctcaagaacagacagcctcgcatcaacggtgatgctcatgtctctaatggcgacgtgacaatggaggatgctgacgctcttgacgacgtggataaggaactcctcggcctcgagagcgatggcgaggacggtgaaggcgagggcgagggcgaagcagagcttgagcctgaggacaaagacgacgacgacgcgcttgacggcatagataagactctgcttggtcttgacgatgacgaagacacggagaactcgtaatggacgtggccctatatacctactacgcacgagacccgaccatccctttcgtcatcacggccgcatcatgcatctgtcatcttgcagacctcccatttccttttctgtttctcggtttctctcttctggcatggcgttacagaaaaacggtcttcaaagacgagcggacgagcagtgtgtcaatgagcacaatgaactcgtctaccgggccgtatgcaagggctgaattcttttgttgtatgagtaattaaaaaaagataagggcaataggcgatacactactaagatgcgcgatgcccttcccggccagaaggcacaagatattgtgtaggattgcacgtgtttagatatggattgggcctcctgggtttgtacactgttagaggctttatacacaggctttctacgactgcattgctacgttgctgcgtaggtagttaggcgtttacagagaataggagcgtcgctttggtgaat

SEQ ID NO: 14431 - DNA, 2046 bp, Muscodor strobelii
  misc_feature: SGI cDNA ID NO. 564755
  misc_feature: Reduced expression when VOC is produced
  misc_feature: Encodes the peptide sequence at SEQ ID NO 14432
atggcggaccaactgaacatgaacggcctcaacctcaacgacggccaggcgcctcctggaggtcgctcctacgtcccgcctcacatgcgaggcaagatgggcccgggtgctaatggccccatgcccggcggtcctgctcccgctcccgctcccgctatgaatggtctgaaccagagtgcttgggctggtaacaacagctacgacgcccgtcccggcggtggctggggtccccctcctggaggcgctcccgacttcgtccctcctcctcaacaacctccccagcagcgccagtggaacaacggcggcggccgcaacttcgatcgcaacgcgtacggtaaccctggtaccggtggtggcggcggcggcgctggcggccatgctagaggctctggtgacggccagtggcgcgacggcaagcacatccctggacctccgaatcctcgtctcgagcgcgagctcttcggaactcctgatgacccatccaagcagcacacgggtatcaactttgagaagtacgatgacatccccgtcgaggcttctggccacgacgtccctgaacctgtcctcacattctccaaccctcctctggaagagcacctgatccgcaacatcgagatggcccgatacaaggtccccacgcctgtccagaaatactcgattcccattgtcatgggcggccgtgatttgatggcttgtgcccagactggttccggcaagacgggtggtttcttgttccctatcctctcgcaggccttcatcaatggcccatccgctatccccgccaacacttcgggcggtggctacggccgccagcgcaaggcttaccctacctccttgatcctcgcccccacccgtgagcttgtctctcagatctacgacgagtctcgcaagtttgcctaccgctcttgggtccgaccttgcgtcgtctacggtggtgctgacattggttctcagctccgccaaattgagcgtggctgcgatctgttggtcgctacccctggtcgtcttgtggatctcatagagcgaggccgcatttctctccagaacatcaagtaccttgttctcgatgaggctgatcgtatgcttgacatgggtttcgaaccccagattcgccgcattgtagagggcgaggacatgcctactgtccagaaccgccaaaccctcatgttttcggctaccttcccccgcgacatccagatgctcgcccgcgacttcttgaaggactacgtcttcctgtcggtcggtcgtgttggttccacttccgagaacatcacccagaaggtcgagtacgtcgaggatgtcgacaagcgttccgtcctgctagacattctgcacacccacggtgctggcttgactctcattttcgtcgagaccaagcgcatggccgactcgttgtctgatttcctcatcaaccagaacttccccgctacctcgattcacggtgaccgcacccagcgtgagcgtgagcgagccctggagatgttccgtaacggacgctgccccattcttgtggctaccgcggtcgcggcccgtggtttggatattcccaacgtcactcacgttgtcaactacgacttgcccaccgatattgatgactacgttcaccgaattggtcgtaccggccgtgctggtaacactggtcactctaccgccttcttcaaccgtggcaaccgcggtgttgttcgcgatcttctcgagcttctgaaagaggctaatcaggaagtcccggcgttcttggagactatcgccagggagagctccttcggtggccgtggtggtggccgcactggcggaggtcgtggccgaggccaaggtgccaaccgtgatttccgtaagtacggtggcggcggtggtggctttggcggcggcggtggtggtttcggtggaccccctcctccttctggaggtttcaacggaggcggctacggcggtccccccaacggtggctactccggcggtggcggctatggaggtggtgctcccagctacggaggtggcagctatggtaaccctagcggcccaggtggccaggcatcctggtggtag

SEQ ID NO: 14432 - protein, 681 aa, Muscodor strobelii
  misc_feature: SGI Peptide ID NO. 564755
  misc_feature (213)..(401): Pfam Id: PF00270 Pfam Desc: DEAD/DEAH box helicase
  misc_feature (468)..(544): Pfam Id: PF00271 Pfam Desc: Helicase conserved C-terminal domain
  misc_feature (1)..(612): NCBI GI: 171693513 Blast Desc: protein product [Podospora anserina] gi|170946705|emb|CAP73508.1| protein product [Podospora anserina]
  misc_feature (1)..(588): NCBI GI: 74625309 Blast Desc: DED1_NEUCR RecName: Full=ATP-dependent RNA helicase ded-1 gi|7635831|emb|CAB88635.1| ATP-dependent RNA helicase DED1 [Neurospora crassa]
  misc_feature (1)..(612): NCBI GI: 256731389 Blast Desc: NECHADRAFT_71876 [Nectria haematococca mpVI 77-13-4]
  misc_feature (1)..(612): NCBI GI: 154299943 Blast Desc: BC1G_10862 [Botryotinia fuckeliana B05.10] gi|160380638|sp|A6SEH9.1|DED1_BOTFB RecName: Full=ATP-dependent RNA helicase ded1 gi|150857142|gb|EDN32334.1| BC1G_10862 B05.10]
  misc_feature (1)..(681): NCBI GI: 46124853 Blast Desc: FG06804.1 [Gibberella zeae PH-1] gi|91206556|sp|Q4I7K4.1|DED1_GIBZE RecName: Full=ATP-dependent RNA helicase DED1
  misc_feature (1)..(681): NCBI GI: 258566652 Blast Desc: ATP-dependent RNA helicase ded1 [Uncinocarpus reesii 1704] gi|237905516|gb|EEP79917.1| ATP-dependent RNA helicase ded1 [Uncinocarpus reesii 1704]
  misc_feature (1)..(681): NCBI GI: 240107118 Blast Desc: ATP-dependent RNA helicase, [Coccidioides posadasii C735 delta SOWgp]
  misc_feature (1)..(582): NCBI GI: 156053564 Blast Desc: ATP-dependent RNA helicase DED1 [Sclerotinia sclerotiorum 1980] gi|160380639|sp|A7EJY3.1|DED1_SCLS1 RecName: Full=ATP-dependent RNA helicase ded1 gi|154703410|gb|EDO03149.1|
  misc_feature (7)..(681): NCBI GI: 119175420 Blast Desc: CIMG_09563 [Coccidioides immitis RS] gi|118582048|sp|Q1DJF0.1|DED1_COCIM RecName: Full=ATP-dependent RNA helicase DED1
  misc_feature (1)..(583): NCBI GI: 121706879 Blast Desc: ATP dependent RNA helicase (Dbp1), [Aspergillus clavatus NRRL 1] gi|134034088|sp|A1CH78.1|DED1_ASPCL RecName: Full=ATP-dependent RNA helicase ded1 gi|119399807|gb|EAW10233.1|
  misc_feature: Useful for introducing or modulating the production of volatile compounds
MADQLNMNGLNLNDGQAPPGGRSYVPPHMRGKMGPGANGPMPGGPAPAPAPAMNGLNQSAWAGNNSYDARPGGGWGPPPGGAPDFVPPPQQPPQQRQWNNGGGRNFDRNAYGNPGTGGGGGGAGGHARGSGDGQWRDGKHIPGPPNPRLERELFGTPDDPSKQHTGINFEKYDDIPVEASGHDVPEPVLTFSNPPLEEHLIRNIEMARYKVPTPVQKYSIPIVMGGRDLMACAQTGSGKTGGFLFPILSQAFINGPSAIPANTSGGGYGRQRKAYPTSLILAPTRELVSQIYDESRKFAYRSWVRPCVVYGGADIGSQLRQIERGCDLLVATPGRLVDLIERGRISLQNIKYLVLDEADRMLDMGFEPQIRRIVEGEDMPTVQNRQTLMFSATFPRDIQMLARDFLKDYVFLSVGRVGSTSENITQKVEYVEDVDKRSVLLDILHTHGAGLTLIFVETKRMADSLSDFLINQNFPATSIHGDRTQRERERALEMFRNGRCPILVATAVAARGLDIPNVTHVVNYDLPTDIDDYVHRIGRTGRAGNTGHSTAFFNRGNRGVVRDLLELLKEANQEVPAFLETIARESSFGGRGGGRTGGGRGRGQGANRDFRKYGGGGGGFGGGGGGFGGPPPPSGGFNGGGYGGPPNGGYSGGGGYGGGAPSYGGGSYGNPSGPGGQASWW

SEQ ID NO: 14433 - DNA, 3462 bp, Muscodor strobelii
  misc_feature: SGI EST ID NO. CUFF.34349.0
  misc_feature: Variant of the nucleotide sequence at SEQ ID NO 14431
atcatctacgacctttttcttccctcccttctgcctcctcctccttcataaaacaccacaacctcccatcttttcccccctccccctaccatcatcagttcggggtccttgtgtgtacacggagcaagtagtacatacgccttaattctttccgtttgtatttttcgttccctactgccttgtttttttgtctcagcaagaggacttttcgttcttttccaggagacaatcggctgggctccgcgacgaaaaattttacgcgaccacaatcacaatcactcgtcactccacggcaagcagctttgccccgcgtgaccaggcattctacatccctcattccccttcgttcaactacgacagtcacttcagtcacctcctccctgatcttgcaacatggcggaccaactgaacatgaacggcctcaacctcaacgacggccaggcgcctcctggaggtcgctcctacgtcccgcctcacatgcgaggcaagatgggcccgggtgctaatggccccatgcccggcggtcctgctcccgctcccgctcccgctatgaatggtctgaaccagagtgcttgggctggtaacaacagctacgacgcccgtcccggcggtggctggggtccccctcctggaggcgctcccgacttcgtccctcctcctcaacaacctccccagcagcgccagtggaacaacggcggcggccgcaacttcgatcgcaacgcgtacggtaaccctggtaccggtggtggcggcggcggcgctggcggccatgctagaggctctggtgacggccagtggcgcgacggcaagcacatccctggacctccgaatcctcgtctcgagcgcgagctcttcggaactcctgatgacccatccaagcagcacacgggtatcaactttgagaagtacgatgacatccccgtcgaggcttctggccacgacgtccctgaacctgtcctcacattctccaaccctcctctggaagagcacctgatccgcaacatcgagatggcccgatacaaggtccccacgcctgtccagaaatactcgattcccattgtcatgggcggccgtgatttgatggcttgtgcccagactggttccggcaagacgggtggtttcttgttccctatcctctcgcaggccttcatcaatggcccatccgctatccccgccaacacttcgggcggtggctacggccgccagcgcaaggcttaccctacctccttgatcctcgcccccacccgtgagcttgtctctcagatctacgacgagtctcgcaagtttgcctaccgctcttgggtccgaccttgcgtcgtctacggtggtgctgacattggttctcagctccgccaaattgagcgtggctgcgatctgttggtcgctacccctggtcgtcttgtggatctcatagagcgaggccgcatttctctccagaacatcaagtaccttgttctcgatgaggctgatcgtatgcttgacatgggtttcgaaccccagattcgccgcattgtagagggcgaggacatgcctactgtccagaaccgccaaaccctcatgttttcggctaccttcccccgcgacatccagatgctcgcccgcgacttcttgaaggactacgtcttcctgtcggtcggtcgtgttggttccacttccgagaacatcacccagaaggtcgagtacgtcgaggatgtcgacaagcgttccgtcctgctagacattctgcacacccacggtgctggcttgactctcattttcgtcgagaccaagcgcatggccgactcgttgtctgatttcctcatcaaccagaacttccccgctacctcgattcacggtgaccgcacccagcgtgagcgtgagcgagccctggagatgttccgtaacggacgctgccccattcttgtggctaccgcggtcgcggcccgtggtttggatattcccaacgtcactcacgttgtcaactacgacttgcccaccgatattgatgactacgttcaccgaattggtcgtaccggccgtgctggtaacactggtcactctaccgccttcttcaaccgtggcaaccgcggtgttgttcgcgatcttctcgagcttctgaaagaggctaatcaggaagtcccggcgttcttggagactatcgccagggagagctccttcggtggccgtggtggtggccgcactggcggaggtcgtggccgaggccaaggtgccaaccgtgatttccgtaagtacggtggcggcggtggtggctttggcggcggcggtggtggtttcggtggaccccctcctccttctggaggtttcaacggaggcggctacggcggtccccccaacggtggctactccggcggtggcggctatggaggtggtgctcccagctacggaggtggcagctatggtaaccctagcggcccaggtggccaggcatcctggtggtagatgcaacctcatcacattcccgaatcaatgcatctatgggtcctagaagatatggcaggacttctcatggatgatacgggtgcgctgagagtgcatcacagaactttcttacgtctactgctttcatacacttgatgcttttggcctgaaggttcagccttctggcccttttcttttacggcatatgcgatttccggccacgaatcaggatcggcaggttcgagttcttccgacagaggactccagcatacgatagacgacatttgtctttgttcaggctgcacgttcgccccccacgacttgatacccatagacgactacggggcttgcatctgcgcagccacatgagacattccgaggttaaaaaaagacagaaccttggtccattggtctcgggacacatacatctatttagaacctcgttggtccttctcacgcacaaaaaagccgatgtttcttacgacgatgacgacgatctccgtttcgatgtttctacttttcatcgtttcatcggagacgaagaggtctctatccgcatcttcatagaatggcgacatacacattcccgcaacggccgtgaatttgtattgccagcatctgtttcatagacaaaaagtggaactctccgtgcatttcggttcggcaccactcttgcgcatgattttgagagagaggagcctaatcggcaggcatgcccaaggcgggctacggcatagaatggtaatttcgggttgttcacgagaacacaaaaaattcggcgtcttggggatcaggtaccgcatacacaagaaatgtctttgaacgagatggacacagacacagagcaatgtgcgggatctgctctcatgagactgtggcatatggacgagatgaatacccatctgcctgctagatagccagctttgcagatatcagctgaggaccttgctgtgggttcttcgcgtcgtggatccagataaatggtccatctgcgaggaactccctgttcctaaacaaaaaaagtttctagttcttctatccggc

SEQ ID NO: 14434 - DNA, 549 bp, Muscodor strobelii
  misc_feature: SGI cDNA ID NO. 564756
  misc_feature: Encodes the peptide sequence at SEQ ID NO 14435
atgcgtggagccaccatcctcaagaccaccgacgacaagaccaaacagctcaacaagcacaccttggtagctttctcgggagaggctggagacacgatccaattctccgagtatatccaagccaatgctcagctctactcgatgcgcaatgaggccgacctctccccaaccgcccttgcacactacgtccgcggcgagctcgccacctccttacggtcacgaaagccatacaacgtgaacctcctcctcggcggcgtcgaccccatcacccacaagcccagcctcttctggctcgactacctagccgctctcgcacccgtcccctacgccgcccacggctacgcacagtactactgcctctccatcctagacaagcaccaccacccggacatgaacttgcatcagggtattaaggtgctgcagatgtgcgttgatgagctgaagagacggttacctatcgacttcaagggcatgctggtcaaggctgtgaccaaggatggagttcgggatgtcgagatcgacaatgataagattgtcaaggctgcttag

SEQ ID NO: 14435 - protein, 182 aa, Muscodor strobelii
  misc_feature: SGI Peptide ID NO. 564756
  misc_feature (1)..(163): Pfam Id: PF00227 Pfam Desc: Proteasome A-type and B-type
  misc_feature (2)..(163): Pfam Id: PF00227 Pfam Desc: Proteasome A-type and B-type
  misc_feature (1)..(182): NCBI GI: 171693511 Blast Desc: protein product [Podospora anserina] gi|170946704|emb|CAP73507.1| protein product [Podospora anserina]
  misc_feature (1)..(182): NCBI GI: 261355615 Blast Desc: proteasome component C11 [Verticillium albo-atrum VaMs.102]
  misc_feature (1)..(182): NCBI GI: 17380220 Blast Desc: PSB2_NEUCR RecName: Full= proteasome subunit beta type-2 gi|7635833|emb|CAB88637.1| multicatalytic endopeptidase complex chain PRE1 [Neurospora crassa]
  misc_feature (1)..(182): NCBI GI: 164426284 Blast Desc: proteasome component C11 [Neurospora crassa OR74A] gi|157071273|gb|EAA31484.2| proteasome component C11 [Neurospora crassa OR74A]
  misc_feature (1)..(182): NCBI GI: 256731390 Blast Desc: [Nectria haematococca mpVI 77-13-4]
  misc_feature (1)..(182): NCBI GI: 46124851 Blast Desc: FG06803.1 [Gibberella zeae PH-1]
  misc_feature (1)..(177): NCBI GI: 240281182 Blast Desc: proteasome component [Ajellomyces capsulatus H143]
  misc_feature (1)..(177): NCBI GI: 154279090 Blast Desc: proteasome component Pre1 [Ajellomyces capsulatus NAm1] gi|150412301|gb|EDN07688.1| proteasome component Pre1 [Ajellomyces capsulatus NAm1]
  misc_feature (1)..(182): NCBI GI: 225680870 Blast Desc: proteasome component Pre1 [Paracoccidioides brasiliensis Pb03]
  misc_feature (1)..(175): NCBI GI: 156053566 Blast Desc: SS1G_05630 [Sclerotinia sclerotiorum 1980] gi|154703411|gb|EDO03150.1| SS1G_05630 [Sclerotinia sclerotiorum 1980]
  misc_feature (1)..(182): SWISSPROT Homolog: EC 3.4.25.1 Proteasome endopeptidase complex
MRGATILKTTDDKTKQLNKHTLVAFSGEAGDTIQFSEYIQANAQLYSMRNEADLSPTALAHYVRGELATSLRSRKPYNVNLLLGGVDPITHKPSLFWLDYLAALAPVPYAAHGYAQYYCLSILDKHHHPDMNLHQGIKVLQMCVDELKRRLPIDFKGMLVKAVTKDGVRDVEIDNDKIVKAA

SEQ ID NO: 14436 - DNA, 985 bp, Muscodor strobelii
  misc_feature: SGI EST ID NO. CUFF.34346.0
  misc_feature: Variant of the nucleotide sequence at SEQ ID NO 14434
tctacatcgaccatcacatccaggtgcacagtaactaacgtcgacggtttggagcacatcacgagcttcacccaaaataaacctctagttgcacgccgtgagattgctccggaaatacttgtttgttctaacccagtgttttctgatcttacgataaatactcgcccattcgattcgcccactacggccttcgactcccatccacctgcatcaagatggaggtactcttgggcatcacgggcaaggacttcaccttgattgcagcctctaaagctgctatgcgtggagccaccatcctcaagaccaccgacgacaagaccaaacagctcaacaagcacaccttggtagctttctcgggagaggctggagacacgatccaattctccgagtatatccaagccaatgctcagctctactcgatgcgcaatgaggccgacctctccccaaccgcccttgcacactacgtccgcggcgagctcgccacctccttacggtcacgaaagccatacaacgtgaacctcctcctcggcggcgtcgaccccatcacccacaagcccagcctcttctggctcgactacctagccgctctcgcacccgtcccctacgccgcccacggctacgcacagtactactgcctctccatcctagacaagcaccaccacccggacatgaacttgcatcagggtattaaggtgctgcagatgtgcgttgatgagctgaagagacggttacctatcgacttcaagggcatgctggtcaaggctgtgaccaaggatggagttcgggatgtcgagatcgacaatgataagattgtcaaggctgcttagagatgacgtgacgggatatgcttgacgcctcatgtgtatactaactaatgacctggggaagtaaatcgcccagatatcgctaggaatgagagcatcaagcgttcggaatgactatcatgtgcattgtccgtgtatgcctaggtgacattgatatggac

SEQ ID NO: 14437 - DNA, 1818 bp, Muscodor strobelii
  misc_feature: SGI cDNA ID NO. 564757
  misc_feature: Encodes the peptide sequence at SEQ ID NO 14438
atgtcatcattcttcagtgcaccaggagctcaaaagaagcggaagcggactactaacgatggcccctccacctcgaaacgccctgctaagtcgatcctgaagcgtcccggtaggccccagccccccaaaagagccgagagagaagacaggggcgacgagtcaatatccagcggttccgaagacggccaagatgacgaaagcttcgagggtttcggctctggctcagagtccgagcaagacgagaccgccgcgcagaagaggctgaggctagccgaggaatatcttgccagagtccgtgacgatgtcgacaaagaggccgatgcccatggatttgatgctgaggaaatagataaagacatgattgctgctcgtttggaggaagatctgggcgaaaccaaaggcaaagtcttcagaagaatcgcttccgacctcgactacgaatccacggcacacacctgggtcaaacacaatactgccaccactacctcagtcgcactctgcgacgattacctctacactgtctccaaagacggtgcactcatccagtggaagctccaacctctccccgaaaaccagtatccccagacgactcggaaaaagccaaagcgacaagccccgcccaggaagagaccccaaagattagccataataaaggggaatcacaagaaggcaaaggacaagacatataaaggccatgttggtgagatcctctgcgtggccgcaagtcaggacggaaatttcttggcaacaggaggctcggacagcaggctctgtatctggagcgtgcaggccaaaggtttgaagctcttgaagacgttcttccaacatcgggacggcatcactgggctcgttttcagaagaggaacgaatacgttatacacttgctcccgggatcggacggtgaaagtcttcaacctggatgctctcgcatacgtcgagacgctatttggccatggtgaccacgttgtggatatagacgctttgggccaagagcgttgtatttcggtcggatcacgagaccgaactgttcgattatggaaggtattagatgaatcccagctcgtcttcagagccacgcctgggatagacaagaagaaagacagagacccagctatcaaacctggctccgtggcggaaacaggtagtcttgactgctgcgcatatatagatgaccagcactgggtcactgggtctgataatggtgctctatcgctgtggagcatacaaaagaaaaagccactcttcatattacctcgagcccatggtatagaggatcctttaccattaacggagacatcgtcagaggagaatccggatccaagagttgtcccggatccgcaaccaaggtggataacgagtctcacctcgcttccatactccaacctcattctctctggaagcacagacggctgtatccgcgcttggcggtttaatgaggcagacaaaacgctttcgcctgctggtgtgttaggtcaacctacgtcggaatcgaaagctgaaatgaatggtgtctctggcgatgccatggacacaactgaagacgatgaaaaccataccaacgaagaaccgcagcagtctagaattaggggcttaataaactctatcgccgtgatccagagagggaagaccgactccttaaccatagtcgctggtgtaggagttgaacacagattaggaggctggacgaagatgaaaggtgccagaaacggagccatgatcttcgaggtgcgctcaaagactgtgaaaaacggcattgggaaaacagtaaaaggagaagtggggatgcaaaatggtgtgttgaaagaagaggtcatttag

SEQ ID NO: 14438 - protein, 605 aa, Muscodor strobelii
  misc_feature: SGI Peptide ID NO. 564757
  misc_feature (223)..(261): Pfam Id: PF00400 Pfam Desc: WD domain, G-beta repeat
  misc_feature (267)..(305): Pfam Id: PF00400 Pfam Desc: WD domain, G-beta repeat
  misc_feature (309)..(347): Pfam Id: PF00400 Pfam Desc: WD domain, G-beta repeat
  misc_feature (450)..(476): Pfam Id: PF00400 Pfam Desc: WD domain, G-beta repeat
  misc_feature (1)..(588): NCBI GI: 39971429 Blast Desc: MGG_07030 [Magnaporthe grisea 70-15] gi|145019491|gb|EDK03719.1| MGG_07030 [Magnaporthe grisea 70-15]
  misc_feature (1)..(601): NCBI GI: 171693507 Blast Desc: protein product [Podospora anserina] gi|170946702|emb|CAP73505.1| protein product [Podospora anserina]
  misc_feature (1)..(584): NCBI GI: 46124849 Blast Desc: FG06802.1 [Gibberella zeae PH-1]
  misc_feature (1)..(576): NCBI GI: 85099103 Blast Desc: NCU01367 [Neurospora crassa OR74A] gi|7635834|emb|CAB88638.1| related to a component of the yeast U3 snoRNP Rrp9p [Neurospora crassa] gi|28922237|gb|EAA31483.1|
  misc_feature (1)..(585): NCBI GI: 154299947 Blast Desc: BC1G_10864 [Botryotinia fuckeliana B05.10] gi|150857144|gb|EDN32336.1| BC1G_10864 [Botryotinia fuckeliana B05.10]
  misc_feature (1)..(576): NCBI GI: 256731001 Blast Desc: [Nectria haematococca mpVI 77-13-4]
  misc_feature (1)..(585): NCBI GI: 156053568 Blast Desc: SS1G_05631 [Sclerotinia sclerotiorum 1980] gi|154703412|gb|EDO03151.1| SS1G_05631 [Sclerotinia sclerotiorum 1980]
  misc_feature (1)..(591): NCBI GI: 116206330 Blast Desc: CHGG_02458 [Chaetomium globosum CBS 148.51] gi|88183055|gb|EAQ90523.1| CHGG_02458 [Chaetomium globosum CBS 148.51]
  misc_feature (1)..(488): NCBI GI: 261355616 Blast Desc: ribosomal RNA-processing protein [Verticillium albo-atrum VaMs.102]
  misc_feature (1)..(576): NCBI GI: 226292571 Blast Desc: conserved [Paracoccidioides brasiliensis Pb18]
MSSFFSAPGAQKKRKRTTNDGPSTSKRPAKSILKRPGRPQPPKRAEREDRGDESISSGSEDGQDDESFEGFGSGSESEQDETAAQKRLRLAEEYLARVRDDVDKEADAHGFDAEEIDKDMIAARLEEDLGETKGKVFRRIASDLDYESTAHTWVKHNTATTTSVALCDDYLYTVSKDGALIQWKLQPLPENQYPQTTRKKPKRQAPPRKRPQRLAIIKGNHKKAKDKTYKGHVGEILCVAASQDGNFLATGGSDSRLCIWSVQAKGLKLLKTFFQHRDGITGLVFRRGTNTLYTCSRDRTVKVFNLDALAYVETLFGHGDHVVDIDALGQERCISVGSRDRTVRLWKVLDESQLVFRATPGIDKKKDRDPAIKPGSVAETGSLDCCAYIDDQHWVTGSDNGALSLWSIQKKKPLFILPRAHGIEDPLPLTETSSEENPDPRVVPDPQPRWITSLTSLPYSNLILSGSTDGCIRAWRFNEADKTLSPAGVLGQPTSESKAEMNGVSGDAMDTTEDDENHTNEEPQQSRIRGLINSIAVIQRGKTDSLTIVAGVGVEHRLGGWTKMKGARNGAMIFEVRSKTVKNGIGKTVKGEVGMQNGVLKEEVI

SEQ ID NO: 14439 - DNA, 3069 bp, Muscodor strobelii
  misc_feature: SGI EST ID NO. CUFF.34460.0
  misc_feature: Variant of the nucleotide sequence at SEQ ID NO 14437
gctgcacaatcatgactgagaggtgactgcgctcgcgcatgaaattcttgaaagcaattacattttgcttctctcgaatctgtaattacatctctcaaatatgtcatcattcttcagtgcaccaggagctcaaaagaagcggaagcggactactaacgatggcccctccacctcgaaacgccctgctaagtcgatcctgaagcgtcccggtaggccccagccccccaaaagagccgagagagaagacaggggcgacgagtcaatatccagcggttccgaagacggccaagatgacgaaagcttcgagggtttcggctctggctcagagtccgagcaagacgagaccgccgcgcagaagaggctgaggctagccgaggaatatcttgccagagtccgtgacgatgtcgacaaagaggccgatgcccatggatttgatgctgaggaaatagataaagacatgattgctgctcgtttggaggaagatctgggcgaaaccaaaggcaaagtcttcagaagaatcgcttccgacctcgactacgaatccacggcacacacctgggtcaaacacaatactgccaccactacctcagtcgcactctgcgacgattacctctacactgtctccaaagacggtgcactcatccagtggaagctccaacctctccccgaaaaccagtatccccagacgactcggaaaaagccaaagcgacaagccccgcccaggaagagaccccaaagattagccataataaaggggaatcacaagaaggcaaaggacaagacatataaaggccatgttggtgagatcctctgcgtggccgcaagtcaggacggaaatttcttggcaacaggaggctcggacagcaggctctgtatctggagcgtgcaggccaaaggtttgaagctcttgaagacgttcttccaacatcgggacggcatcactgggctcgttttcagaagaggaacgaatacgttatacacttgctcccgggatcggacggtgaaagtcttcaacctggatgctctcgcatacgtcgagacgctatttggccatggtgaccacgttgtggatatagacgctttgggccaagagcgttgtatttcggtcggatcacgagaccgaactgttcgattatggaaggtattagatgaatcccagctcgtcttcagagccacgcctgggatagacaagaagaaagacagagacccagctatcaaacctggctccgtggcggaaacaggtagtcttgactgctgcgcatatatagatgaccagcactgggtcactgggtctgataatggtgctctatcgctgtggagcatacaaaagaaaaagccactcttcatattacctcgagcccatggtatagaggatcctttaccattaacggagacatcgtcagaggagaatccggatccaagagttgtcccggatccgcaaccaaggtggataacgagtctcacctcgcttccatactccaacctcattctctctggaagcacagacggctgtatccgcgcttggcggtttaatgaggcagacaaaacgctttcgcctgctggtgtgttaggtcaacctacgtcggaatcgaaagctgaaatgaatggtgtctctggcgatgccatggacacaactgaagacgatgaaaaccataccaacgaagaaccgcagcagtctagaattaggggcttaataaactctatcgccgtgatccagagagggaagaccgactccttaaccatagtcgctggtgtaggagttgaacacagattaggaggctggacgaagatgaaaggtgccagaaacggagccatgatcttcgaggtgcgctcaaagactgtgaaaaacggcattgggaaaacagtaaaaggagaagtggggatgcaaaatggtgtgttgaaagaagaggtcatttagctattaaggaggccagtcggaccattcgtatatgtatatactgctaccactgctgaaggctcttatgacaaaagataccctactgaacgccctggaacctcgactgtgtcttcggttcagaacgtaatcttgtgttatcacaatgcggaacatctaactgtatcactcgctgattgacggactgcgataaggattctggagacgaagtatagaccaatagagcgaattcatgaatatgttcgtctattttgtcgcattatgtatgctacgaggtaacttttcctaacctctttgatggcagatcaacccgtacatattccaactcgtacagcagatctttccctttcgtcccactctctacgaactgtctcgcattgagcgtagccgtgaagactcatttcctcagctgaccatacgctcagcaatgaccttatactccttcctcttcttccccttccccctaacccgcgtcctcgcctttccaattcccctcgcaactctctgccacacccagccctcggcactatacgccacaaccaaatacaccaacccaagcaccaacagcgtaagtttgaaatccgtgctgatcttcgtaagttgcatcaacttcctgacccatctcgccggcgtaaaaaccatatacaccgaaatcacgagcgcgacaacaatcgtcgtcatgaaggggaaattcgtaaacatgggctgtctgaacggtttacccgccgacagaacaacaccaatgaagatgtattcaaaacacgacaccaggaacagcgccgtgttctccgagttcttgatattactcttctccggattgacgtgcggtggtatgaaccacggctgttcccgcacgagtaagaaagccactgcttggatgagaatgacaatcaccatctgtccaagcaacggcgtcaggacctttcgtgagactaaattggcggttgggcgctgcttagacagtatgggatagggacccgaccatcccatgaatatcgcgatgggtaggatgagaagcacgtcgatgaagagaaattggaaatctccgagattggacgcagatgcgtagaggaaagagacggatgtgaattggatggcggagtagattgacatgtatttgaagcagctgaagctcgttacgagcgctgcccggc

SEQ ID NO: 14440 - DNA, 4008 bp, Muscodor strobelii
  misc_feature: SGI cDNA ID NO. 564758
  misc_feature: Reduced expression when VOC is produced
  misc_feature: Encodes the peptide sequence at SEQ ID NO 14441
atggacgacaacgacgatgcgcgctccaggcgcaacgaccctcccggtctgtacaggctgacttcgaaccacagcagcacgagcttcttcgaggacgtagaaatggcccacgatgagctgttctctggacccgtcgccgagagcctgcccaccagtgtatctgcctttagccatcgccgacagcgtgccgattcgattgctagcttcactagcttcacttactacaatgaggaagaggatgaatcagaacctgtccaggagtttcgcgaggatggcgctgtgtcttttgacattgacgacatcccctttgagctagaagacgatgccgaggagagctcgagttcgccgtcactagtaaatggagactcacacgacggctaccccttgcatagacggagatcgtccactctgtcaagaacttctgtccacgcccggcttttgcggaccgacagcggcgcaacggaagcgagcagtcggggttatggtcgtgtcacccaaaaataccacatagccaatgaggacttgactatcgtcattgcaggcttcagaacaagtagaataggctatgctgcttatctgctgctatgtctgctgaccctgggcgttgcatacctcctgttgcgctggcttcctcggtggcaggtcaaattagtgggagagccctgtccacttcgtgaatgtcaatgggttgtcttagagaatcaatggggcgagatggccgtgctgaacgtgaagagccagtcttatgaacgacccctttccaccgtgtttggaacacccgaaaagatgtttgcgcagcttctggaagacgatgccgatcctatcctgagcgaactgagaactcttgattatcgttatgttcgcttcttctttcatcctctgaaagacaaattcgtggttggtaatggttggaaagatcctgcctggacccgagtcaggtcgctgagagcgggcatcgacggtgacgagaaagaccagcgagaacgcgtctttggcgcaaatcttatagacatcgagcaaaaatctatacctcagctgcttgtagacgaagtgttccatcccttttatgtatttcagattgcgagcttgatcttatggtcactcgatgaatattactactacgcgatatgcatatttgtgatgtctgcagggagtattattgctacactcgtagaaacccgtgcaacaatggcgcgcctccgagacatctcacgctttgagtgtgacgtacgagttcttcgagacgggttttggaaacatgtttcgtcctccgacttggttcccggagatatttatgaagttagcgacccgagtctcacccaatttcccagcgacggcattctactcagtggagattgtatcgtcaatgagagcatgctcacgggcgagtctgttccggtttccaagattcccgctacagacgacacattacagatcatgaatcttggtgcgtcgacgatatctccagaagcagcacgccacttcttgttttgcggtaccaagatcattcgtgcaagacgaccacaagaaggtagggatgacgaaggtgtggctcttgctatggttgtgagaactgggttcaacaccaccaagggttccttggttcgctcgatgctgttcccgaaaccatcagggttcaagttctaccgagattcgtttcggtatatctcagtcatgggatgtattgcgctattgggcttcgtggtgtctttcatcaacttcatcaggctaggtctagcatggcatttgatcattgtcagggcattggacttgatcacaattgtcgttcctcctgcgctacctgcaactttgaccattggaacaaatttcgcactcagtcgcctcaagaagaagcaaatcttctgtatcagcccgcagagagtcaatgtcggcggcaagcttgacatcatgtgctttgataaaacgggcacccttacagaggacggcttggatgttctaggcgttaggttggtatccagattgacgaaacgcttcgacgatgtcattgccgacgcatctgcactcgtcccacacaccagtcttgtttctggcccgggtgacaaatatgatgtcaaccgtgcagctcttttcaccatggcgacctgccactcactgcggtctatcgatggagagctgttaggagatccactggatgtcaagatgttcgagttcacgggctggcaattcgaagaaggtgcacagggaggaggcgatcaagacgatggtgaagatggaggctttgctccatccgttgctagaccacctccagcccccctatacgacacagataattatggaaatgccaatggcatcactggtcctttggagctaggtgtgctcagaaccttcgagtttgtgtctcaactgaggagagccagtgtcattgtacgaggatttgggcaacagcaaggtgacatttatgttaaaggggcaccggaatgcatgcgagacatatgccgagccgaaagcttccccgatgatttcgacgagctgctatcgacttatacccaccaaggttatcgagtcattgcagttgctacgaagcacatgaagaagttgacatgggtgaagtcccagaaaatatccagagacgaagtcgaatcagaccttgaatttgtaggattcatcatcttcgaaaataagctgaaaccaacgaccgcggctgtgctgaaagagctgaatcaggctaacattgggtcgatcatggtcactggcgataacatcttgacagctataagcgtagcgcgaaattgcggcttgatagaagagagctcgcattgcttcgtgccgcattttgctgaaggcaatttccgggacccgaacgcacgccttgaatgggaaagcatagatgacgccgcctatcgactggacgctaggactctgttgccgctacccgctccaaacgaccgcgatgcttctctgccctacgacattatgaacctgaagagctactcgctcgcagttagtggcgacgtgttccggtggatcatcgacttcgctccaaatgaagtcatgcaaaggatgctagtccgcggcaaggtcttcgcgcgaatgtcgccagatgagaaacatgagcttgttgagaagctacagagcattgattattgctgtggattctgtggcgacggagccaacgactgcggcgccttgaaagctgctgatgttgggatttcactatcagaggcggaggcttcggtagctgccccgttcacatcgagaatatttgacattggatgtgtgccaaatgtcatcagagagggccgggcagcgctcgtaacgagcttcagctgcttcaaatacatgtcaatctactccgccatccaattcacatccgtctctttcctctacgcatctgcgtccaatctcggagatttccaatttctcttcatcgacgtgcttctcatcctacccatcgcgatattcatgggatggtcgggtccctatcccatactgtctaagcagcgcccaaccgccaatttagtctcacgaaaggtcctgacgccgttgcttggacagatggtgattgtcattctcatccaagcagtggctttcttactcgtgcgggaacagccgtggttcataccaccgcacgtcaatccggagaagagtaatatcaagaactcggagaacacggcgctgttcctggtgtcgtgttttgaatacatcttcattggtgttgttctgtcggcgggtaaaccgttcagacagcccatgtttacgaatttccccttcatgacgacgattgttgtcgcgctcgtgatttcggtgtatatggtttttacgccggcgagatgggtcaggaagttgatgcaacttacgaagatcagcacggatttcaaacttacgctgttggtgcttgggttggtgtatttggttgtggcgtatagtgccgagggctgggtgtggcagagagttgcgaggggaattggaaaggcgaggacgcgggttagggggaaggggaagaagaggaaggagtataaggtcattgctgagcgtatggtcagctga

SEQ ID NO: 14441 - protein, 1335 aa, Muscodor strobelii
  misc_feature: SGI Peptide ID NO. 564758
  misc_feature (634)..(1063): Pfam Id: PF00702 Pfam Desc: haloacid dehalogenase-like hydrolase
  misc_feature (376)..(630): Pfam Id: PF00122 Pfam Desc: E1-E2 ATPase
  misc_feature (410)..(469): Pfam Id: PF00122 Pfam Desc: E1-E2 ATPase
  misc_feature (634)..(940): Pfam Id: PF00702 Pfam Desc: haloacid dehalogenase-like hydrolase
  misc_feature (1)..(1331): NCBI GI: 238839456 Blast Desc: ATPase type 13A2 [Microsporum canis CBS 113480]
  misc_feature (32)..(1270): NCBI GI: 255943699 Blast Desc: Pc20g00550 [Penicillium chrysogenum Wisconsin 54-1255] gi|211587352|emb|CAP85384.1| Pc20g00550 [Penicillium chrysogenum Wisconsin 54-1255]
  misc_feature (35)..(1333): NCBI GI: 169765303 Blast Desc: [Aspergillus oryzae RIB40] gi|83764977|dbj|BAE55121.1| protein product [Aspergillus oryzae]
  misc_feature (14)..(1333): NCBI GI: 70998712 Blast Desc: P-type ATPase [Aspergillus fumigatus Af293] gi|66851714|gb|EAL92040.1| P-type ATPase, [Aspergillus fumigatus Af293] gi|159126188|gb|EDP51304.1| P-type ATPase, [Aspergillus
  misc_feature (35)..(1241): NCBI GI: 119498635 Blast Desc: P-type ATPase, [Neosartorya fischeri NRRL 181] gi|119414239|gb|EAW24178.1| P-type ATPase, [Neosartorya fischeri NRRL 181]
  misc_feature (32)..(1331): NCBI GI: 225562255 Blast Desc: cation-transporting ATPase [Ajellomyces capsulatus G186AR]
  misc_feature (19)..(1333): NCBI GI: 259482917 Blast Desc: TPA: P-type ATPase, (Eurofung) [Aspergillus nidulans FGSC A4]
  misc_feature (32)..(1298): NCBI GI: 226283863 Blast Desc: conserved [Paracoccidioides brasiliensis Pb01]
  misc_feature (13)..(1335): NCBI GI: 258571443 Blast Desc: P-type ATPase [Uncinocarpus reesii 1704] gi|237904795|gb|EEP79196.1| P-type ATPase [Uncinocarpus reesii 1704]
  misc_feature (26)..(1332): NCBI GI: 119182674 Blast Desc: CIMG_06355 [Coccidioides immitis RS]
  misc_feature (314)..(1182): SWISSPROT Homolog: EC 3.6.3.8 Calcium-transporting ATPase
  misc_feature: Useful for introducing or modulating the production of volatile compounds
MDDNDDARSRRNDPPGLYRLTSNHSSTSFFEDVEMAHDELFSGPVAESLPTSVSAFSHRRQRADSIASFTSFTYYNEEEDESEPVQEFREDGAVSFDIDDIPFELEDDAEESSSSPSLVNGDSHDGYPLHRRRSSTLSRTSVHARLLRTDSGATEASSRGYGRVTQKYHIANEDLTIVIAGFRTSRIGYAAYLLLCLLTLGVAYLLLRWLPRWQVKLVGEPCPLRECQWVVLENQWGEMAVLNVKSQSYERPLSTVFGTPEKMFAQLLEDDADPILSELRTLDYRYVRFFFHPLKDKFVVGNGWKDPAWTRVRSLRAGIDGDEKDQRERVFGANLIDIEQKSIPQLLVDEVFHPFYVFQIASLILWSLDEYYYYAICIFVMSAGSIIATLVETRATMARLRDISRFECDVRVLRDGFWKHVSSSDLVPGDIYEVSDPSLTQFPSDGILLSGDCIVNESMLTGESVPVSKIPATDDTLQIMNLGASTISPEAARHFLFCGTKIIRARRPQEGRDDEGVALAMVVRTGFNTTKGSLVRSMLFPKPSGFKFYRDSFRYISVMGCIALLGFVVSFINFIRLGLAWHLIIVRALDLITIVVPPALPATLTIGTNFALSRLKKKQIFCISPQRVNVGGKLDIMCFDKTGTLTEDGLDVLGVRLVSRLTKRFDDVIADASALVPHTSLVSGPGDKYDVNRAALFTMATCHSLRSIDGELLGDPLDVKMFEFTGWQFEEGAQGGGDQDDGEDGGFAPSVARPPPAPLYDTDNYGNANGITGPLELGVLRTFEFVSQLRRASVIVRGFGQQQGDIYVKGAPECMRDICRAESFPDDFDELLSTYTHQGYRVIAVATKHMKKLTWVKSQKISRDEVESDLEFVGFIIFENKLKPTTAAVLKELNQANIGSIMVTGDNILTAISVARNCGLIEESSHCFVPHFAEGNFRDPNARLEWESIDDAAYRLDARTLLPLPAPNDRDASLPYDIMNLKSYSLAVSGDVFRWIIDFAPNEVMQRMLVRGKVFARMSPDEKHELVEKLQSIDYCCGFCGDGANDCGALKAADVGISLSEAEASVAAPFTSRIFDIGCVPNVIREGRAALVTSFSCFKYMSIYSAIQFTSVSFLYASASNLGDFQFLFIDVLLILPIAIFMGWSGPYPILSKQRPTANLVSRKVLTPLLGQMVIVILIQAVAFLLVREQPWFIPPHVNPEKSNIKNSENTALFLVSCFEYIFIGVVLSAGKPFRQPMFTNFPFMTTIVVALVISVYMVFTPARWVRKLMQLTKISTDFKLTLLVLGLVYLVVAYSAEGWVWQRVARGIGKARTRVRGKGKKRKEYKVIAERMVS

SEQ ID NO: 14442 - DNA, 7687 bp, Muscodor strobelii
  misc_feature: SGI EST ID NO. CUFF.34461.2
  misc_feature: Variant of the nucleotide sequence at SEQ ID NO 14440
gagaaatgtactcccgatatagggcggtgagcattgtaccgagatgcttacctttgctgcaataccggagagtctctcagtatccgtcgccaaaagaccgccacattttcatgtcaacttcctggcatatcactgagatagagacaatagtgatttttgaaatagcgaggtttgtcaaagcctgacaagactgtaaatgcttaaagatttccaaagactccaactcccccaaaattctattgaaacgggtgatgcttcgtcttacccaaaaaggcaatacgagacgacccgggcaattcatgcacatgcttgctatgattgtcaacgtcgtccaatcaaatgatatagaaatcaaaacgtgatagaaattccttggtctcttatactcggctggtactatttgacagttggcacgcgatactcctaatatctgtaatccaggctgcacagtaacaacgcgcattccaggtagtgaagtattaggtcatctttgttggggctgcaagggccgggcacagatagcctcgacagccacttttgcacagtatggggaatgcaggaatatccgatggctcgaggatcggagttggctttgcccagcaccgattgacgtcaagcgtcatagtggaggtcacagacctcgatagtcacatgtaacacgcgacacacctcgaagctcaatggaagtgtcgattgcagcagctgaatagctttcctgcaatatcagaatcacctggtacaaaattgaaaaaagcgatatgatatcttgtttttagcttttgttaaatcagtctttggggccctggtttctccgaaaaaaaatacaatacttgagctcatatatgggacaatcccacgttagactgccctaagctccacctagcgttacagcaatgaattcacgattcggatcttgtccttgactcgccaacatcgatagaccctggatcgaggcgaagggcatcaaagctctccacgaagaagtcgaattgatcatctcgacgattatcatcagatcgatgtctcttatgcgtccctagaggcgtggtgcagcctgcttcgatccgtccgagcctcggaaggagggcgcaaatctcgagaatggacgacaacgacgatgcgcgctccaggcgcaacgaccctcccggtctgtacaggctgacttcgaaccacagcagcacgagcttcttcgaggacgtagaaatggcccacgatgaggtgcgtcaccggccgtgataccccattgtggtacctcgctgtggtatctgtgtgttgttcgtattggtctgacacattttattctagctgttctctggacccgtcgccgagagcctgcccaccagtgtatctgcctttagccatcgccgacagcgtgccgattcgattgctagcttcactagcttcacttactacaatgaggaagaggatgaatcagaacctgtccaggagtttcgcgaggatggcgctgtgtcttttgacattgacgacatcccctttgagctagaagacgatgccgaggagagctcgagttcgccgtcactagtaaatggagactcacacgacggctaccccttgcatagacggagatcgtccactctgtcaagaacttctgtccacgcccggcttttgcggaccgacagcggcgcaacggaagcgagcagtcggggttatggtcgtgtcacccaaaaataccacatagccaatgaggacttgactatcgtcattgcaggcttcagaacaagtagaataggctatgctgcttatctgctgctatgtctgctgaccctgggcgttgcatacctcctgttgcgctggcttcctcggtggcaggtcaaattagtgggagagccctgtccacttcgtgaatgtcaatgggttgtcttagagaatcaatggggcgagatggccgtgctgaacgtgaagagccagtcttatgaacgacccctttccaccgtgtttggaacacccgaaaagatgtttgcgcagcttctggaagacgatgccgatcctatcctgagcgaactgagaactcttgattatcgttatgttcgcttcttctttcatcctctgaaagacaaattcgtggttggtaatggttggaaagatcctgcctggacccgagtcaggtcgctgagagcgggcatcgacggtgacgagaaagaccagcgagaacgcgtctttggcgcaaatcttatagacatcgagcaaaaatctatacctcagctgcttgtagacgaagtgttccatcccttttatgtatttcagattgcgagcttgatcttatggtcactcgatgaatattactactacgcgatatgcatatttgtgatgtctgcagggagtattattgctacactcgtagaaacccgtgcaacaatggcgcgcctccgagacatctcacgctttgagtgtgacgtacgagttcttcgagacgggttttggaaacatgtttcgtcctccgacttggttcccggagatatttatgaagttagcgacccgagtctcacccaatttcccagcgacggcattctactcagtggagattgtatcgtcaatgagagcatgctcacgggcgagtctgttccggtttccaagattcccgctacagacgacacattacagatcatgaatcttggtgcgtcgacgatatctccagaagcagcacgccacttcttgttttgcggtaccaagatcattcgtgcaagacgaccacaagaaggtagggatgacgaaggtgtggctcttgctatggttgtgagaactgggttcaacaccaccaagggttccttggttcgctcgatgctgttcccgaaaccatcagggttcaagttctaccgagattcgtttcggtatatctcagtcatgggatgtattgcgctattgggcttcgtggtgtctttcatcaacttcatcaggctaggtctagcatggcatttgatcattgtcagggcattggacttgatcacaattgtcgttcctcctgcgctacctgcaactttgaccattggaacaaatttcgcactcagtcgcctcaagaagaagcaaatcttctgtatcagcccgcagagagtcaatgtcggcggcaagcttgacatcatgtgctttgataaaacgggcacccttacagaggacggcttggatgttctaggcgttaggttggtatccagattgacgaaacgcttcgacgatgtcattgccgacgcatctgcactcgtcccacacaccagtcttgtttctggcccgggtgacaaatatgatgtcaaccgtgcagctcttttcaccatggcgacctgccactcactgcggtctatcgatggagagctgttaggagatccactggatgtcaagatgttcgagttcacgggctggcaattcgaagaaggtgcacagggaggaggcgatcaagacgatggtgaagatggaggctttgctccatccgttgctagaccacctccagcccccctatacgacacagataattatggaaatgccaatggcatcactggtcctttggagctaggtgtgctcagaaccttcgagtttgtgtctcaactgaggagagccagtgtcattgtacgaggatttgggcaacagcaaggtgacatttatgttaaaggggcaccggaatgcatgcgagacatatgccgagccgaaagcttccccgatgatttcgacgagctgctatcgacttatacccaccaaggttatcgagtcattgcagttgctacgaagcacatgaagaagttgacatgggtgaagtcccagaaaatatccagagacgaagtcgaatcagaccttgaatttgtaggattcatcatcttcgaaaataagctgaaaccaacgaccgcggctgtgctgaaagagctgaatcaggctaacattgggtcgatcatggtcactggcgataacatcttgacagctataagcgtagcgcgaaattgcggcttgatagaagagagctcgcattgcttcgtgccgcattttgctgaaggcaatttccgggacccgaacgcacgccttgaatgggaaagcatagatgacgccgcctatcgactggacgctaggactctgttgccgctacccgctccaaacgaccgcgatgcttctctgccctacgacattatgaacctgaagagctactcgctcgcagttagtggcgacgtgttccggtggatcatcgacttcgctccaaatgaagtcatgcaaaggatgctagtccgcggcaaggtcttcgcgcgaatgtcgccagatgagaaacatgagcttgttgagaagctacagagcattgattattgctgtggattctgtggcgacggagccaacgactgcggcgccttgaaagctgctgatgttgggatttcactatcagaggcggaggcttcggtagctgccccgttcacatcgagaatatttgacattggatgtgtgccaaatgtcatcagagagggccgggcagcgctcgtaacgagcttcagctgcttcaaatacatgtcaatctactccgccatccaattcacatccgtctctttcctctacgcatctgcgtccaatctcggagatttccaatttctcttcatcgacgtgcttctcatcctacccatcgcgatattcatgggatggtcgggtccctatcccatactgtctaagcagcgcccaaccgccaatttagtctcacgaaaggtcctgacgccgttgcttggacagatggtgattgtcattctcatccaagcagtggctttcttactcgtgcgggaacagccgtggttcataccaccgcacgtcaatccggagaagagtaatatcaagaactcggagaacacggcgctgttcctggtgtcgtgttttgaatacatcttcattggtgttgttctgtcggcgggtaaaccgttcagacagcccatgtttacgaatttccccttcatgacgacgattgttgtcgcgctcgtgatttcggtgtatatggtttttacgccggcgagatgggtcaggaagttgatgcaacttacgaagatcagcacggatttcaaacttacgctgttggtgcttgggttggtgtatttggttgtggcgtatagtgccgagggctgggtgtggcagagagttgcgaggggaattggaaaggcgaggacgcgggttagggggaaggggaagaagaggaaggagtataaggtcattgctgagcgtatggtcagctgaggaaatgagtcttcacggctacgctcaatgcgagacagttcgtagagagtgggacgaaagggaaagatctgctgtacgagttggaatatgtacgggttgatctgccatcaaagaggttaggaaaagttacctcgtagcatacataatgcgacaaaatagacgaacatattcatgaattcgctctattggtctatacttcgtctccagaatccttatcgcagtccgtcaatcagcgagtgatacagttagatgttccgcattgtgataacacaagattacgttctgaaccgaagacacagtcgaggttccagggcgttcagtagggtatcttttgtcataagagccttcagcagtggtagcagtatatacatatacgaatggtccgactggcctccttaatagctaaatgacctcttctttcaacacaccattttgcatccccacttctccttttactgttttcccaatgccgtttttcacagtctttgagcgcacctcgaagatcatggctccgtttctggcacctttcatcttcgtccagcctcctaatctgtgttcaactcctacaccagcgactatggttaaggagtcggtcttccctctctggatcacggcgatagagtttattaagcccctaattctagactgctgcggttcttcgttggtatggttttcatcgtcttcagttgtgtccatggcatcgccagagacaccattcatttcagctttcgattccgacgtaggttgacctaacacaccagcaggcgaaagcgttttgtctgcctcattaaaccgccaagcgcggatacagccgtctgtgcttccagagagaatgaggttggagtatggaagcgaggtgagactcgttatccacctaaagctagatcagattcaaatatcttattgagtgagagagatatggacacgggggcatatataccttggttgcggatccgggacaactcttggatccggattctcctctgacgatgtctccgttaatggtaaaggatcctctataccatgggctcgaggtaatatgaagagtggctttttcttttgtatgctccacagcgatagagcaccattatcagacccagtgacccagtgctggtcatctatatatgcgcagcagtcaagactacctgtttccgccacggagccaggtttgatagctgggtctctgtctttcttcttgtctatcccaggcgtggctctgaagacgagctgggattcatctaataccttccatactgcgattgcgtcaataatattcttcaatcatcgggatgcgccaaaactcacatcgaacagttcggtctcgtgatccgaccgaaatacaacgctcttggcccaaagcgtctatatccacaacgtggtcaccatggccaaatagcgtctcgacgtatgcgagagcatccaggttgaagactttcaccgtccgatcccgggagcaagtgtataacgtattcgttcctcttctgaaaacgagcccagtgatgccgtcccgatgttggaagaacgtcttcaagagcttcaaacctttggcctgcacgctccagatacagagcctgctgtccgagcctcctgttgccaagaaatttccgtcctgacttgcggccacgcagaggatctcaccaacatggcctttatatgtcttgtcctttgccttcttgtgattcccctttattatggctaatctttggggtctcttcctgggcggggcttgtcgctttggctttttccgagtcgtctggggatactggttttcggggagaggttggagcttccactggatgagtgcaccgtctttggagacagtgtagaggtaatcgtcgcagagtgcgactgaggtagtggtggcagtattgtgtttgacccaggtgtgtgccgtggattcgtagtcgaggtcggaagcgattcttctgaagactttgcctttggtttcgcccagatcttcctccaaacgagcagcaatcatgtctttatctctgttcttggtcagttgccagtctcgtagagtgaccaatggcaatattctcacatttcctcagcatcaaatccatgggcatcggcctctttgtcgacatcgtcacggactctggcaagatattcctcggctagcctcagcctcttctgcgcggcggtctcgtcttgctcggactctgagccagagccgaaaccctcgaagctttcgtcatcttggccgtcttcggaaccgctggatattgactcgtcgcccctgtcttctctctcggctcttttggggggctggggcctaccgggacgcttcaggatcgacttagcagggcgtttcgaggtggaggggccatcgttagtagtccgcttccgcttcttttgagctcctggtgcactgaagaatgatgacatatttgagagatgtaattacagattcgagagaagcaaaatgtaattgctttcaagaatttcatgcgcgagcgcagtcacctctcagtcatgattgtgcagc

SEQ ID NO: 14443 - DNA, 1209 bp, Muscodor strobelii
  misc_feature: SGI cDNA ID NO. 564759
  misc_feature: Encodes the peptide sequence at SEQ ID NO 14444
atggccgagcccatcaagaaccgccgccccgagcccgttgcgcctaccccgcagaacacacccgccagcaatgctcctatctcctcccacgcccaacagccgggtgttgctagcatcaaggaggaggaccttgaccgtgcggccgctgcgtccatctttgcccagaacccccagcttctcaacttgatccagggtcgtcttggcaacctcgttggccgctcgtctggctacatcgagtcgctccctcttgccgtccgccgccgcgtcgccggtctcaagggtatccagaaggaccactccaaactcgaggcagagttccaagaggaggttctccagctcgagaagaagtacttcgccaagttcacccctctctacaccaagcgtgccgagattgtcaacggcaagaccgagcccaccgaagatgaggtaaaggctggcgaggaagacgaggaggaggaagagagcgccgaggccaagacagaggagaagacagaggaggctggagaggcccccaatggtatccccgagttctggctctcagccatgaagaatcaaatctccctcgccgagatgatcaccgaccgcgacgagaatgctctccgctctctggtcgacattcgcatggagtaccttgacaagcccggcttccgcctcatcttcgagttcgccgacaacgactacttcaccaacaagaccatcaccaagacctacttctaccagaatgagagcggatacggtggtgacttcatctacgaccacgccgagggcgacaagatcaactggaaggagggccaggacctcacagttcgcatcgagagcaagaagcagaggaacaagaacaccaagcagacccgcatcgttaagaagacggtccccacagagtcgttcttcaacttcttcgctccccctaaggcccctaccgacgatgatgaggatgctgcttctgatattgaagagcgcttggagcttgactaccagctcggcgaagacatcaaggagaagctgattccccgagctattgactggtttaccggagaggccttggctttcgaggaggtcgatgatctcgaggacgaggctgattacgatgatgaagatgaggacgaggacgacctcagcgaagaccgtgacgatgacgaggaagagtcggatgacgatgttgatggcgcgaagccgaagcaggaggcccaagagtgcaagcagagctaa

SEQ ID NO: 14444 - protein, 402 aa, Muscodor strobelii
  misc_feature: SGI Peptide ID NO. 564759
  misc_feature (86)..(349): Pfam Id: PF00956 Pfam Desc: Nucleosome assembly protein (NAP)
  misc_feature (1)..(402): NCBI GI: 164429322 Blast Desc: nucleosome assembly protein [Neurospora crassa OR74A] gi|28950350|emb|CAD70974.1| nucleosome assembly protein I [Neurospora crassa] gi|157073435|gb|EAA26762.2| nucleosome crassa
  misc_feature (1)..(402): NCBI GI: 256731258 Blast Desc: nucleosome assembly protein [Nectria haematococca mpVI 77-13-4]
  misc_feature (1)..(402): NCBI GI: 116199267 Blast Desc: CHGG_07789 [Chaetomium globosum CBS 148.51] gi|88179068|gb|EAQ86536.1| CHGG_07789 [Chaetomium globosum CBS 148.51]
  misc_feature (1)..(402): NCBI GI: 46126179 Blast Desc: FG07467.1 [Gibberella zeae PH-1]
  misc_feature (1)..(402): NCBI GI: 225562254 Blast Desc: nucleosome assembly protein [Ajellomyces capsulatus G186AR]
  misc_feature (1)..(402): NCBI GI: 154312104 Blast Desc: BC1G_06085 [Botryotinia fuckeliana B05.10] gi|150850048|gb|EDN25241.1| BC1G_06085 [Botryotinia fuckeliana B05.10]
  misc_feature (1)..(402): NCBI GI: 212536004 Blast Desc: nucleosome assembly protein Nap1, [Penicillium marneffei ATCC 18224] gi|210070557|gb|EEA24647.1| nucleosome assembly protein Nap1, [Penicillium marneffei ATCC 18224]
  misc_feature (1)..(402): NCBI GI: 39978079 Blast Desc: MGG_06924 [Magnaporthe grisea 70-15] gi|59802926|gb|AAX07668.1| nucleosome assembly protein-like protein [Magnaporthe grisea] gi|145013504|gb|EDJ98145.1| grisea
  misc_feature (1)..(402): NCBI GI: 225685080 Blast Desc: nucleosome assembly protein [Paracoccidioides brasiliensis Pb03] gi|226294394|gb|EEH49814.1| nucleosome assembly protein [Paracoccidioides brasiliensis Pb18]
  misc_feature (1)..(402): NCBI GI: 171692769 Blast Desc: protein product [Podospora anserina] gi|170946333|emb|CAP73134.1| protein product [Podospora anserina]
MAEPIKNRRPEPVAPTPQNTPASNAPISSHAQQPGVASIKEEDLDRAAAASIFAQNPQLLNLIQGRLGNLVGRSSGYIESLPLAVRRRVAGLKGIQKDHSKLEAEFQEEVLQLEKKYFAKFTPLYTKRAEIVNGKTEPTEDEVKAGEEDEEEEESAEAKTEEKTEEAGEAPNGIPEFWLSAMKNQISLAEMITDRDENALRSLVDIRMEYLDKPGFRLIFEFADNDYFTNKTITKTYFYQNESGYGGDFIYDHAEGDKINWKEGQDLTVRIESKKQRNKNTKQTRIVKKTVPTESFFNFFAPPKAPTDDDEDAASDIEERLELDYQLGEDIKEKLIPRAIDWFTGEALAFEEVDDLEDEADYDDEDEDEDDLSEDRDDDEEESDDDVDGAKPKQEAQECKQS

SEQ ID NO: 14445 - DNA, 2270 bp, Muscodor strobelii
  misc_feature: SGI EST ID NO. CUFF.34354.0
  misc_feature: Variant of the nucleotide sequence at SEQ ID NO 14443
gttgaacctctggtgcaagtacaagttactgtgcagcaccttccgttcaaccacatctctccatcctttctgttcaaccactgtcttccacgacacacattctcacctcgccgtcacattcctggcagcggtctgactcgtggcagtggtcatttcaatctattgcagtgctgcatctgctattctcgtgcatcatcagttgcgtcgtgagcacagcgaagatagtataccgttgtatctggtatacctagaatcatcgtcaagcacgctgcaagtgcacactacaagtaccttctcaggcggcgactgccagacggtagacccgcccacactcaaccatcttaacccacgctatcagaaccactatccctgccctttttcgccgccacttttttcattcccatcaacttcttttctacaactccctcgtcactcctgcatacccatccctcgccgaccgtgaaccaccgttttcacaatggccgagcccatcaagaaccgccgccccgagcccgttgcgcctaccccgcagaacacacccgccagcaatgctcctatctcctcccacgcccaacagccgggtgttgctagcatcaaggaggaggaccttgaccgtgcggccgctgcgtccatctttgcccagaacccccagcttctcaacttgatccagggtcgtcttggcaacctcgttggccgctcgtctggctacatcgagtcgctccctcttgccgtccgccgccgcgtcgccggtctcaagggtatccagaaggaccactccaaactcgaggcagagttccaagaggaggttctccagctcgagaagaagtacttcgccaagttcacccctctctacaccaagcgtgccgagattgtcaacggcaagaccgagcccaccgaagatgaggtaaaggctggcgaggaagacgaggaggaggaagagagcgccgaggccaagacagaggagaagacagaggaggctggagaggcccccaatggtatccccgagttctggctctcagccatgaagaatcaaatctccctcgccgagatgatcaccgaccgcgacgagaatgctctccgctctctggtcgacattcgcatggagtaccttgacaagcccggcttccgcctcatcttcgagttcgccgacaacgactacttcaccaacaagaccatcaccaagacctacttctaccagaatgagagcggatacggtggtgacttcatctacgaccacgccgagggcgacaagatcaactggaaggagggccaggacctcacagttcgcatcgagagcaagaagcagaggaacaagaacaccaagcagacccgcatcgttaagaagacggtccccacagagtcgttcttcaacttcttcgctccccctaaggcccctaccgacgatgatgaggatgctgcttctgatattgaagagcgcttggagcttgactaccagctcggcgaagacatcaaggagaagctgattccccgagctattgactggtttaccggagaggccttggctttcgaggaggtcgatgatctcgaggacgaggctgattacgatgatgaagatgaggacgaggacgacctcagcgaagaccgtgacgatgacgaggaagagtcggatgacgatgttgatggcgcgaagccgaagcaggaggcccaagagtgcaagcagagctaagctcgtcgatacgctctagttccttacgttttctcgggcatgaactaccgaccgaagactagacgaatgattcggatttgccttgttcgctccttcacgtggctcaatgctatgcttgcatatcagtagcccgtttgatcgatttgccctgatggtgcaggcatcgttggtctacgcgattcttgcctcaaaaatagactggtgtttccgtctggtttcagagactgttctcagaatatggtctgtattgatggtagtattcttttgagttgctttgcaattcatggtgcgtcacggggtgtgtggaccaaaccggaatggtggttaggcattgccaaataggccgtgaagggtcagagaaagaaggcttgcaagacaacgaactatatgatgagcctcaggcataggctatgcgacttgccttgaggacaatacggaagggaataagatgagattcatgcacatcgtgtttttcgcacatatgtacccctacaccaacaatgaccttgataaaaggtttaatatttcacgaggaatgcccaaaaaaaatccattgcgtaaagtacagatgactttcagaaac

SEQ ID NO: 14446 - DNA, 1410 bp, Muscodor strobelii
  misc_feature: SGI cDNA ID NO. 564760
  misc_feature: Reduced expression when VOC is produced
  misc_feature: Encodes the peptide sequence at SEQ ID NO 14447
atgacgcaaccacagactatcctgaacatccctcagagggaccgggatcaatccagaaaaatgagcgtttctgcttcaccttcagccacattccagtccccgccatccagcttgagcggggcattggccttcggacaagcacctccaaagcagctgaagcctttcaatactcaggatatcaagatcttgcttcttgagaatgtgaaccagagtggacaggatattttaaagagccaagggtaccaggtcgaggctcataaggcatcgcttcctgaagatcagctcattgagaaaatccgtgatgcgcacgtcattggaattcggtcaaaaacaaaactgagcgagaaggttctccgcgaagcaaagaacttgctggtcattggctgcttctgtatcggtaccaatcaggtcgatctcgaatacgctgcccgccatggtatcgctgtgttcaattctccgtttgcaaactcccgcagtgtcgccgagctcgtcattgctgagatcatctcgctcgctcgccaacttggtgaccgctctaatgaaatgcacaagggcacatggaataaagtgagcaacaagtgctgggaaatccgtggcaagacgctgggtattgttggttatggtcacattggttctcagctttccgtactggctgaggccatgggtatggacgtcatttactatgatgtcgtcaatttgatggccatgggtactgctcgccaggttcccaccctcaaagacctcctgaaccaagcggatttcgtgactctccacgttcctgagctacccgagaccaagaacttgatttcagctgctcagatggacgagatgaaggatggctcttatttgatcaatgctagccgcgggacagtgattgacatcccggctctaatcagctccatgcgaagtggcaagatcgctggtgccgcattggatgtctacccagcggagccccgaggcaacggagactatttcgtcaacagtttaaacggatgggaggaggatcttcgcagcctaaacaacatcattctcacacctcatattggtggtagcaccgaagaggctcagagagctattggtatcgaagttggcgacgccctggtccgatacatcaaccagggcaccactcttggcagcgtcaatatgccagaagtcaacttgcgatcagtggcagacggacagcctgactacgctagaatcatcttcatccaccagaacgtacctggtgtcctgcgaaaagtcaacgagattctcggtgatcacaacgtcgagaagcagatctctgacagcagaggcgattacgcatacttgatggccgatgtgagcaatgtgcagaacagcgatcttagggagatcctggacagccttgaagcattgagctctcgtatcgcaacgcgtgtgttgtactag

SEQ ID NO: 14447 - protein, 469 aa, Muscodor strobelii
  misc_feature: SGI Peptide ID NO. 564760
  misc_feature (398)..(461): Pfam Id: PF01842 Pfam Desc: ACT domain
  misc_feature (62)..(381): Pfam Id: PF00389 Pfam Desc: D-isomer specific 2-hydroxyacid dehydrogenase, catalytic domain
  misc_feature (165)..(349): Pfam Id: PF02826 Pfam Desc: D-isomer specific 2-hydroxyacid dehydrogenase, NAD binding domain
  misc_feature (1)..(469): NCBI GI: 156064373 Blast Desc: SS1G_00194 [Sclerotinia sclerotiorum 1980] gi|154691056|gb|EDN90794.1| SS1G_00194 [Sclerotinia sclerotiorum 1980]
  misc_feature (1)..(469): NCBI GI: 154312124 Blast Desc: BC1G_06095 [Botryotinia fuckeliana B05.10] gi|150850058|gb|EDN25251.1| BC1G_06095 [Botryotinia fuckeliana B05.10]
  misc_feature (22)..(469): NCBI GI: 171692767 Blast Desc: protein product [Podospora anserina] gi|170946332|emb|CAP73133.1| protein product [Podospora anserina]
  misc_feature (1)..(469): NCBI GI: 85077261 Blast Desc: D-3-phosphoglycerate dehydrogenase 1 [Neurospora crassa OR74A] gi|28917038|gb|EAA26763.1| D-3-phosphoglycerate dehydrogenase 1 [Neurospora crassa OR74A]
  misc_feature (11)..(469): NCBI GI: 46126181 Blast Desc: FG07468.1 [Gibberella zeae PH-1]
  misc_feature (14)..(469): NCBI GI: 256731257 Blast Desc: [Nectria haematococca mpVI 77-13-4]
  misc_feature (9)..(469): NCBI GI: 115438570 Blast Desc: D-3-phosphoglycerate dehydrogenase 2 [Aspergillus terreus NIH2624] gi|114188915|gb|EAU30615.1| D-3-phosphoglycerate dehydrogenase 2 [Aspergillus terreus NIH2624]
  misc_feature (18)..(469): NCBI GI: 259482914 Blast Desc: TPA: 3-phosphoglycerate dehydrogenase, (Eurofung) [Aspergillus nidulans FGSC A4]
  misc_feature (24)..(469): NCBI GI: 116199269 Blast Desc: conserved [Chaetomium globosum CBS 148.51] gi|88179069|gb|EAQ86537.1| conserved [Chaetomium globosum CBS 148.51]
  misc_feature (12)..(469): NCBI GI: 70998716 Blast Desc: D-3-phosphoglycerate dehydrogenase [Aspergillus fumigatus Af293] gi|66851716|gb|EAL92042.1| D-3-phosphoglycerate dehydrogenase [Aspergillus fumigatus Af293] D-3-phosphoglycerate
  misc_feature (19)..(469): SWISSPROT Homolog: EC 1.1.1.95 Phosphoglycerate dehydrogenase
  misc_feature: Useful for introducing or modulating the production of volatile compounds
MTQPQTILNIPQRDRDQSRKMSVSASPSATFQSPPSSLSGALAFGQAPPKQLKPFNTQDIKILLLENVNQSGQDILKSQGYQVEAHKASLPEDQLIEKIRDAHVIGIRSKTKLSEKVLREAKNLLVIGCFCIGTNQVDLEYAARHGIAVFNSPFANSRSVAELVIAEIISLARQLGDRSNEMHKGTWNKVSNKCWEIRGKTLGIVGYGHIGSQLSVLAEAMGMDVIYYDVVNLMAMGTARQVPTLKDLLNQADFVTLHVPELPETKNLISAAQMDEMKDGSYLINASRGTVIDIPALISSMRSGKIAGAALDVYPAEPRGNGDYFVNSLNGWEEDLRSLNNIILTPHIGGSTEEAQRAIGIEVGDALVRYINQGTTLGSVNMPEVNLRSVADGQPDYARIIFIHQNVPGVLRKVNEILGDHNVEKQISDSRGDYAYLMADVSNVQNSDLREILDSLEALSSRIATRVLY

SEQ ID NO: 14448 - DNA, 2160 bp, Muscodor strobelii
  misc_feature: SGI EST ID NO. CUFF.34366.0
  misc_feature: Variant of the nucleotide sequence at SEQ ID NO 14446
catcattctgccgcttaagctgctctgccggcaacgctcagaggtcgcaaatcgtttcatgaatagagcgcgtatagtcagactatgggtcggccctgacgaatcaggaagtttttctgctcgtcatatggcgggacgttaagaaacaaaagccaaaggcctcttcaaacgacaccctactgtccgaacaggagggaaaaaactattttccgtggaagttccaggctttgactcaagacaattgtgtcagtctccagaccatccgaccgaccggatccattctttagtaggcgcattgcgtgaactttacattggttcaaaaggcgtcttgcgtacgcctgtgcaaccctctccaaacgctgcaaacttttcgtggatttcgattgtttgttttcgaaccccaacagaaatcacgatgacgcaaccacagactatcctgaacatccctcagagggaccgggatcaatccagaaaaatgagcgtttctgcttcaccttcagccacattccagtccccgccatccagcttgagcggggcattggccttcggacaagcacctccaaagcagctgaagcctttcaatactcaggatatcaagatcttgcttcttgagaatgtgaaccagagtggacaggatattttaaagagccaagggtaccaggtcgaggctcataaggcatcgcttcctgaagatcagctcattgagaaaatccgtgatgcgcacgtcattggaattcggtcaaaaacaaaactgagcgagaaggttctccgcgaagcaaagaacttgctggtcattggctgcttctgtatcggtaccaatcaggtcgatctcgaatacgctgcccgccatggtatcgctgtgttcaattctccgtttgcaaactcccgcagtgtcgccgagctcgtcattgctgagatcatctcgctcgctcgccaacttggtgaccgctctaatgaaatgcacaagggcacatggaataaagtgagcaacaagtgctgggaaatccgtggcaagacgctgggtattgttggttatggtcacattggttctcagctttccgtactggctgaggccatgggtatggacgtcatttactatgatgtcgtcaatttgatggccatgggtactgctcgccaggttcccaccctcaaagacctcctgaaccaagcggatttcgtgactctccacgttcctgagctacccgagaccaagaacttgatttcagctgctcagatggacgagatgaaggatggctcttatttgatcaatgctagccgcgggacagtgattgacatcccggctctaatcagctccatgcgaagtggcaagatcgctggtgccgcattggatgtctacccagcggagccccgaggcaacggagactatttcgtcaacagtttaaacggatgggaggaggatcttcgcagcctaaacaacatcattctcacacctcatattggtggtagcaccgaagaggctcagagagctattggtatcgaagttggcgacgccctggtccgatacatcaaccagggcaccactcttggcagcgtcaatatgccagaagtcaacttgcgatcagtggcagacggacagcctgactacgctagaatcatcttcatccaccagaacgtacctggtgtcctgcgaaaagtcaacgagattctcggtgatcacaacgtcgagaagcagatctctgacagcagaggcgattacgcatacttgatggccgatgtgagcaatgtgcagaacagcgatcttagggagatcctggacagccttgaagcattgagctctcgtatcgcaacgcgtgtgttgtactagagtgtaacgatcactaagggatggattgccgcgttgagatcggcgtgagatgggaataagggcgtgagataaaaacaacaattatgcaatatgctcagaattcaacttagcattggagtatagaaggggattgaaataaggctgtacaggtagggagaaaaacatcggagttcaacattatacggacattattggaatggaaaaagcattgcgagtggattttttatgcgttgtgttgaggttttgagagatagatagaatgacacatctctgttactgtctcctgtgaagcaattattgaacagtccatgcttcgtggagcgagaacaagtgct

SEQ ID NO: 14449 - DNA, 798 bp, Muscodor strobelii
  misc_feature: SGI cDNA ID NO. 564761
  misc_feature: Encodes the peptide sequence at SEQ ID NO 14450
atggaacgtgaaaacttagtacataaagaccatggcgcttttggcgaatggcttgtcgcaagaggtgatatccagatcaaagtccctgacagagtcacagacgaggaggcagcgaccttaggtgtttccaccttcaccgtagctcaaagcctctatgacgtgctcgatttaccgctccctatatctcctgctaaaataccatatccgatccttatatacggcggaagcacagcaacgggcatatacggaatccagttcgccaaggcatcgggactgatggtagttgccactgcatcgccacacaatttcgaactagtgaggtcgttaggcgcagaggcagtttttgactacaagtcaagcacatgtgcagcggacattcgggcttacacgtcaaatcgactcacacttgcatgggattgcactggccatggtgctgccatatgtgctggtgcgctgagcgacgagctccccagcaagtattcgaccatcatacctgtatcggaggatagtctcaatagtatcaacaatttggtagacggcccaaacgcgacactcgcatatgagttgtctggcgaagacttctatcgcaaaggtaaggtgcatcaagccaatacccgcctctatggacacgccaagatgtttgtagagctcgtgcagggcctacttgaagatggcacgattcgcccactccatcctacagtgaattacggcgccgcaggactgaatggtgttctccaaggactcgactaccttaaagctggtaagatgagcggcggaaagcttgtctacagactataa

SEQ ID NO: 14450 - protein, 265 aa, Muscodor strobelii
  misc_feature: SGI Peptide ID NO. 564761
  misc_feature (70)..(147): Pfam Id: PF00107 Pfam Desc: Zinc-binding dehydrogenase
  misc_feature (5)..(265): NCBI GI: 242812056 Blast Desc: alcohol dehydrogenase, [Talaromyces stipitatus ATCC 10500] gi|218714219|gb|EED13642.1| alcohol dehydrogenase, [Talaromyces stipitatus ATCC 10500]
  misc_feature (5)..(265): NCBI GI: 238034194 Blast Desc: Alcohol dehydrogenase [Pichia pastoris]
  misc_feature (5)..(265): NCBI GI: 116196872 Blast Desc: CHGG_05034 [Chaetomium globosum CBS 148.51] gi|88180947|gb|EAQ88415.1| CHGG_05034 [Chaetomium globosum CBS 148.51]
  misc_feature (5)..(265): NCBI GI: 261357510 Blast Desc: TOXD [Verticillium albo-atrum VaMs.102]
  misc_feature (5)..(265): NCBI GI: 259483131 Blast Desc: TPA: oxidoreductase (Eurofung) [Aspergillus nidulans FGSC A4]
  misc_feature (5)..(265): NCBI GI: 154323390 Blast Desc: BC1G_00094 [Botryotinia fuckeliana B05.10] gi|150842323|gb|EDN17516.1| BC1G_00094 [Botryotinia fuckeliana B05.10]
  misc_feature (5)..(265): NCBI GI: 39940216 Blast Desc: MGG_05132 [Magnaporthe grisea 70-15] gi|145010612|gb|EDJ95268.1| MGG_05132 [Magnaporthe grisea 70-15]
  misc_feature (5)..(265): NCBI GI: 169766250 Blast Desc: [Aspergillus oryzae RIB40] gi|238482955|ref|XP_002372716.1| zinc-binding oxidoreductase ToxD, [Aspergillus flavus NRRL3357] gi|83765451|dbj|BAE55594.1|
  misc_feature (5)..(259): NCBI GI: 67903328 Blast Desc: AN8651.2 [Aspergillus nidulans FGSC A4] gi|40741495|gb|EAA60685.1| AN8651.2 [Aspergillus nidulans FGSC A4]
  misc_feature (5)..(265): NCBI GI: 156057887 Blast Desc: SS1G_04675 [Sclerotinia sclerotiorum 1980] gi|154702460|gb|EDO02199.1| SS1G_04675 [Sclerotinia sclerotiorum 1980]
MERENLVHKDHGAFGEWLVARGDIQIKVPDRVTDEEAATLGVSTFTVAQSLYDVLDLPLPISPAKIPYPILIYGGSTATGIYGIQFAKASGLMVVATASPHNFELVRSLGAEAVFDYKSSTCAADIRAYTSNRLTLAWDCTGHGAAICAGALSDELPSKYSTIIPVSEDSLNSINNLVDGPNATLAYELSGEDFYRKGKVHQANTRLYGHAKMFVELVQGLLEDGTIRPLHPTVNYGAAGLNGVLQGLDYLKAGKMSGGKLVYRL

SEQ ID NO: 14451 - DNA, 1257 bp, Muscodor strobelii
  misc_feature: SGI cDNA ID NO. 564762
  misc_feature: Encodes the peptide sequence at SEQ ID NO 14452
atgggcgtctataagtgcgacaagtgtggtaatgaacctgaggatctcgagccaaatctgttcagttgtggtgggtgcaaaatcgcgtcctactgcaatagaagttgccagagagcccattggcctcgccacaaactcaaatgcaaagatgatcaatggcgcgctgataaccagaaacgtggtgagacgcgagcaaaagagactgcaagacgcagcgagaagcagcaagaaattgtagagactaccggtgaaacgcgaagggcatggtccgatcgtcttgcagatcagaaccctgtagatgccagctggggtgatttccagcgaagggcaagaaagaggaagggcaaaccgattgagtaccgtcatcctgtattttcggctgaacaggtcgtgcggtttgattctagtagttcgcttgacgtcaataagcttaaaccaggaattgttcaaatcgaattcgccccgggattgcagttcacggatgaggatgtcgaagtcattaccaataccgacctgaatttccgatcagggctccgtgttttcattgccggagatccaaaacacttggatgcgaacgcggtcgcaatcgatatcacggacgcaggtgtcaagaaactttgccaggcctgtcctagccttcaagttgtgaagctcatgtccgcgcccaagcttggtggtagggcatttcctgagatcctcctgaattgtcccaccattgaagcggtaacgatctcggcgccaaaaggccgccgtgctggtccgaaggaaggcacatttttggaatggctcattgacagatcataccgcaaaacgctgcggtatttggagttccgcgggatatatggaacgggagatgatagaaggaaactggattttttaaccaaggtcagacctacattggaagtagtctttcaagatcggcggtaccccgccatcctcattcgagatatgagctgtgtagagctatcgaaagttccaaaacagacttccgagacagcggatgacgactcggagtgggaagatgaaagcgatgaagaggccagacaaaggcgaagagagaataccagagccctaaggcggttggggcatgagcaggcaatgcgctcagctttaggacgtgacttgtacgattttgagggggactttgactcgtctgatttaatggattctgatagcgatggtattgatgacgagcagtttgagatgcttagaggtattatggaagatatggacgaggcttgccaatctgattactag

SEQ ID NO: 14452 - protein, 418 aa, Muscodor strobelii
  misc_feature: SGI Peptide ID NO. 564762
  misc_feature (6)..(48): Pfam Id: PF01753 Pfam Desc: MYND finger
  misc_feature (5)..(49): NCBI GI: 159466200 Blast Desc: CHLREDRAFT_206145 [Chlamydomonas reinhardtii] gi|158279269|gb|EDP05030.1| [Chlamydomonas reinhardtii]
  misc_feature (18)..(73): NCBI GI: 238583309 Blast Desc: MPER_10561 [Moniliophthora perniciosa FA553] gi|215453342|gb|EEB91130.1| MPER_10561 [Moniliophthora perniciosa FA553]
  misc_feature (1)..(48): NCBI GI: 170090516 Blast Desc: [Laccaria bicolor S238N-H82] gi|164647973|gb|EDR12216.1| [Laccaria bicolor S238N-H82]
  misc_feature (1)..(49): NCBI GI: 169867726 Blast Desc: [Coprinopsis cinerea okayama7#130] gi|116498479|gb|EAU81374.1| [Coprinopsis cinerea okayama7#130]
  misc_feature (6)..(91): NCBI GI: 71834584 Blast Desc: SET and MYND domain containing 2b isoform 1 [Danio rerio] gi|56207492|emb|CAI20605.1| novel protein similar to vertebrate SET and MYND domain containing 2 (SYMD2) [Danio rerio]
  misc_feature (6)..(91): NCBI GI: 113674346 Blast Desc: SET and MYND domain containing 2b isoform 2 [Danio rerio] gi|95132413|gb|AAI16607.1| SET and MYND domain containing 2b [Danio rerio]
  misc_feature (6)..(91): NCBI GI: 113206685 Blast Desc: SET and MYND domain containing 2b [Danio rerio]
  misc_feature (1)..(48): NCBI GI: 170090518 Blast Desc: [Laccaria bicolor S238N-H82] gi|164647974|gb|EDR12217.1| [Laccaria bicolor S238N-H82]
  misc_feature (2)..(86): NCBI GI: 32140151 Blast Desc: TPA: TPA_exp: SET and MYND domain protein 2 [Takifugu rubripes]
  misc_feature (6)..(86): NCBI GI: 147905510 Blast Desc: MGC82991 protein [Xenopus laevis] gi|49115919|gb|AAH73650.1| MGC82991 protein [Xenopus laevis]
MGVYKCDKCGNEPEDLEPNLFSCGGCKIASYCNRSCQRAHWPRHKLKCKDDQWRADNQKRGETRAKETARRSEKQQEIVETTGETRRAWSDRLADQNPVDASWGDFQRRARKRKGKPIEYRHPVFSAEQVVRFDSSSSLDVNKLKPGIVQIEFAPGLQFTDEDVEVITNTDLNFRSGLRVFIAGDPKHLDANAVAIDITDAGVKKLCQACPSLQVVKLMSAPKLGGRAFPEILLNCPTIEAVTISAPKGRRAGPKEGTFLEWLIDRSYRKTLRYLEFRGIYGTGDDRRKLDFLTKVRPTLEVVFQDRRYPAILIRDMSCVELSKVPKQTSETADDDSEWEDESDEEARQRRRENTRALRRLGHEQAMRSALGRDLYDFEGDFDSSDLMDSDSDGIDDEQFEMLRGIMEDMDEACQSDY

SEQ ID NO: 14453 - DNA, 1516 bp, Muscodor strobelii
  misc_feature: SGI EST ID NO. CUFF.34396.0
  misc_feature: Variant of the nucleotide sequence at SEQ ID NO 14451
cgagagtgagaggtcgtatcactctccattgtgactcactgggcaatactaaacaagagagcaatcttagtatttcgtattacccagtaccaatccgcatcttcattcaacacttcacgatgggcgtctataagtgcgacaagtgtggtaatgaacctgaggatctcgagccaaatctgttcagttgtggtgggtgcaaaatcgcgtcctactgcaatagaagttgccagagagcccattggcctcgccacaaactcaaatgcaaagatgatcaatggcgcgctgataaccagaaacgtggtgagacgcgagcaaaagagactgcaagacgcagcgagaagcagcaagaaattgtagagactaccggtgaaacgcgaagggcatggtccgatcgtcttgcagatcagaaccctgtagatgccagctggggtgatttccagcgaagggcaagaaagaggaagggcaaaccgattgagtaccgtcatcctgtattttcggctgaacaggtcgtgcggtttgattctagtagttcgcttgacgtcaataagcttaaaccaggaattgttcaaatcgaattcgccccgggattgcagttcacggatgaggatgtcgaagtcattaccaataccgacctgaatttccgatcagggctccgtgttttcattgccggagatccaaaacacttggatgcgaacgcggtcgcaatcgatatcacggacgcaggtgtcaagaaactttgccaggcctgtcctagccttcaagttgtgaagctcatgtccgcgcccaagcttggtggtagggcatttcctgagatcctcctgaattgtcccaccattgaagcggtaacgatctcggcgccaaaaggccgccgtgctggtccgaaggaaggcacatttttggaatggctcattgacagatcataccgcaaaacgctgcggtatttggagttccgcgggatatatggaacgggagatgatagaaggaaactggattttttaaccaaggtcagacctacattggaagtagtctttcaagatcggcggtaccccgccatcctcattcgagatatgagctgtgtagagctatcgaaagttccaaaacagacttccgagacagcggatgacgactcggagtgggaagatgaaagcgatgaagaggccagacaaaggcgaagagagaataccagagccctaaggcggttggggcatgagcaggcaatgcgctcagctttaggacgtgacttgtacgattttgagggggactttgactcgtctgatttaatggattctgatagcgatggtattgatgacgagcagtttgagatgcttagaggtattatggaagatatggacgaggcttgccaatctgattactagtaagcttggccgcagtggagtgtgttcagtttaaaggtcaatagtgcgttccaaatgtataagggatagtttaattaaataagatagcagtaacgaacataatacacattaggtctgagctaaggcagatttaaaacgcg

SEQ ID NO: 14454 - DNA, 4731 bp, Muscodor strobelii
  misc_feature: SGI cDNA ID NO. 564763
  misc_feature: Reduced expression when VOC is produced
  misc_feature: Encodes the peptide sequence at SEQ ID NO 14455
atgtcgcacagctacgatgtcggcacgagggcctggcagcccgatgccaccgagggctgggtggcctctgaggttgtcaagaagaatgtcgatggtgataaggtcaccctgacctttaagttcgaaaacgaagagacaaaagacgtcgttgtctccttagacgcattacaaaatggcaacgactcgtcattaccgccgctcatgaacccggcaatgctcgaagccagcgatgatcttacgaacttgtcccatctgaatgaacctgccgttctgcaggctattcgactccgatacgcacagaaagagatatacacatatagtggtatagtgcttatagctacgaatccgttcgcgcgggtcgattctctctatgtcccgggcatggtacaggtatatgctggcaagcagagggaaactcaagcgccgcatctgttcgctatcgctgaagaagccttcatgaaaatgatcaaagatggccgaaaccagaccgttgtagtttccggtgagtcgggtgccggaaagacggtcagcgcaaagtatatcatgcgatacttcgccaccagagagtcgcctgataacccaggaggacggtccaaaaagggtgccgagtctatgagtgagacggaagagcagattctggctaccaatcccatcatggaagccttcggtaacgccaagacaacgcgtaacgataactcttctcgtttcggaaaatacatcgagatcatgttcgatgacaagagaaacattatcggagctcggatacgaacatacctcttggagcgatcgcgtttggtcttccagcctctgaaggagagaaactaccacattttctaccaattccttgctggcgcatcagacaaggagcggcaagaacttggcctgctcccggtggagcagttcgactacctcaaccaaggcaatgcgcccgtaatcgatggagttgacgacaaagctgagtacctggcaaccaaaagctcactgaagaccatcggtgtcgatgacgcccagcaaactggtatcttcaacctcctcgccggtcttctgcatcttggcaatgttaagatcactgcctcgcgaaccgacagtgtcctggcccccaccgagccgtcactcgagcgtgcttgtgcgattcttggaatcaacgcgacggattttgccaagtggattgtgaagaagcagcttgttacccgtggcgagaagattgtgtccaacttgacacaacaacaggctatcgtcgtccgtgactccgttgccaagtacatctactccagtctattcgactggctcgtggaaattatcaacaggagtcttgcgaccgacgcagtactgagtcgcgtcaactccttcattggtgttctggatatttacgggtttgagcattttgccaagaactctttcgagcagttttgtatcaactacgccaacgagaagctgcagcagcaattcaactcgcacgtcttcagactggaacaggaagaatatgtgcgcgagcaaatcgactggacttttatcgagttctccgataaccagccatgtatcgacctgattgagggcaagcttggtgttttgtcactactggacgaggagtcaaggctgcccatgggaaccgacgagcagttcgttaccaagctccaccacaatttcgccgcagacaagaacaagttttacaaaaagccacggttcggcaagtcggcatttactgtatgccactatgctgttgacgtgacctacgagtccgagggtttcatcgagaagaatagagacacggttcccgacgagcatatggaagtgctccgtgcttctacgaatggtttcctcaagcaggttctcagtgctgctggagctgtgcgtgagaaagatgctgcggcctcgtcctctgctgttgcaaagcctgctgcaggtaggaagatcggagtcgctgttaaccgcaagccgactcttggtggcatcttccgttcatctctcattgagcttatggccacgatcggcaacaccaatgtccactatatccgttgtatcaagcccaacgaagccaaggaagcctggaaattcgaaggccccatggtcttgagtcagcttcgtgcctgtggtgtacttgagactatccgcattagctgtgctggttacccaggtcgctggacatacgaagaatttgctctgcgatattacctgttaattccatccgccaaatggcagaccgagattcgacagcttgttaaggacatcttggctcaggctcttggttctctcactggtacaggtagcgacaactatcagttgggtttgaccaaaattttcttccgtgctggtatgttggcgcatctcgagaatcttcgtcagactcgcatgaccgaagctgccacgatgatccagaagaatcttagagctaaatactaccgtcgcaaatatctggaggctcgcgaatccatcattgtcttccagactttggcaagagctcatgccactcgagtcaaggcacaggaactccggactatcaaggcggctactactatccaaagggtatggagaggccagaaagagcgcaaagcatataccaaaatccgcaacaacatcattcttgctcaagccactgccaagggttatctactgcgaaagcagatcatggagacccgcgtgggcaatgctgcccgtctcatccagcgcgtctggcgatcaagacgagaactccgtgctttcagaaattaccgtaagaaggttgtgctcgttcagagcttgtggcgcggaaagacggcaaggaaggagtacaagaaactccgtgaggaggctcgtgatctgaaacagatttcgtacaagctcgaaaacaaggtcattgagttgacacaatcgctcggaaccatgaagtcgcagaacaaggcccttaccaaccaggtagagaactacgagaaccaaatcaaatcttggaagagcaggcacaacgctctcgagacccggtcaaaggagctgcaggccgaagcaaaccaagccggtatcgcagtggcgaagctccaagccatggaggaggacatgaagaaactacagcacaacttcgacgaatcaaacttgagcgtcaagaggatgcaagaggaggagagggagctgaaagagtctttgcgcaccgcaaatgccgagttggaacgggtgcagaaggagaccactcaccacatgaacgagaagtctacactcagggaacagcttgcccagatggccgacgaactagagctagcgagacgatctggtcctatcaacggcgagctcgtgaatggcaatggtgccacatcgctgccgaacggcttgatcaaccttgtgtcttctaagaagcctaagcgacgaagtgctggggccgagcccagcgtaatggaccgcttcagtgctgcttacaacccacgcccggtttcaatggccatcgccaccagcaatcatcgccctggtgccggtttcatcccaggagtagataccatagagatggagcttgagagccttttggccgacgaggaaggattgaacgaagaggtgaccatgggcctcatcaaaaatctcaagattccctcacccaacacgaacccgccgccttccgacaaagaggtccttttcccatcctatcttattaacctcgtgacgtccgagatgtggaataatggcttcgttaaggagtctgagaggttcttggccaacgtgatgcagtccatccaacaagaggttatgcaacatgatggtgaagacgctatcaaccctggcgctttctggctttccaacgttcacgagatgctttcattcgtgttccttgctgaagattggtacgaggcacagaagacggacaattatgagtacgaccgactactggaaattgttaagcacgatcttgagagtctggagttcaacatctaccacacctggatgaaaattctaaagaaaagattgcagaagatgatcattccagctatcatcgagtctcaatcgctgcccggcttcgtcacgaatgaaagtaatagattccttggcaagctgctgcagtctagctcagcccctgcatatagcatggacaacttactcagtcttctcaacaacgtctttagggctatgaaggcctattacctggaagactcgatcatcacacagacggttaccgagcttctgcgcctggtaggcgtcactgccttcaatgatctgctaatgcgacgaaacttcctttcttggaagcgtggcctccaaattaactacaatataactcgtattgaggaatggtgcaagagccacgacatgccagagggcacactgcagctcgagcatttgatgcaagcaacaaagcttctccagcttaagaaggcgaccttgaacgacatagagattatccaagacatttgctggatgctttcgcctaaccagattcagaagcttctgaaccaatacctcgttgccgactatgaacaacccatcaatggggagatcatgaaggctgtggcttctagagtcacggaaaagagcgacgtcctcttgctacaagctgtcgatatggatgatagcggcccatatgaaattgctgagccacgtgcgatcaccgcacttgagacgtacacgccatcatggttgcaaacgccgaggttgaagcgtctagcagagatagtgtctgcgcaggccattgcccagcaagaaaagctagatcttgaagagtacgatggcgagggcgatgaactcgcagaagttgaggaagttgaagccgatggtgcgtag

SEQ ID NO: 14455 - protein, 1576 aa, Muscodor strobelii
  misc_feature: SGI Peptide ID NO. 564763
  misc_feature (904)..(924): Pfam Id: PF00612 Pfam Desc: IQ calmodulin-binding motif
  misc_feature (833)..(853): Pfam Id: PF00612 Pfam Desc: IQ calmodulin-binding motif
  misc_feature (1373)..(1476): Pfam Id: PF01843 Pfam Desc: DIL domain
  misc_feature (76)..(769): Pfam Id: PF00063 Pfam Desc: Myosin head (motor domain)
  misc_feature (1)..(1558): NCBI GI: 115438556 Blast Desc: ATEG_09474 [Aspergillus terreus NIH2624] gi|114188911|gb|EAU30611.1| ATEG_09474 [Aspergillus terreus NIH2624]
  misc_feature (1)..(1557): NCBI GI: 145253895 Blast Desc: An17g02290 [Aspergillus niger] gi|134084036|emb|CAL00574.1| protein product [Aspergillus niger]
  misc_feature (1)..(1562): NCBI GI: 189190000 Blast Desc: myosin-2 [Pyrenophora tritici-repentis Pt-1C-BFP] gi|187972945|gb|EDU40444.1| myosin-2 [Pyrenophora tritici-repentis Pt-1C-BFP]
  misc_feature (1)..(1554): NCBI GI: 255943703 Blast Desc: Pc20g00570 [Penicillium chrysogenum Wisconsin 54-1255] gi|211587354|emb|CAP85386.1| Pc20g00570 [Penicillium chrysogenum Wisconsin 54-1255]
  misc_feature (72)..(1555): NCBI GI: 239613228 Blast Desc: class V myosin [Ajellomyces dermatitidis ER-3]
  misc_feature (72)..(1555): NCBI GI: 261190827 Blast Desc: class V myosin [Ajellomyces dermatitidis SLH14081] gi|239590866|gb|EEQ73447.1| class V myosin [Ajellomyces dermatitidis SLH14081]
  misc_feature (1)..(1553): NCBI GI: 169612581 Blast Desc: SNOG_09414 [Phaeosphaeria nodorum SN15] gi|160702539|gb|EAT83606.2| SNOG_09414 [Phaeosphaeria nodorum SN15]
  misc_feature (68)..(1557): NCBI GI: 238503400 Blast Desc: class V myosin (Myo4), [Aspergillus flavus NRRL3357] gi|220690404|gb|EED46753.1| class V myosin (Myo4), [Aspergillus flavus NRRL3357]
  misc_feature (1)..(1432): NCBI GI: 164429324 Blast Desc: NCU11354 [Neurospora crassa OR74A] gi|157073436|gb|EDO65437.1| NCU11354 [Neurospora crassa OR74A]
  misc_feature (155)..(1528): NCBI GI: 70998708 Blast Desc: class V myosin (Myo4) [Aspergillus fumigatus Af293] gi|66851712|gb|EAL92038.1| class V myosin (Myo4), [Aspergillus fumigatus Af293] gi|159126190|gb|EDP51306.1| class V myosin
  misc_feature (77)..(850): SWISSPROT Homolog: EC 2.7.11.1 Non-specific serine/threonine protein kinase
  misc_feature: Useful for introducing or modulating the production of volatile compounds
MSHSYDVGTRAWQPDATEGWVASEVVKKNVDGDKVTLTFKFENEETKDVVVSLDALQNGNDSSLPPLMNPAMLEASDDLTNLSHLNEPAVLQAIRLRYAQKEIYTYSGIVLIATNPFARVDSLYVPGMVQVYAGKQRETQAPHLFAIAEEAFMKMIKDGRNQTVVVSGESGAGKTVSAKYIMRYFATRESPDNPGGRSKKGAESMSETEEQILATNPIMEAFGNAKTTRNDNSSRFGKYIEIMFDDKRNIIGARIRTYLLERSRLVFQPLKERNYHIFYQFLAGASDKERQELGLLPVEQFDYLNQGNAPVIDGVDDKAEYLATKSSLKTIGVDDAQQTGIFNLLAGLLHLGNVKITASRTDSVLAPTEPSLERACAILGINATDFAKWIVKKQLVTRGEKIVSNLTQQQAIVVRDSVAKYIYSSLFDWLVEIINRSLATDAVLSRVNSFIGVLDIYGFEHFAKNSFEQFCINYANEKLQQQFNSHVFRLEQEEYVREQIDWTFIEFSDNQPCIDLIEGKLGVLSLLDEESRLPMGTDEQFVTKLHHNFAADKNKFYKKPRFGKSAFTVCHYAVDVTYESEGFIEKNRDTVPDEHMEVLRASTNGFLKQVLSAAGAVREKDAAASSSAVAKPAAGRKIGVAVNRKPTLGGIFRSSLIELMATIGNTNVHYIRCIKPNEAKEAWKFEGPMVLSQLRACGVLETIRISCAGYPGRWTYEEFALRYYLLIPSAKWQTEIRQLVKDILAQALGSLTGTGSDNYQLGLTKIFFRAGMLAHLENLRQTRMTEAATMIQKNLRAKYYRRKYLEARESIIVFQTLARAHATRVKAQELRTIKAATTIQRVWRGQKERKAYTKIRNNIILAQATAKGYLLRKQIMETRVGNAARLIQRVWRSRRELRAFRNYRKKVVLVQSLWRGKTARKEYKKLREEARDLKQISYKLENKVIELTQSLGTMKSQNKALTNQVENYENQIKSWKSRHNALETRSKELQAEANQAGIAVAKLQAMEEDMKKLQHNFDESNLSVKRMQEEERELKESLRTANAELERVQKETTHHMNEKSTLREQLAQMADELELARRSGPINGELVNGNGATSLPNGLINLVSSKKPKRRSAGAEPSVMDRFSAAYNPRPVSMAIATSNHRPGAGFIPGVDTIEMELESLLADEEGLNEEVTMGLIKNLKIPSPNTNPPPSDKEVLFPSYLINLVTSEMWNNGFVKESERFLANVMQSIQQEVMQHDGEDAINPGAFWLSNVHEMLSFVFLAEDWYEAQKTDNYEYDRLLEIVKHDLESLEFNIYHTWMKILKKRLQKMIIPAIIESQSLPGFVTNESNRFLGKLLQSSSAPAYSMDNLLSLLNNVFRAMKAYYLEDSIITQTVTELLRLVGVTAFNDLLMRRNFLSWKRGLQINYNITRIEEWCKSHDMPEGTLQLEHLMQATKLLQLKKATLNDIEIIQDICWMLSPNQIQKLLNQYLVADYEQPINGEIMKAVASRVTEKSDVLLLQAVDMDDSGPYEIAEPRAITALETYTPSWLQTPRLKRLAEIVSAQAIAQQEKLDLEEYDGEGDELAEVEEVEADGA

SEQ ID NO: 14456 - DNA, 5815 bp, Muscodor strobelii
  misc_feature: SGI EST ID NO. CUFF.34412.0
  misc_feature: Variant of the nucleotide sequence at SEQ ID NO 14454
gctcctccccgaaggctggaaaggcaagcgtatgtccagccagaatctcagcgtccagcattgatctgtcaccgccaacattttgcattttgcaccgtcgacacgcatccccagcctccattgttgtcctgtgctctttaatcagcaagacgtccctttctgtctctgcctgtcactagataccctcttttgtctccttcgcacactgccggacgagacttttacaacaccaccggcgacctgttgtctgctgtctgctgtctgctgtctgctgcatgactctcctttcagcagatacctcctgaacaccataccatcgtcacctccttcgccgtgtctcctcccaccgcctgcccacgaatgtcttccacactggcttgcctgtaactcccctgccgacctctcccatccttgcgacgcgccgcccttgattataccctctatttccgtgttctgcacgcccgaaaccgcctcccatgtcgcacagctacgatgtcggcacgagggcctggcagcccgatgccaccgagggctgggtggcctctgaggttgtcaagaagaatgtcgatggtgataaggtcaccctgacctttaagttcgaaaacgaagagacaaaagacgtcgttgtctccttagacgcattacaaaatggcaacgactcgtcattaccgccgctcatgaacccggcaatgctcgaagccagcgatgatcttacgaacttgtcccatctgaatgaacctgccgttctgcaggctattcgactccgatacgcacagaaagagatatacacatatagtggtatagtgcttatagctacgaatccgttcgcgcgggtcgattctctctatgtcccgggcatggtacaggtatatgctggcaagcagagggaaactcaagcgccgcatctgttcgctatcgctgaagaagccttcatgaaaatgatcaaagatggccgaaaccagaccgttgtagtttccggtgagtcgggtgccggaaagacggtcagcgcaaagtatatcatgcgatacttcgccaccagagagtcgcctgataacccaggaggacggtccaaaaagggtgccgagtctatgagtgagacggaagagcagattctggctaccaatcccatcatggaagccttcggtaacgccaagacaacgcgtaacgataactcttctcgtttcggaaaatacatcgagatcatgttcgatgacaagagaaacattatcggagctcggatacgaacatacctcttggagcgatcgcgtttggtcttccagcctctgaaggagagaaactaccacattttctaccaattccttgctggcgcatcagacaaggagcggcaagaacttggcctgctcccggtggagcagttcgactacctcaaccaaggcaatgcgcccgtaatcgatggagttgacgacaaagctgagtacctggcaaccaaaagctcactgaagaccatcggtgtcgatgacgcccagcaaactggtatcttcaacctcctcgccggtcttctgcatcttggcaatgttaagatcactgcctcgcgaaccgacagtgtcctggcccccaccgagccgtcactcgagcgtgcttgtgcgattcttggaatcaacgcgacggattttgccaagtggattgtgaagaagcagcttgttacccgtggcgagaagattgtgtccaacttgacacaacaacaggctatcgtcgtccgtgactccgttgccaagtacatctactccagtctattcgactggctcgtggaaattatcaacaggagtcttgcgaccgacgcagtactgagtcgcgtcaactccttcattggtgttctggatatttacgggtttgagcattttgccaagaactctttcgagcagttttgtatcaactacgccaacgagaagctgcagcagcaattcaactcgcacgtcttcagactggaacaggaagaatatgtgcgcgagcaaatcgactggacttttatcgagttctccgataaccagccatgtatcgacctgattgagggcaagcttggtgttttgtcactactggacgaggagtcaaggctgcccatgggaaccgacgagcagttcgttaccaagctccaccacaatttcgccgcagacaagaacaagttttacaaaaagccacggttcggcaagtcggcatttactgtatgccactatgctgttgacgtgacctacgagtccgagggtttcatcgagaagaatagagacacggttcccgacgagcatatggaagtgctccgtgcttctacgaatggtttcctcaagcaggttctcagtgctgctggagctgtgcgtgagaaagatgctgcggcctcgtcctctgctgttgcaaagcctgctgcaggtaggaagatcggagtcgctgttaaccgcaagccgactcttggtggcatcttccgttcatctctcattgagcttatggccacgatcggcaacaccaatgtccactatatccgttgtatcaagcccaacgaagccaaggaagcctggaaattcgaaggccccatggtcttgagtcagcttcgtgcctgtggtgtacttgagactatccgcattagctgtgctggttacccaggtcgctggacatacgaagaatttgctctgcgatattacctgttaattccatccgccaaatggcagaccgagattcgacagcttgttaaggacatcttggctcaggctcttggttctctcactggtacaggtagcgacaactatcagttgggtttgaccaaaattttcttccgtgctggtatgttggcgcatctcgagaatcttcgtcagactcgcatgaccgaagctgccacgatgatccagaagaatcttagagctaaatactaccgtcgcaaatatctggaggctcgcgaatccatcattgtcttccagactttggcaagagctcatgccactcgagtcaaggcacaggaactccggactatcaaggcggctactactatccaaagggtatggagaggccagaaagagcgcaaagcatataccaaaatccgcaacaacatcattcttgctcaagccactgccaagggttatctactgcgaaagcagatcatggagacccgcgtgggcaatgctgcccgtctcatccagcgcgtctggcgatcaagacgagaactccgtgctttcagaaattaccgtaagaaggttgtgctcgttcagagcttgtggcgcggaaagacggcaaggaaggagtacaagaaactccgtgaggaggctcgtgatctgaaacagatttcgtacaagctcgaaaacaaggtcattgagttgacacaatcgctcggaaccatgaagtcgcagaacaaggcccttaccaaccaggtagagaactacgagaaccaaatcaaatcttggaagagcaggcacaacgctctcgagacccggtcaaaggagctgcaggccgaagcaaaccaagccggtatcgcagtggcgaagctccaagccatggaggaggacatgaagaaactacagcacaacttcgacgaatcaaacttgagcgtcaagaggatgcaagaggaggagagggagctgaaagagtctttgcgcaccgcaaatgccgagttggaacgggtgcagaaggagaccactcaccacatgaacgagaagtctacactcagggaacagcttgcccagatggccgacgaactagagctagcgagacgatctggtcctatcaacggcgagctcgtgaatggcaatggtgccacatcgctgccgaacggcttgatcaaccttgtgtcttctaagaagcctaagcgacgaagtgctggggccgagcccagcgtaatggaccgcttcagtgctgcttacaacccacgcccggtttcaatggccatcgccaccagcaatcatcgccctggtgccggtttcatcccaggagtagataccatagagatggagcttgagagccttttggccgacgaggaaggattgaacgaagaggtgaccatgggcctcatcaaaaatctcaagattccctcacccaacacgaacccgccgccttccgacaaagaggtccttttcccatcctatcttattaacctcgtgacgtccgagatgtggaataatggcttcgttaaggagtctgagaggttcttggccaacgtgatgcagtccatccaacaagaggttatgcaacatgatggtgaagacgctatcaaccctggcgctttctggctttccaacgttcacgagatgctttcattcgtgttccttgctgaagattggtacgaggcacagaagacggacaattatgagtacgaccgactactggaaattgttaagcacgatcttgagagtctggagttcaacatctaccacacctggatgaaaattctaaagaaaagattgcagaagatgatcattccagctatcatcgagtctcaatcgctgcccggcttcgtcacgaatgaaagtaatagattccttggcaagctgctgcagtctagctcagcccctgcatatagcatggacaacttactcagtcttctcaacaacgtctttagggctatgaaggcctattacctggaagactcgatcatcacacagacggttaccgagcttctgcgcctggtaggcgtcactgccttcaatgatctgctaatgcgacgaaacttcctttcttggaagcgtggcctccaaattaactacaatataactcgtattgaggaatggtgcaagagccacgacatgccagagggcacactgcagctcgagcatttgatgcaagcaacaaagcttctccagcttaagaaggcgaccttgaacgacatagagattatccaagacatttgctggatgctttcgcctaaccagattcagaagcttctgaaccaatacctcgttgccgactatgaacaacccatcaatggggagatcatgaaggctgtggcttctagagtcacggaaaagagcgacgtcctcttgctacaagctgtcgatatggatgatagcggcccatatgaaattgctgagccacgtgcgatcaccgcacttgagacgtacacgccatcatggttgcaaacgccgaggttgaagcgtctagcagagatagtgtctgcgcaggccattgcccagcaagaaaagctagatcttgaagagtacgatggcgagggcgatgaactcgcagaagttgaggaagttgaagccgatggtgcgtagggccgcactttgacaacagtacttccgagctacaatcaccaaacgatacgaatcgcataataccacacacaagcatacatttgcatataattaacgatagacgcgtggattgtgggaagggatgagggtatagtgacgacgaccggaattattctaagggctagctttgcggacatgagtggacagcaaggcatcgccatcatacgagagatgctgcctcgttcgtgtttgaatggatatcaagaacatgattgaactagaaagcttcctacgcaatccatgggacggggcgttttgaaagctggtggcttatgtttcctccactttgctctgacaggtcgtgaaggtcattgtttggagacctcgcctatctggtgcaaggagcaagacaggaagaaaataaagccaatagtgtatcaaaagatggacggcaatcaatatcttgtagtatctatctgtaaagagcctgtacatgaggagaagagacaaagaagagagagggaaactcatagcctacagagatcaggtagacgaatcgaaatgtttgtcgccgctggcttgatttgacatcagtcaacatcgtgcgggaggtgaacccctgaacaaca

SEQ ID NO: 14457 - DNA, 540 bp, Muscodor strobelii
  misc_feature: SGI cDNA ID NO. 564764
  misc_feature: Encodes the peptide sequence at SEQ ID NO 14458
atggcgcgaacaagccccaacatcgtcataacaggcacaccgggtgcaggcaaaacgacgcattgcgagacgctggctgagcgcacgggactgcgccatgtatctgtgaatcagattgtcaaggataagcagtgtcatgaaggttgggatgaggagtatcagagttgggttgttgatgaggataagttacttgatgccatggaggacgaggttgaggccggcggctgcgtaatcgactggcatgcttgcgacttgttcccggaacgttggatcgatcttgttgttgttttgagggtcgatactagtacgctgtatgaccggttaaaggagagaaaatatcccgaagcaaaactccaagagaacttagactcagagatcatggaggtattactacaagaggcgcgggattcatacgatgagcgcattgtagttgagctgaagagtaacacgacggatgatatggacagcaatgtggaccgagttgaggcttggttgacgcagtggaagaaggacaatccgccagagggtgacgctgaatga

SEQ ID NO: 14458 - protein, 179 aa, Muscodor strobelii
  misc_feature: SGI Peptide ID NO. 564764
  misc_feature (3)..(172): NCBI GI: 46126185 Blast Desc: FG07470.1 [Gibberella zeae PH-1]
  misc_feature (1)..(174): NCBI GI: 116199273 Blast Desc: CHGG_07792 [Chaetomium globosum CBS 148.51] gi|88179071|gb|EAQ86539.1| CHGG_07792 [Chaetomium globosum CBS 148.51]
  misc_feature (3)..(172): NCBI GI: 39978075 Blast Desc: MGG_06922 [Magnaporthe grisea 70-15] gi|145013508|gb|EDJ98149.1| MGG_06922 [Magnaporthe grisea 70-15]
  misc_feature (3)..(172): NCBI GI: 156064403 Blast Desc: SS1G_00209 [Sclerotinia sclerotiorum 1980] gi|154691071|gb|EDN90809.1| SS1G_00209 [Sclerotinia sclerotiorum 1980]
  misc_feature (1)..(172): NCBI GI: 261351478 Blast Desc: POS9-activating factor FAP7 [Verticillium albo-atrum VaMs.102]
  misc_feature (1)..(172): NCBI GI: 164429328 Blast Desc: NCU10220 [Neurospora crassa OR74A] gi|157073438|gb|EDO65439.1| NCU10220 [Neurospora crassa OR74A]
  misc_feature (3)..(172): NCBI GI: 154312094 Blast Desc: BC1G_06080 [Botryotinia fuckeliana B05.10] gi|150850043|gb|EDN25236.1| BC1G_06080 [Botryotinia fuckeliana B05.10]
  misc_feature (1)..(178): NCBI GI: 169612593 Blast Desc: SNOG_09420 [Phaeosphaeria nodorum SN15] gi|111062492|gb|EAT83612.1| SNOG_09420 [Phaeosphaeria nodorum SN15]
  misc_feature (1)..(172): NCBI GI: 171692763 Blast Desc: protein product [Podospora anserina] gi|170946330|emb|CAP73131.1| protein product [Podospora anserina]
  misc_feature (3)..(170): NCBI GI: 240277331 Blast Desc: DUF1671 domain-containing protein [Ajellomyces capsulatus H143]
  misc_feature (3)..(173): SWISSPROT Homolog: EC 2.7.4.3 Adenylate kinase
MARTSPNIVITGTPGAGKTTHCETLAERTGLRHVSVNQIVKDKQCHEGWDEEYQSWVVDEDKLLDAMEDEVEAGGCVIDWHACDLFPERWIDLVVVLRVDTSTLYDRLKERKYPEAKLQENLDSEIMEVLLQEARDSYDERIVVELKSNTTDDMDSNVDRVEAWLTQWKKDNPPEGDAE

SEQ ID NO: 14459 - DNA, 1249 bp, Muscodor strobelii
  misc_feature: SGI EST ID NO. CUFF.34481.0
  misc_feature: Variant of the nucleotide sequence at SEQ ID NO 14457
cttcaagcctaattgctgcatttttttcaagatcggcttcagaatcattcgctcgctgtcgcaatagaaatatctagctggatatttcgtaaacgacgctatctgcgcggcaaccaagttcattctaatcagcgaccagtcaaagtacgagaggcctaagaaaccatttcggacaatatttggacccctgcgaattgctgagaagagatactcaatcctacaagatcttacgatcgttctctcactggaggcgggacagaacaggcgcatacagaaatctttcactgaatcaatcatttcagcgaactgacaggagacgccgcatttcactacatacatacctacatttcaccccggaaacaacaaaaacacagatggcgcgaacaagccccaacatcgtcataacaggcacaccgggtgcaggcaaaacgacgcattgcgagacgctggctgagcgcacgggactgcgccatgtatctgtgaatcagattgtcaaggataagcagtgtcatgaaggttgggatgaggagtatcagagttgggttgttgatgaggataaggtttgttttattcccctttcccaacttgtgtttagggcggtgaaggagagtgaggtgaaagtttgtgagatggtgatggggatggatgagaagtggcacaagcgcgtatcgacgtatagacggtgttgggttggatcggaattgaagctgatggtgatatcacaatctagttacttgatgccatggaggacgaggttgaggccggcggctgcgtaatcgactggcatgcttgcgacttgttcccggaacgttggatcgatcttgttgttgttttgagggtcgatactagtacgctgtatgaccggttaaaggagagaaaatatcccgaagcaaaactccaagagaacttagactcagagatcatggaggtattactacaagaggcgcgggattcatacgatgagcgcattgtagttgagctgaagagtaacacgacggatgatatggacagcaatgtggaccgagttgaggcttggttgacgcagtggaagaaggacaatccgccagagggtgacgctgaatgagaatttacgtgatggccattgagcttggagtttgaggaatagacaaaacaaaacggatgtctaatgcgtaacggtcgtttgacgatgtctaacttgctgcaacgtttggtgaaagtgaaaacgaaccaaacacaccatacttcgtgagaaataccaagaagcaaa

SEQ ID NO: 14460 - DNA, 558 bp, Muscodor strobelii
  misc_feature: SGI cDNA ID NO. 564765
  misc_feature: Elevated expression when VOC is produced
  misc_feature: Encodes the peptide sequence at SEQ ID NO 14461
atggcagagctaaatttcataacgggcaacgccaacaaactagcagaggtccaagcaatcctctcaccgacaggcatagcgatgcgaaaccaatccctagatctcccagaaatccagggatcagtcgaagacgtgacgcgcgagaagtgcaaagtcgccgctgaaatcgtgggcggacctgtgctcgtggaggatacatgcttgtgcttcaatgcgttgaagggactgcctggaccttatgtgaaatggttcatgtccaccatcggacacgaaggcctaaacaacatgctcgcagcctacgaagacaaatccgcacaagccgtcgcaacattcggcttctgcaaaggaccagggcaggaaatcttacttttccaaggacggacagacggcaagatcgtacccgcaagaggcccagcatacttcggctgggatgcaatcttcgagtatgaaggccagacctacgcggaaatggataaggcggcgaaaaacaagatctcgcaccgctataaggctctcgagaagctgcgagagtggattgagagcgggggcatgaactaa

SEQ ID NO: 14461 - protein, 185 aa, Muscodor strobelii
  misc_feature: SGI Peptide ID NO. 564765
  misc_feature (4)..(179): Pfam Id: PF01725 Pfam Desc: Ham1 family
  misc_feature (4)..(179): NCBI GI: 85077062 Blast Desc: NCU01441 [Neurospora crassa OR74A] gi|28917000|gb|EAA26727.1| NCU01441 [Neurospora crassa OR74A] gi|28950354|emb|CAD70978.1| inosine triphosphate pyrophosphatase
  misc_feature (4)..(179): NCBI GI: 116199275 Blast Desc: conserved [Chaetomium globosum CBS 148.51] gi|88179072|gb|EAQ86540.1| conserved [Chaetomium globosum CBS 148.51]
  misc_feature (4)..(179): NCBI GI: 39978053 Blast Desc: MGG_06911 [Magnaporthe grisea 70-15] gi|145013520|gb|EDJ98161.1| MGG_06911 [Magnaporthe grisea 70-15]
  misc_feature (3)..(179): NCBI GI: 171692757 Blast Desc: protein product [Podospora anserina] gi|170946327|emb|CAP73128.1| protein product [Podospora anserina]
  misc_feature (1)..(179): NCBI GI: 240109364 Blast Desc: inosine triphosphate pyrophosphatase, [Coccidioides posadasii C735 delta SOWgp]
  misc_feature (3)..(181): NCBI GI: 46126187 Blast Desc: FG07471.1 [Gibberella zeae PH-1]
  misc_feature (3)..(180): NCBI GI: 256731254 Blast Desc: [Nectria haematococca mpVI 77-13-4]
  misc_feature (2)..(179): NCBI GI: 169612595 Blast Desc: SNOG_09421 [Phaeosphaeria nodorum SN15] gi|160702542|gb|EAT83613.2| SNOG_09421 [Phaeosphaeria nodorum SN15]
  misc_feature (1)..(179): NCBI GI: 238839459 Blast Desc: inosine triphosphate pyrophosphatase [Microsporum canis CBS 113480]
  misc_feature (1)..(179): NCBI GI: 242794600 Blast Desc: non-canonical purine NTP pyrophosphatase, rdgB/HAM1 family [Talaromyces stipitatus ATCC 10500] gi|218718996|gb|EED18416.1| non-canonical purine NTP rdgB/HAM1
  misc_feature (6)..(183): SWISSPROT Homolog: EC 3.6.1.19 Nucleoside-triphosphate diphosphatase
  misc_feature: Useful for introducing or modulating the production of volatile compounds
MAELNFITGNANKLAEVQAILSPTGIAMRNQSLDLPEIQGSVEDVTREKCKVAAEIVGGPVLVEDTCLCFNALKGLPGPYVKWFMSTIGHEGLNNMLAAYEDKSAQAVATFGFCKGPGQEILLFQGRTDGKIVPARGPAYFGWDAIFEYEGQTYAEMDKAAKNKISHRYKALEKLREWIESGGMN

SEQ ID NO: 14462 - DNA, 1989 bp, Muscodor strobelii
  misc_feature: SGI EST ID NO. CUFF.34890.0
  misc_feature: Variant of the nucleotide sequence at SEQ ID NO 14460
tagtgctccgcctcagggccaagaccttgccggtgaatgctcccgacctcgcagcacgccgataggctcaggcaggctttgtaatcccggatgcgtcaactcgccgctgcatgtattattcaacaccaagggcgacagcaagcttggaaatgctaaacgtagtaggaaagcaaagtttttgtatcgcgttgagagttatataagaagaagatgaatgacgatgaagttcttgtattgaataccatattcactagactacctaactcagcataccaacaatttcgcactccatactccacaaaaccgcaccatactataactgacagcattttatacaaacacagcaactaaaacctccgcatcgcatactgcattccagcaaacaagcataaccattacatcgcccttccgccctatacctacttctcaccccattccacatcaaacttcaccacaccccatatcatcactcatacaaacaaactccacaatggcagagctaaatttcataacgggcaacgccaacaaactagcagaggtccaagcaatcctctcaccgacaggcatagcgatgcgaaaccaatccctagatctcccagaaatccagggatcagtcgaagacgtgacgcgcgagaagtgcaaagtcgccgctgaaatcgtgggcggacctgtgctcgtggaggatacatgcttgtgcttcaatgcgttgaagggactgcctggaccttatgtgaaatggttcatgtccaccatcggacacgaaggcctaaacaacatgctcgcagcctacgaagacaaatccgcacaagccgtcgcaacattcggcttctgcaaaggaccagggcaggaaatcttacttttccaaggacggacagacggcaagatcgtacccgcaagaggcccagcatacttcggctgggatgcaatcttcgagtatgaaggccagacctacgcggaaatggataaggcggcgaaaaacaagatctcgcaccgctataaggctctcgagaagctgcgagagtggattgagagcgggggcatgaactaaatcgcaagaacagaaaaagcatcaatgggagtttcggggtagaggaaacactccttgttttgtttttttaatgagaggccatcgcagcggaaaataaagagcataactgttcttcagtgcatcacttagagctaggcggcatcatacacacaaaatgatagaaaaattggactggatttggtgctgcatcagcaatgcatcatgagtacgatgatatacgctctaataaaacaatcatcctcgctagtaatgcctacgcaatgctaatcttcagctcaataacgccaataacatgctcggctaggacttcataatgtctttttactctcgacctttttctccatgtccataaaaggacaaacgccttctcacatcatggtccgaaagagctcaacttgtcaagctgtactagtcttcaatctgaggaaaggtcaataaagaatgtcatgccgtaaagcagtcaggcacaggcaagtcaagttctcacagcgaatgaatactagataacttactttagaatctcaaactcgtgatatttcttgaggtacttattacccctccgatacaggttcaaggcattatcgggatcgcgatgcaagaaccacttgttgttctcgttcccgccactgcgcgccgtacctttgtcacctactaatcgcgttacgcctttgggatcgtgaaacatgggatcgaagacgaggagttccagagctccggtcttgagccgctcaaggccgacaatagtcaagctatggccacgatgttgaaagtagattggtgggagatttgtatgccggactttgtcttcagggtcgtacggtacgctctggaagtatttctgtatggcgacgaagaggttggcttctgcaacgcccttttgtgttgatttgaagccttgagcttcgcatctaaatattaacattatgtaattagcgaggcca

SEQ ID NO: 14463 - DNA, 1374 bp, Muscodor strobelii
  misc_feature: SGI cDNA ID NO. 564766
  misc_feature: Encodes the peptide sequence at SEQ ID NO 14464
atgattacagcgagcgaaatgtctcattcggaaagtgggaggacttgtcccttttgcggcatcaagacagacggagagtatgcgatcctacttcacatagaagagaaccatgccgaaggtaaatccccattcgttgcagacgtaaatatcaatgcggacagtgaggacgggcactttactcatgaccgggaagaggaaatcaacgaagaagagcaatttgcagaatgccccgtcgagggatgccatgagcgcattgctctagttgagctagaggatcatatcaattttcacgcgatagaggaacatgaagaatctcctgcgcccgccacatcaggctcgtcttctagtcctgacggcgaaggagaatatcgttctccatatgcgcacaatggggatgtgcgtcgtcgaaatgagagcgataggagaacgcgggaccattccgtaatagatgcgtggaaagaaattttcaaaagaccgccacccagcaaatccactaagataccccaattgccggggatgcggaaacgacttggtaaatccgagctcggcagattcgcgcatgaagaaaagatgccagattggctggtggatttactagtaaagggcaaatataagagcagcgagggtattgtgccagtgctcgggaaattattagagcagagtgcgacaacggaatatgcatggttatgtcatcctgctgtccatcatgtctcaaaactgcctagagaaggcggcttctgcgggtatcgaaacatacagatgctctcatcctacctcataggagccaatatcacaggcgtagagaccattgggcctgagattcctagtatcttccagatacaagattacatcgagaatgcatgggacatggggatcaacacctccggacggatagaaactggaggagtcagaggaacgcgaaaatatatcggtacccccgaggcccaagctatgttcaccgttcttcaaataccatgcgaagctcaaggcttcaaatcaacacaaaagggcgttgcagaagccaacctcttcgtcgccatacagaaatacttccagagcgtaccgtacgaccctgaagacaaagtccggcatacaaatctcccaccaatctactttcaacatcgtggccatagcttgactattgtcggccttgagcggctcaagaccggagctctggaactcctcgtcttcgatcccatgtttcacgatcccaaaggcgtaacgcgattagtaggtgacaaaggtacggcgcgcagtggcgggaacgagaacaacaagtggttcttgcatcgcgatcccgataatgccttgaacctgtatcggaggggtaataagtacctcaagaaatatcacgagtttgagattctaaagtaa

SEQ ID NO: 14464 - protein, 457 aa, Muscodor strobelii
  misc_feature: SGI Peptide ID NO. 564766
  misc_feature (223)..(456): Pfam Id: PF07910 Pfam Desc: Peptidase family C78
  misc_feature (16)..(456): NCBI GI: 154312116 Blast Desc: BC1G_06091 [Botryotinia fuckeliana B05.10] gi|150850054|gb|EDN25247.1| BC1G_06091 [Botryotinia fuckeliana B05.10]
  misc_feature (174)..(457): NCBI GI: 145605714 Blast Desc: MGG_06912 [Magnaporthe grisea 70-15] gi|145013519|gb|EDJ98160.1| MGG_06912 [Magnaporthe grisea 70-15]
  misc_feature (30)..(457): NCBI GI: 164429330 Blast Desc: NCU01442 [Neurospora crassa OR74A] gi|157073439|gb|EAA26728.2| [Neurospora crassa OR74A]
  misc_feature (30)..(456): NCBI GI: 28950355 Blast Desc: conserved [Neurospora crassa]
  misc_feature (33)..(457): NCBI GI: 156064381 Blast Desc: SS1G_00198 [Sclerotinia sclerotiorum 1980] gi|154691060|gb|EDN90798.1| SS1G_00198 [Sclerotinia sclerotiorum 1980]
  misc_feature (28)..(457): NCBI GI: 116199277 Blast Desc: CHGG_07794 [Chaetomium globosum CBS 148.51] gi|88179073|gb|EAQ86541.1| CHGG_07794 [Chaetomium globosum CBS 148.51]
  misc_feature (7)..(456): NCBI GI: 256730881 Blast Desc: NECHADRAFT_84553 [Nectria haematococca mpVI 77-13-4]
  misc_feature (16)..(456): NCBI GI: 46126189 Blast Desc: FG07472.1 [Gibberella zeae PH-1]
  misc_feature (9)..(457): NCBI GI: 240109366 Blast Desc: CPC735_028710 [Coccidioides posadasii C735 delta SOWgp]
  misc_feature (15)..(457): NCBI GI: 115438544 Blast Desc: [Aspergillus terreus NIH2624] gi|114188908|gb|EAU30608.1| [Aspergillus terreus NIH2624]
MITASEMSHSESGRTCPFCGIKTDGEYAILLHIEENHAEGKSPFVADVNINADSEDGHFTHDREEEINEEEQFAECPVEGCHERIALVELEDHINFHAIEEHEESPAPATSGSSSSPDGEGEYRSPYAHNGDVRRRNESDRRTRDHSVIDAWKEIFKRPPPSKSTKIPQLPGMRKRLGKSELGRFAHEEKMPDWLVDLLVKGKYKSSEGIVPVLGKLLEQSATTEYAWLCHPAVHHVSKLPREGGFCGYRNIQMLSSYLIGANITGVETIGPEIPSIFQIQDYIENAWDMGINTSGRIETGGVRGTRKYIGTPEAQAMFTVLQIPCEAQGFKSTQKGVAEANLFVAIQKYFQSVPYDPEDKVRHTNLPPIYFQHRGHSLTIVGLERLKTGALELLVFDPMFHDPKGVTRLVGDKGTARSGGNENNKWFLHRDPDNALNLYRRGNKYLKKYHEFEILK

SEQ ID NO: 14465 - DNA, 3707 bp, Muscodor strobelii
  misc_feature: SGI EST ID NO. CUFF.34891.1
  misc_feature: Variant of the nucleotide sequence at SEQ ID NO 14463
cgagccctcacgccgcttaggtctctaatttgaactgcagactcataccaagtgccataactatcttccctcattattgtttaagaaggagaatcatcaacattgtgctagggggcacggggtcccatggaagcctgaggttgcgcagccctgactcactttccaccagatttctgtcgcccagaagaagagacgagagcttatgaaagaaacaatgcagcgactaggctatattgacgaaaagtgacatgttctgattgcctgcttaacctctgtcgcaggtacagtcaaagcagtattttctgccctgctcatttgacagtgcctccgctcatcacgacgtggcgaggaacagctttgactagcccaagagcgtcagtcatccaggaattgatcaagcataccatttccccaggcaggatgcaaaccgactctcttcccttttaagaacatcattcatgaagctgccagcccgaagcttgacagaattcccttctgtttactttatccatttcacacttcgcgcatatggcaacatctatatacagaatcctagcgaatgattacagcgagcgaaatgtctcattcggaaagtgggaggacttgtcccttttgcggcatcaagacagacggagagtatgcgatcctacttcacatagaagagaaccatgccgaaggtaaatccccattcgttgcagacgtaaatatcaatgcggacagtgaggacgggcactttactcatgaccgggaagaggaaatcaacgaagaagagcaatttgcagaatgccccgtcgagggatgccatgagcgcattgctctagttgagctagaggatcatatcaattttcacgcgatagaggaacatgaagaatctcctgcgcccgccacatcaggctcgtcttctagtcctgacggcgaaggagaatatcgttctccatatgcgcacaatggggatgtgcgtcgtcgaaatgagagcgataggagaacgcgggaccattccgtaatagatgcgtggaaagaaattttcaaaagaccgccacccagcaaatccactaagataccccaattgccggggatgcggaaacgacttggtaaatccgagctcggcagattcgcgcatgaagaaaagatgccagattggctggtggatttactagtaaagggcaaatataagagcagcgagggtattgtgccagtgctcgggaaattattagagcagagtgcgacaacggaatatgcatggttatgtcatcctgctgtccatcatgtctcaaaactgcctagagaaggcggcttctgcgggtatcgaaacatacagatgctctcatcctacctcataggagccaatatcacaggcgtagagaccattgggcctgagattcctagtatcttccagatacaagattacatcgagaatgcatgggacatggggatcaacacctccggacggatagaaactggaggagtcagaggaacgcgaaaatatatcggtacccccgaggcccaagctatgttcaccgttcttcaaataccatgcgaagctcaaggcttcaaatcaacacaaaagggcgttgcagaagccaacctcttcgtcgccatacagaaatacttccagagcgtaccgtacgaccctgaagacaaagtccggcatacaaatctcccaccaatctactttcaacatcgtggccatagcttgactattgtcggccttgagcggctcaagaccggagctctggaactcctcgtcttcgatcccatgtttcacgatcccaaaggcgtaacgcgattagtaggtgacaaaggtacggcgcgcagtggcgggaacgagaacaacaagtggttcttgcatcgcgatcccgataatgccttgaacctgtatcggaggggtaataagtacctcaagaaatatcacgagtttgagattctaaaattgaagactagtacagcttgacaagttgagctctttcggaccatgatgtgagaaggcgtttgtccttttatggacatggagaaaaaggtcgagagtaaaaagacattatgaagtcctagccgagcatgttattggcgttattgagctgaagattagcattgcgtaggcattactagcgaggatgattgttttattagagcgtatatcatcgtactcatgatgcattgctgatgcagcaccaaatccagtccaatttttctatcattttgtgtgtatgatgccgcctagctctaagtgatgcactgaagaacagttatgctctttattttccgctgcgatggcctctcattaaaaaaacaaaacaaggagtgtttcctctaccccgaaactcccattgatgctttttctgttcttgcgatttagttcatgcccccgctctcaatccactctcgcagcttctcgagagccttatagcggtgcgagatcttgtttttcgccgccttatccatttccgcgtaggtctggccttcatactcgaagattgcatcccagcctaatatcatatgttagcgcttgaccttcatagtgtaacaaaagatattgtcattaccaaacctaccgaagtatgctgggcctcttgcgggtacgatcttgccctgtttacataagtatgtcagtatagcaaatatgtatgaagtgacttttcgcattgcccggtgcagagtgagatggttggaaaagtcggggggcttacgtctgtccgtccttggaaaagtaagatttcctgccctggtcctttgcagaagccgaatgttgcgacggcttgtgcggatttgtcttcgtaggctgcgagcatgttgtttaggccttcgtgtccgatggtggacatgaaccatttcctaagattacgcatcagcaaagacctctcacgctgtgtctcccgaccattcgcagtccatcaactcatcaccatcatcctcctcatcattgccattcccctcttcaactcatcatttctagataaaaaggggacaaaatcacatacacataaggtccaggcagtcccttcaacgcattgaagcacaagcatgtatcctccacgagcacaggtccgcccacgatttcagcggcgactttgcacttctcgcgcgtcacgtcttcgactgatccctggatttctgggagatctagggattggtttcgcatcgctatgcctgtcggtgagaggattgcttggacctctgctagtttgttggcgttgcccgttatgaaatttagctctgccattgtggagtttgtttgtatgagtgatgatatggggtgtggtgaagtttgatgtggaatggggtgagaagtaggtatagggcggaagggcgatgtaatggttatgcttgtttgctggaatgcagtatgcgatgcggaggttttagttgctgtgtttgtataaaatgctgtcagttatagtatggtgcggttttgtggagtatggagtgcgaaattgttggtatgctgagttaggtagtctagtgaatatggtattcaatacaagaacttcatcgtcattcatcttcttcttatataactctcaacgcgatacaaaaactttgctttcctactacgtttagcatttccaagcttgctgtcgcccttggtgttgaataatacatgcagcggcgagttgacgcatccgggattacaaagcctgcctgagcctatcggcgtgctgcgaggtcgggagcattcaccggcaaggtcttggccctgaggcggagcacta

SEQ ID NO: 14466 - DNA, 1389 bp, Muscodor strobelii
  misc_feature: SGI cDNA ID NO. 564767
  misc_feature: Encodes the peptide sequence at SEQ ID NO 14467
atggcaacatctatatacagaatcctagcgaatgattacagcgagcgaaatgtctcattcggaaagtgggaggacttgtcccttttgcggcatcaagacagacggagacacatagaagagaaccatgccgaaggtaaatccccattcgttgcagacgtaaatatcaatgcggacagtgaggacgggcactttactcatgaccgggaagaggaaatcaacgaagaagagcaatttgcagaatgccccgtcgagggatgccatgagcgcattgctctagttgagctagaggatcatatcaattttcacgcgatagaggaacatgaagaatctcctgcgcccgccacatcaggctcgtcttctagtcctgacggcgaaggagaatatcgttctccatatgcgcacaatggggatgtgcgtcgtcgaaatgagagcgataggagaacgcgggaccattccgtaatagatgcgtggaaagaaattttcaaaagaccgccacccagcaaatccactaagataccccaattgccggggatgcggaaacgacttggtaaatccgagctcggcagattcgcgcatgaagaaaagatgccagattggctggtggatttactagtaaagggcaaatataagagcagcgagggtattgtgccagtgctcgggaaattattagagcagagtgcgacaacggaatatgcatggttatgtcatcctgctgtccatcatgtctcaaaactgcctagagaaggcggcttctgcgggtatcgaaacatacagatgctctcatcctacctcataggagccaatatcacaggcgtagagaccattgggcctgagattcctagtatcttccagatacaagattacatcgagaatgcatgggacatggggatcaacacctccggacggatagaaactggaggagtcagaggaacgcgaaaatatatcggtacccccgaggcccaagctatgttcaccgttcttcaaataccatgcgaagctcaaggcttcaaatcaacacaaaagggcgttgcagaagccaacctcttcgtcgccatacagaaatacttccagagcgtaccgtacgaccctgaagacaaagtccggcatacaaatctcccaccaatctactttcaacatcgtggccatagcttgactattgtcggccttgagcggctcaagaccggagctctggaactcctcgtcttcgatcccatgtttcacgatcccaaaggcgtaacgcgattagtaggtgacaaaggtacggcgcgcagtggcgggaacgagaacaacaagtggttcttgcatcgcgatcccgataatgccttgaacctgtatcggaggggtaataagtacctcaagaaatatcacgagtttgagattctaaagtaa

SEQ ID NO: 14467 - protein, 462 aa, Muscodor strobelii
  misc_feature: SGI Peptide ID NO. 564767
  misc_feature (228)..(461): Pfam Id: PF07910 Pfam Desc: Peptidase family C78
  misc_feature (179)..(462): NCBI GI: 145605714 Blast Desc: MGG_06912 [Magnaporthe grisea 70-15] gi|145013519|gb|EDJ98160.1| MGG_06912 [Magnaporthe grisea 70-15]
  misc_feature (38)..(462): NCBI GI: 156064381 Blast Desc: SS1G_00198 [Sclerotinia sclerotiorum 1980] gi|154691060|gb|EDN90798.1| SS1G_00198 [Sclerotinia sclerotiorum 1980]
  misc_feature (37)..(462): NCBI GI: 164429330 Blast Desc: NCU01442 [Neurospora crassa OR74A] gi|157073439|gb|EAA26728.2| [Neurospora crassa OR74A]
  misc_feature (37)..(461): NCBI GI: 28950355 Blast Desc: conserved [Neurospora crassa]
  misc_feature (37)..(461): NCBI GI: 154312116 Blast Desc: BC1G_06091 [Botryotinia fuckeliana B05.10] gi|150850054|gb|EDN25247.1| BC1G_06091 [Botryotinia fuckeliana B05.10]
  misc_feature (36)..(462): NCBI GI: 116199277 Blast Desc: CHGG_07794 [Chaetomium globosum CBS 148.51] gi|88179073|gb|EAQ86541.1| CHGG_07794 [Chaetomium globosum CBS 148.51]
  misc_feature (81)..(461): NCBI GI: 46126189 Blast Desc: FG07472.1 [Gibberella zeae PH-1]
  misc_feature (81)..(461): NCBI GI: 256730881 Blast Desc: NECHADRAFT_84553 [Nectria haematococca mpVI 77-13-4]
  misc_feature (36)..(462): NCBI GI: 240109366 Blast Desc: CPC735_028710 [Coccidioides posadasii C735 delta SOWgp]
  misc_feature (37)..(462): NCBI GI: 115438544 Blast Desc: [Aspergillus terreus NIH2624] gi|114188908|gb|EAU30608.1| [Aspergillus terreus NIH2624]
MATSIYRILANDYSERNVSFGKWEDLSLLRHQDRRRHIEENHAEGKSPFVADVNINADSEDGHFTHDREEEINEEEQFAECPVEGCHERIALVELEDHINFHAIEEHEESPAPATSGSSSSPDGEGEYRSPYAHNGDVRRRNESDRRTRDHSVIDAWKEIFKRPPPSKSTKIPQLPGMRKRLGKSELGRFAHEEKMPDWLVDLLVKGKYKSSEGIVPVLGKLLEQSATTEYAWLCHPAVHHVSKLPREGGFCGYRNIQMLSSYLIGANITGVETIGPEIPSIFQIQDYIENAWDMGINTSGRIETGGVRGTRKYIGTPEAQAMFTVLQIPCEAQGFKSTQKGVAEANLFVAIQKYFQSVPYDPEDKVRHTNLPPIYFQHRGHSLTIVGLERLKTGALELLVFDPMFHDPKGVTRLVGDKGTARSGGNENNKWFLHRDPDNALNLYRRGNKYLKKYHEFEILK

SEQ ID NO: 14468 - DNA, 3707 bp, Muscodor strobelii; identical to SEQ ID NO: 14465
  misc_feature: SGI EST ID NO. CUFF.34891.1
  misc_feature: Variant of the nucleotide sequence at SEQ ID NO 14466

SEQ ID NO: 14469 - DNA, 1407 bp, Muscodor strobelii
  misc_feature: SGI cDNA ID NO. 564768
  misc_feature: Encodes the peptide sequence at SEQ ID NO 14470
atggcaacatctatatacagaatcctagcgaatgattacagcgagcgaaatgtctcattcggaaagtgggaggacttgtcccttttgcggcatcaagacagacggagacacatagaagagaaccatgccgaaggtaaatccccattcgttgcagacgtaaatatcaatgcggacagtgaggacgggcactttactcatgaccgggaagaggaaatcaacgaagaagagcaatttgcagaatgccccgtcgagggatgccatgagcgcattgctctagttgagctagaggatcatatcaattttcacgcgatagaggaacatgaagaatctcctgcgcccgccacatcaggctcgtcttctagtcctgacggcgaaggagaatatcgttctccatatgcgcacaatggggatgtgcgtcgtcgaaatgagagcgataggagaacgcgggaccattccgtaatagatgcgtggaaagaaattttcaaaagaccgccacccagcaaatccactaagataccccaattgccggggatgcggaaacgacttggtaaatccgagctcggcagattcgcgcatgaagaaaagatgccagattggctggtggatttactagtaaagggcaaatataagagcagcgagggtattgtgccagtgctcgggaaattattagagcagagtgcgacaacggaatatgcatggttatgtcatcctgctgtccatcatgtctcaaaactgcctagagaaggcggcttctgcgggtatcgaaacatacagatgctctcatcctacctcataggagccaatatcacaggcgtagagaccattgggcctgagattcctagtatcttccagatacaagattacatcgagaatgcatgggacatggggatcaacacctccggacggatagaaactggaggagtcagaggaacgcgaaaatatatcggtacccccgaggcccaagctatgttcaccgttcttcaaataccatgcgaagctcaaggcttcaaatcaacacaaaagggcgttgcagaagccaacctcttcgtcgccatacagaaatacttccagagcgtaccgtacgaccctgaagacaaagtccggcatacaaatctcccaccaatctactttcaacatcgtggccatagcttgactattgtcggccttgagcggctcaagaccggagctctggaactcctcgtcttcgatcccatgtttcacgatcccaaaggcgtaacgcgattagtaggtgacaaaggtacggcgcgcagtggcgggaacgagaacaacaagtggttcttgcatcgcgatcccgataatgccttgaacctgtatcggaggggtaataagtacctcaagaaatatcacgagtttgagattctaaaattgaagactagtacagcttga

SEQ ID NO: 14470 - protein, 468 aa, Muscodor strobelii
  misc_feature: SGI Peptide ID NO. 564768
  misc_feature (228)..(461): Pfam Id: PF07910 Pfam Desc: Peptidase family C78
  misc_feature (179)..(464): NCBI GI: 145605714 Blast Desc: MGG_06912 [Magnaporthe grisea 70-15] gi|145013519|gb|EDJ98160.1| MGG_06912 [Magnaporthe grisea 70-15]
  misc_feature (37)..(464): NCBI GI: 164429330 Blast Desc: NCU01442 [Neurospora crassa OR74A] gi|157073439|gb|EAA26728.2| [Neurospora crassa OR74A]
  misc_feature (38)..(462): NCBI GI: 156064381 Blast Desc: SS1G_00198 [Sclerotinia sclerotiorum 1980] gi|154691060|gb|EDN90798.1| SS1G_00198 [Sclerotinia sclerotiorum 1980]
  misc_feature (37)..(461): NCBI GI: 28950355 Blast Desc: conserved [Neurospora crassa]
  misc_feature (37)..(461): NCBI GI: 154312116 Blast Desc: BC1G_06091 [Botryotinia fuckeliana B05.10] gi|150850054|gb|EDN25247.1| BC1G_06091 [Botryotinia fuckeliana B05.10]
  misc_feature (36)..(463): NCBI GI: 116199277 Blast Desc: CHGG_07794 [Chaetomium globosum CBS 148.51] gi|88179073|gb|EAQ86541.1| CHGG_07794 [Chaetomium globosum CBS 148.51]
  misc_feature (81)..(461): NCBI GI: 46126189 Blast Desc: FG07472.1 [Gibberella zeae PH-1]
  misc_feature (81)..(461): NCBI GI: 256730881 Blast Desc: NECHADRAFT_84553 [Nectria haematococca mpVI 77-13-4]
  misc_feature (36)..(463): NCBI GI: 240109366 Blast Desc: CPC735_028710 [Coccidioides posadasii C735 delta SOWgp]
  misc_feature (37)..(463): NCBI GI: 115438544 Blast Desc: [Aspergillus terreus NIH2624] gi|114188908|gb|EAU30608.1| [Aspergillus terreus NIH2624]
MATSIYRILANDYSERNVSFGKWEDLSLLRHQDRRRHIEENHAEGKSPFVADVNINADSEDGHFTHDREEEINEEEQFAECPVEGCHERIALVELEDHINFHAIEEHEESPAPATSGSSSSPDGEGEYRSPYAHNGDVRRRNESDRRTRDHSVIDAWKEIFKRPPPSKSTKIPQLPGMRKRLGKSELGRFAHEEKMPDWLVDLLVKGKYKSSEGIVPVLGKLLEQSATTEYAWLCHPAVHHVSKLPREGGFCGYRNIQMLSSYLIGANITGVETIGPEIPSIFQIQDYIENAWDMGINTSGRIETGGVRGTRKYIGTPEAQAMFTVLQIPCEAQGFKSTQKGVAEANLFVAIQKYFQSVPYDPEDKVRHTNLPPIYFQHRGHSLTIVGLERLKTGALELLVFDPMFHDPKGVTRLVGDKGTARSGGNENNKWFLHRDPDNALNLYRRGNKYLKKYHEFEILKLKTSTA

SEQ ID NO: 14471 - DNA, 3707 bp, Muscodor strobelii; identical to SEQ ID NO: 14465
  misc_feature: SGI EST ID NO. CUFF.34891.1
  misc_feature: Variant of the nucleotide sequence at SEQ ID NO 14469

SEQ ID NO: 14472 - DNA, 678 bp, Muscodor strobelii
  misc_feature: SGI cDNA ID NO. 564769
  misc_feature: Encodes the peptide sequence at SEQ ID NO 14473
atgaagagcatcgcaagcatcatcggcgccacggccttgctggccaatagtgtctctgcacactatattttcgaaacattcactgctggaacaactaagtttgacacgtaccagtacatccggaaaaacaccaacatgaactcgccggtcacagacttggcttcgaatgatctcagatgcaacgtcggcgctaccggcactggtaccgacacaattgctatgactgctggcgaggcgttcactttcactctcgatcaagcagtctaccatcaaggtcccatttcgatctacatgtcaaaagcgccatctacagcgtccgcttatgacggaagtggtgaatggttcaagattaaggacttcgcacccacattctcgaacggtcaagcgacatgggatttatcgcaaacctattcgtacacgatccctaagtgtatccagaacggcgattatttgttgcgcatccagtcactcgcaatccacaacccgtggcccgcgggtattccacagttttacatctcctgcgcacaagtgacggtcactggtggaactggcacggcaaacccacagtatgctttgattccgggtgcattcaagcagacagatccaggatacactgtcaacatttacacaaacttcaacaactacaccgtccctgggcccagcgttatgacttgttaa

SEQ ID NO: 14473 - protein, 225 aa, Muscodor strobelii
  misc_feature: SGI Peptide ID NO. 564769
  misc_feature (140)..(217): Pfam Id: PF03443 Pfam Desc: Glycosyl hydrolase family 61
  misc_feature (16)..(225): NCBI GI: 116192683 Blast Desc: CHGG_06059 [Chaetomium globosum CBS 148.51] gi|88181972|gb|EAQ89440.1| CHGG_06059 [Chaetomium globosum CBS 148.51]
  misc_feature (1)..(225): NCBI GI: 46127267 Blast Desc: FG08011.1 [Gibberella zeae PH-1]
  misc_feature (1)..(223): NCBI GI: 171684255 Blast Desc: protein product [Podospora anserina] gi|170942088|emb|CAP67740.1| protein product [Podospora anserina]
  misc_feature (1)..(222): NCBI GI: 156050139 Blast Desc: SS1G_07656 [Sclerotinia sclerotiorum 1980] gi|154692057|gb|EDN91795.1| SS1G_07656 [Sclerotinia sclerotiorum 1980]
  misc_feature (21)..(225): NCBI GI: 85110940 Blast Desc: NCU00836 [Neurospora crassa OR74A] gi|28925415|gb|EAA34466.1| conserved [Neurospora crassa OR74A]
  misc_feature (7)..(225): NCBI GI: 171677847 Blast Desc: protein product [Podospora anserina] gi|170936992|emb|CAP61650.1| protein product [Podospora anserina]
  misc_feature (1)..(219): NCBI GI: 261358496 Blast Desc: fungal cellulose binding domain-containing protein [Verticillium albo-atrum VaMs.102]
  misc_feature (23)..(222): NCBI GI: 154317920 Blast Desc: BC1G_02943 [Botryotinia fuckeliana B05.10] gi|150843601|gb|EDN18794.1| BC1G_02943 [Botryotinia fuckeliana B05.10]
  misc_feature (1)..(225): NCBI GI: 39945130 Blast Desc: MGG_04547 [Magnaporthe grisea 70-15] gi|145011373|gb|EDJ96029.1| MGG_04547 [Magnaporthe grisea 70-15]
  misc_feature (1)..(225): NCBI GI: 116195750 Blast Desc: CHGG_04473 [Chaetomium globosum CBS 148.51] gi|88180386|gb|EAQ87854.1| CHGG_04473 [Chaetomium globosum CBS 148.51]
  misc_feature (57)..(224): SWISSPROT Homolog: EC 3.2.1.4 Cellulase
MKSIASIIGATALLANSVSAHYIFETFTAGTTKFDTYQYIRKNTNMNSPVTDLASNDLRCNVGATGTGTDTIAMTAGEAFTFTLDQAVYHQGPISIYMSKAPSTASAYDGSGEWFKIKDFAPTFSNGQATWDLSQTYSYTIPKCIQNGDYLLRIQSLAIHNPWPAGIPQFYISCAQVTVTGGTGTANPQYALIPGAFKQTDPGYTVNIYTNFNNYTVPGPSVMTC

SEQ ID NO: 14474 - DNA, 854 bp, Muscodor strobelii
  misc_feature: SGI EST ID NO. CUFF.34416.0
  misc_feature: Variant of the nucleotide sequence at SEQ ID NO 14472
ggacttcgcacccacattctcgaacggtcaagcgacatgggatttatcgcaaacctattcgtacacgatccctaagtgtatccagaacggcgattatttgttgcgcatccagtcactcgcaatccacaacccgtggcccgcgggtattccacagttttacatctcctgcgcacaagtgacggtcactggtggaactggcacggcaaacccacagtatgctttgattccgggtgcattcaagcagacagatccaggatacactgtcaacatttacacaaacttcaacaactacaccgtccctgggcccagcgttatgacttgttaaacttccacgaaacgccgccgaattctctatcattacgtcgctgtcccaccactagcgagagtagattgcttctagttaaagcgtttacccagttatagttattgtatatagcaatataacaaacaaacttgatgaagagtcttcatctctaaatccaagaactacttccaacggaggtcctgtgctgatatcgttccattttccccgaacaagccgataagccttctaaatcaaaactgatacataatagagattgtgcacaaactaaaaacagactttgcaatgcatagtctttccttgttaagccaaaccgttccgatgataggtgcatgtcatttccgtacataagaaaacagaagaatctcgtgctggggatgttttaactgcaatgccgggaaattgaatataattcacagcacattcactgagtcgctgccatgtatgcgatgttcgacataagcttaacatctgatgacaaggactactacctatcattcaatggccagtaaaacctccgaagctcattggc

SEQ ID NO: 14475 - DNA, 840 bp, Muscodor strobelii
  misc_feature: SGI cDNA ID NO. 564770
  misc_feature: Encodes the peptide sequence at SEQ ID NO 14476
atgcgtcgacgtcggtgtctcctatacgccttcctcttccttggctttttaagcaccactttggcacagaatgctaccaacgaatcaatcaatgctgtagcggaagccgatcttctgtggccgcgcgagggtgacacttttgcactaaatcgccagggcatggccgtggttatcgcgatacaaaattatgccgaggcagtcaagcacggttggagcctgtactggttgatgtgtatgaacctcacagataagcccggctttcgtcaatgcgcttttgacgctacatattccaagaatgaccccacagacatcaacgtgccgctcgtcgtcagacacgatcccccgatagacgagggcggcgatgtttatctcttggagtggagatttcgcatcggaccgtattgtgaattcaccaataacagtagcttatatgaggctacgcacgacgtgcgcggcggcgcattcaacgtgacgatcgatcccgctgcagcttacccgtccattacgccgacaacctgcggcgcattcttgggtgccgtacaatactcggctaccgcatcctggaatttcccctacagcgttgagaacagtccgggatgtgtacagacaatgccggtgacaaccagtcctgctccatgtcgcgcgactcttgacgccacacaggcaaacgcaattgtagaccacatgcattgggacaaaacgactacaaatgaacaaacctcagcgacggccccgtcagagaccgataagagcctggctattaaggttaataccagaggatcactgatgttgtccttcgtctcagctgcctctgccttcgtaattgtgaatatgaagtag

SEQ ID NO: 14476 - protein, 279 aa, Muscodor strobelii
  misc_feature: SGI Peptide ID NO. 564770
MRRRRCLLYAFLFLGFLSTTLAQNATNESINAVAEADLLWPREGDTFALNRQGMAVVIAIQNYAEAVKHGWSLYWLMCMNLTDKPGFRQCAFDATYSKNDPTDINVPLVVRHDPPIDEGGDVYLLEWRFRIGPYCEFTNNSSLYEATHDVRGGAFNVTIDPAAAYPSITPTTCGAFLGAVQYSATASWNFPYSVENSPGCVQTMPVTTSPAPCRATLDATQANAIVDHMHWDKTTTNEQTSATAPSETDKSLAIKVNTRGSLMLSFVSAASAFVIVNMK

SEQ ID NO: 14477 - DNA, 1422 bp, Muscodor strobelii
  misc_feature: SGI cDNA ID NO. 564771
  misc_feature: Encodes the peptide sequence at SEQ ID NO 14478
atgctcgacgttctcgacttcatcgccgaacgaggcggcaacccggaggctattcgcgagtcccagcgccgcagatatgccccggtcgaagttgtcgacgagatcattgccatgtggcaggatcaccgctccaccaattacaatgccacccaaatcaagaccaaaatgaacgacctacagaagcagatcggtgccaagaagaaggccaaggaaaatgccgacgaccttctcaaagagagagccgatctcgacacccagcacaaggccatgctcgagtccgccgccgagaaggaagccaccatgaacaagaagctcaacacgatcggaaacttcgtccacgagtccgtccctgtcagcgataacgaggacaacaacacccagctgaagacttgggctcccgagggcttcgacaagacgaagaaggctgcgctttctcatcacgaggttctgctgcgtctggacggctacgaccccgaacgtggaactaaggttgttggacaccgaggatactatctgaagacttatggcctattcctgaaccaggctctgatcaattacggccttgagttcctgatgcaaaagggtttcacacctctacagccaccgcaaatgatgctaaagcattacatgagtaagacggcacaactagagcaatttgatgaggagttgtacaaagtcacagacggcgagcctcaaaacgacaaatatctcattgccacctctgaacagcccatctctgcatatcacgcagacgagtggcttctcgcaaaagagctacccctgaagtacgctggtttcagcacatgctaccgccgcgaggctggttcccacggtaaagacgcatggggtattttcagagtccatcaattcgagaaggtcgaacaattcgttctcacagatcctgagaagtcttgggagatgttcgacgacatgattagcaactcggaagaattctacaagtcattaggactaccataccaggttgtagctatcgtttccggggctctcaacaacgctgctgccaagaagtttgatcttgaggcctggttcccattccagcaggaatacaaggagctcgtgtcttgctccaactgcacagattatcaatctcggggtctcgagatccggtttggatccaagacacaaaccgaaaccaagaagaagtatgtccattgtctgaactcgacattgacagccacagaacgtgctctttgctgcgttcttgagaactaccaaactgaagaaggtcttaaagtgccggagccgctgcggaaatacatccctggagcccccgagttcctcccattcactaaggagttgccgaaagactctacatcgcagaagaaggacaagggagttaagggtgctgctaaggagaaggttgccgcggttgcggagaaagtgaaagatatggctgtctag

SEQ ID NO: 14478 - protein, 473 aa, Muscodor strobelii
  misc_feature: SGI Peptide ID NO. 564771
  misc_feature (1)..(112): Pfam Id: PF02403 Pfam Desc: Seryl-tRNA synthetase N-terminal domain
  misc_feature (179)..(353): Pfam Id: PF00587 Pfam Desc: tRNA synthetase class II core domain (G, H, P, S and T)
  misc_feature (1)..(473): NCBI GI: 154312140 Blast Desc: BC1G_06103 [Botryotinia fuckeliana B05.10] gi|150850066|gb|EDN25259.1| BC1G_06103 [Botryotinia fuckeliana B05.10]
  misc_feature (1)..(462): NCBI GI: 28950357 Blast Desc: serine-tRNA ligase, cytosolic [Neurospora crassa]
  misc_feature (1)..(469): NCBI GI: 258571451 Blast Desc: seryl-tRNA synthetase [Uncinocarpus reesii 1704] gi|237904799|gb|EEP79200.1| seryl-tRNA synthetase [Uncinocarpus reesii 1704]
  misc_feature (1)..(448): NCBI GI: 115438574 Blast Desc: seryl-tRNA synthetase [Aspergillus terreus NIH2624] gi|114188916|gb|EAU30616.1| seryl-tRNA synthetase [Aspergillus terreus NIH2624]
  misc_feature (1)..(473): NCBI GI: 212536014 Blast Desc: seryl-tRNA synthetase [Penicillium marneffei ATCC 18224] gi|210070562|gb|EEA24652.1| seryl-tRNA synthetase [Penicillium marneffei ATCC 18224]
  misc_feature (4)..(462): NCBI GI: 164429332 Blast Desc: seryl-tRNA synthetase [Neurospora crassa OR74A] gi|157073440|gb|EAA26729.2| seryl-tRNA synthetase [Neurospora crassa OR74A]
  misc_feature (1)..(473): NCBI GI: 67903760 Blast Desc: AN8867.2 [Aspergillus nidulans FGSC A4] gi|40740965|gb|EAA60155.1| AN8867.2 [Aspergillus nidulans FGSC A4] gi|259482913|tpe|CBF77842.1| TPA: seryl-tRNA synthetase FGSC
  misc_feature (1)..(459): NCBI GI: 242794649 Blast Desc: seryl-tRNA synthetase [Talaromyces stipitatus ATCC 10500] gi|218719006|gb|EED18426.1| seryl-tRNA synthetase [Talaromyces stipitatus ATCC 10500]
  misc_feature (1)..(447): NCBI GI: 240109358 Blast Desc: seryl-tRNA synthetase, [Coccidioides posadasii C735 delta SOWgp]
  misc_feature (1)..(458): NCBI GI: 255943689 Blast Desc: Pc20g00490 [Penicillium chrysogenum Wisconsin 54-1255] gi|211587347|emb|CAP85378.1| Pc20g00490 [Penicillium chrysogenum Wisconsin 54-1255]
  misc_feature (1)..(446): SWISSPROT Homolog: EC 6.1.1.11 Serine--tRNA ligase
MLDVLDFIAERGGNPEAIRESQRRRYAPVEVVDEIIAMWQDHRSTNYNATQIKTKMNDLQKQIGAKKKAKENADDLLKERADLDTQHKAMLESAAEKEATMNKKLNTIGNFVHESVPVSDNEDNNTQLKTWAPEGFDKTKKAALSHHEVLLRLDGYDPERGTKVVGHRGYYLKTYGLFLNQALINYGLEFLMQKGFTPLQPPQMMLKHYMSKTAQLEQFDEELYKVTDGEPQNDKYLIATSEQPISAYHADEWLLAKELPLKYAGFSTCYRREAGSHGKDAWGIFRVHQFEKVEQFVLTDPEKSWEMFDDMISNSEEFYKSLGLPYQVVAIVSGALNNAAAKKFDLEAWFPFQQEYKELVSCSNCTDYQSRGLEIRFGSKTQTETKKKYVHCLNSTLTATERALCCVLENYQTEEGLKVPEPLRKYIPGAPEFLPFTKELPKDSTSQKKDKGVKGAAKEKVAAVAEKVKDMAV

SEQ ID NO: 14479 - DNA, 1756 bp, Muscodor strobelii
  misc_feature: SGI EST ID NO. CUFF.34458.0
  misc_feature: Variant of the nucleotide sequence at SEQ ID NO 14477
attttgtccctcgcccctgcgcaacaccgtgaacagtcacacccctacccgcattcgttgactcctttgttgcgttctgattgctgtgtgtttctttcccttgcgcagtgaaaaaacaggcttccgagatgctcgacgttctcgacttcatcgccgaacgaggcggcaacccggaggctattcgcgagtcccagcgccgcagatatgccccggtcgaagttgtcgacgagatcattgccatgtggcaggatcaccgctccaccaattacaatgccacccaaatcaagaccaaaatgaacgacctacagaagcagatcggtgccaagaagaaggccaaggaaaatgccgacgaccttctcaaagagagagccgatctcgacacccagcacaaggccatgctcgagtccgccgccgagaaggaagccaccatgaacaagaagctcaacacgatcggaaacttcgtccacgagtccgtccctgtcagcgataacgaggacaacaacacccagctgaagacttgggctcccgagggcttcgacaagacgaagaaggctgcgctttctcatcacgaggttctgctgcgtctggacggctacgaccccgaacgtggaactaaggttgttggacaccgaggatactatctgaagacttatggcctattcctgaaccaggctctgatcaattacggccttgagttcctgatgcaaaagggtttcacacctctacagccaccgcaaatgatgctaaagcattacatgagtaagacggcacaactagagcaatttgatgaggagttgtacaaagtcacagacggcgagcctcaaaacgacaaatatctcattgccacctctgaacagcccatctctgcatatcacgcagacgagtggcttctcgcaaaagagctacccctgaagtacgctggtttcagcacatgctaccgccgcgaggctggttcccacggtaaagacgcatggggtattttcagagtccatcaattcgagaaggtcgaacaattcgttctcacagatcctgagaagtcttgggagatgttcgacgacatgattagcaactcggaagaattctacaagtcattaggactaccataccaggttgtagctatcgtttccggggctctcaacaacgctgctgccaagaagtttgatcttgaggcctggttcccattccagcaggaatacaaggagctcgtgtcttgctccaactgcacagattatcaatctcggggtctcgagatccggtttggatccaagacacaaaccgaaaccaagaagaagtatgtccattgtctgaactcgacattgacagccacagaacgtgctctttgctgcgttcttgagaactaccaaactgaagaaggtcttaaagtgccggagccgctgcggaaatacatccctggagcccccgagttcctcccattcactaaggagttgccgaaagactctacatcgcagaagaaggacaagggagttaagggtgctgctaaggagaaggttgccgcggttgcggagaaagtgaaagatatggctgtctagatgtgtgattcccatgtggcggttgatgtaggcgatgagagagcttgctgcatagctttctaagtaatgaaatgatcatctcgctgaattagcgactgtttacaggtacattggacgcagtttatttgtgacatggactatcttcgagagtaggttgcttgtagctatgtggctctacaggcggtcgtcaatctgctatatttatg

SEQ ID NO: 14480 - DNA, 564 bp, Muscodor strobelii
  misc_feature: SGI cDNA ID NO. 564772
  misc_feature: Encodes the peptide sequence at SEQ ID NO 14481
atgccgccgccgtccaagcagcggaaagtcgccatcgttggcagccgatccgttggcaaatcatccctcgcggttcagttcgtcgatggccactttgtcgagagctattacccgaccatagagaatactttcagcaaagtgattcgacacaaggggcaggactacacgaccgagatcgtcgacaccgctggtcaggatgagtacagtatcctaaattcgaagcacttcatcggcatccatggctacatgctagtgtactctgtctcgtccctcccgtcctttgagatggtgcaggtgatccgggagaagattctcaaccacttgggcacggactgggtcccgattgtcatcgtaggcaacaagagcgatcttcggccagaacagcgacaagtcagccaggaagacgggcgcaagctgtccgagaagttcgactgcgggtggacggaagctagtgctcgatacaacgagaacgtgggcaaggcgttcgagctcctgatcgcgcaggtcgagaagtcgcagaacccaggtgaagctgcaaatggcggcaaatgcgatatcatgtaa

SEQ ID NO: 14481 - protein, 187 aa, Muscodor strobelii
  misc_feature: SGI Peptide ID NO. 564772
  misc_feature (9)..(123): Pfam Id: PF08477 Pfam Desc: Miro-like protein
  misc_feature (9)..(171): Pfam Id: PF00071 Pfam Desc: Ras family
  misc_feature (1)..(187): NCBI GI: 46126191 Blast Desc: FG07473.1 [Gibberella zeae PH-1]
  misc_feature (1)..(187): NCBI GI: 261351475 Blast Desc: rheb small monomeric GTPase RhbA [Verticillium albo-atrum VaMs.102]
  misc_feature (1)..(187): NCBI GI: 85077076 Blast Desc: NCU01444 [Neurospora crassa OR74A] gi|28917003|gb|EAA26730.1| NCU01444 [Neurospora crassa OR74A] gi|28950358|emb|CAD70982.1| ras-related GTP-binding protein
  misc_feature (1)..(187): NCBI GI: 116199281 Blast Desc: conserved [Chaetomium globosum CBS 148.51] gi|88179075|gb|EAQ86543.1| conserved [Chaetomium globosum CBS 148.51]
  misc_feature (1)..(187): NCBI GI: 189189976 Blast Desc: rheb small monomeric GTPase RhbA [Pyrenophora tritici-repentis Pt-1C-BFP] gi|187972933|gb|EDU40432.1| rheb small monomeric GTPase RhbA [Pyrenophora tritici-repentis
  misc_feature (1)..(187): NCBI GI: 242794654 Blast Desc: Rheb small monomeric GTPase RhbA [Talaromyces stipitatus ATCC 10500] gi|218719007|gb|EED18427.1| Rheb small monomeric GTPase RhbA [Talaromyces stipitatus ATCC 10500]
  misc_feature (1)..(187): NCBI GI: 212536016 Blast Desc: Rheb small monomeric GTPase RhbA [Penicillium marneffei ATCC 18224] gi|210070563|gb|EEA24653.1| Rheb small monomeric GTPase RhbA [Penicillium marneffei ATCC 18224]
  misc_feature (1)..(187): NCBI GI: 226294399 Blast Desc: rheb small monomeric GTPase RhbA [Paracoccidioides brasiliensis Pb18]
  misc_feature (1)..(187): NCBI GI: 121717554 Blast Desc: Rheb small monomeric GTPase RhbA [Aspergillus clavatus NRRL 1] gi|119404283|gb|EAW14659.1| Rheb small monomeric GTPase RhbA [Aspergillus clavatus NRRL 1]
  misc_feature (1)..(187): NCBI GI: 225685086 Blast Desc: ras-1 [Paracoccidioides brasiliensis Pb03]
MPPPSKQRKVAIVGSRSVGKSSLAVQFVDGHFVESYYPTIENTFSKVIRHKGQDYTTEIVDTAGQDEYSILNSKHFIGIHGYMLVYSVSSLPSFEMVQVIREKILNHLGTDWVPIVIVGNKSDLRPEQRQVSQEDGRKLSEKFDCGWTEASARYNENVGKAFELLIAQVEKSQNPGEAANGGKCDIM

SEQ ID NO: 14482 - DNA, 1585 bp, Muscodor strobelii
  misc_feature: SGI EST ID NO. CUFF.34485.0
  misc_feature: Variant of the nucleotide sequence at SEQ ID NO 14480
gcttattatggttcaatcattaggtaaatgcaagctcttgggcacatgctatccaagctagctattctatgcctcttattgagctgtgcttccctcgtgcatctcgtttcctcaggtcacgttgtccgacttgtacgaggggccagacctcaaatcccctctccaaacgtccaagacccttagagtaacagtcacgcgtcatcgaacgcgacgcccagtcagcgcaaatcacccagctcgaacgggatttctttaagctactgtaggtacgagacacgggagttgagcttgggagctacgccgcttttgctcctttcagaagttctaaatgaagcactccccactttgaatcgcccctcgcccctcgtccctcgcaaagtatcagcggtcgtcatcggcatgcccgtgccccgtatcgtacctacctatccctctatcttttatgatatagtgtgctgcagcgttatcgaacatcccacccccttcaccactcgacttatcacactaacctataacttctccacgatagatagaccagctatcgtgagctcctccgtcagctgttttaaatgccgccgccgtccaagcagcggaaagtcgccatcgttggcagccgatccgttggcaaatcatccctcgcggttcagttcgtcgatggccactttgtcgagagctattacccgaccatagagaatactttcagcaaagtgattcgacacaaggggcaggactacacgaccgagatcgtcgacaccgctggtcaggatgagtacagtatcctaaattcgaagcacttcatcggcatccatggctacatgctagtgtactctgtctcgtccctcccgtcctttgagatggtgcaggtgatccgggagaagattctcaaccacttgggcacggactgggtcccgattgtcatcgtaggcaacaagagcgatcttcggccagaacagcgacaagtcagccaggaagacgggcgcaagctgtccgagaagttcgactgcgggtggacggaagctagtgctcgatacaacgagaacgtgggcaaggcgttcgagctcctgatcgcgcaggtcgagaagtcgcagaacccaggtgaagctgcaaatggcggcaaatgcgatatcatgtaatacttcgctattgatgagaatggaatacgggaggatatttactacaaacgttatgtgctgctagagatacattgggcgcgacaggcactaactatatagtgcttggggggctctctttaatttagatgggagagaacacttagggacaaatgttggatgcttagatcttggttcggaatgtgccgaccgatctgcatcatgcgacttatatttttacacacaatttacgttgatagctggtggtatactgcggtatgctacgagctagggaggaggtcaggagtcaaatgggcacttataagacttgttgcctggggctcccaggtgctaattgagttttgatactacgttttgacgagggccttaatacgggtgagatatgcacaggatgacctaaagcctagcaattataacaattgcatttgcgaaataaacaaggctatgctgcctct

SEQ ID NO: 14483 - DNA, 2649 bp, Muscodor strobelii
  misc_feature: SGI cDNA ID NO. 564773
  misc_feature: Encodes the peptide sequence at SEQ ID NO 14484
atggcgacgatcatgactgatgttggcgctcggccaaagaagaaactaaacacatatggaaagagcggtgcgagaaagagacagcccaaggcggtcttcacaccgcagacaacatctgagtctatgtcagaggaggatcctatcacttcacctaatccaccaggtacagccacgcgcccgaagccatccatcgtcgcctcgccgaatgccgtctctcccattgcgcgcatcaaacgccctgacagcaatcgcaatgccaatgttgatgctacgacaaagccttcctctactcgaactacttcattagtcgagaggaagcggaaagtaccgcaaatagaagctgccaagaaaatcacaaagcaggcagtcgcaagcgaatgggatttcgacgatgcgcagtctgcgcccgagcccagtcgcttagcgaagacggcaacagacaatgtaccagcaaagatacagaacaaacggcgcatgcgggtgcaatcgacacctcccgattcgatagatagacataccgccaaacctcgtctatcaagcccgccgccaacgccgcccacgcaacggaaagttcccaaaccatccacacagccgacattcagtggcgcaaggaccaagactaccagcgcgccaatacaatcgactgcggggccgaccgttccacgccaacaccaaattcctctgcatctggcgagagattccatccagaagaccaagcaacctagcgcaccgctcaccacagcgaccacagtgaccagtgaaccgaagcaatctgcgcccaaaaggaaagctacaaactcaagtctccagtccagaccaaaaaagcgattaatagacgctctagtggaacagtctcaagatgacgaagatgagctcgatgaagatatccttgaaaatctactcaagccaactcagtccagtctgagacaaatgagcatcgagccggatcttcccagtctgccgtcaactccgaatagtaaagccagaggtgtaccgggcacaggagctcgcaccttccaacgttccagcagcgcactcaagttcacctatggacaaagtcgaaaagtgctggaagaagaagataacttgctagagtcgttagctcttccagaatcttcgtcttattctttgaaaggcaggcgcttggaattaggtgttccaaagaaacccgtgcctacaatggggatgttcgacgacgacgatcccacagactctccaagttcgaaacttcgtgatattcatgaacttcgccaagcgggagcaaattcgcgggctgcagataccatgcaggaccttattgatcggatgggtaaagcaggcgtaagatcatcttcgcgccgatcagcattgttagaagtagcagaaaaactgagagagaagacttacattcgacaatgccgtgaccatggggccgaaagcgcgatgttgagaggagttggcgaagagactgatgttatttgcggctatctcatcttttcgtctctggcgacgatcatggcgaaggatccatccgcacacataggtcgtgtcctacaggaggaagaagcagggcctctgttcgctcgtttgctacgcattcgagaagacattaagagaattgtgaaagatcgcaaaagcaatgtttcaccaaggaaccagagctccatcatatcagttgaaggctcactgcagaagctatctatctgggaagaaggtcggccttcatacatctcaccaaggcatctcgctatcaaatgcttgcaactactcatcgcgcaaggtgccatcaccggcgagaacacaatcattttcgccgaagatgtcacgaagcacctcttcgatgtactgttggatgccggtacaagcgatgactattgggagtatccgacgacaacacaggctatggaactctactgcacactctctgtgctcgaggttcatgtcattgcatcggcattggttgatggcgaaagacaaagaaccaacagatatcttccgaacgtggccgatgctttccatgcttggcttcaaacgccagcacgttgcggcgaggctatgaatatgtcgatacttaaattggtactcaacttgacgaacgacaatgacgaagccactgagatcttcgctcgaaaaggaattattgctcccttggccgcctctgcttgtactgcctttaatcaggccgtaacatctatctcacaaggcctctggacggaacgatctatggaccccgttattctccgacttggtattctgatcaacttcgccgagggtagtcccatgataaggcagatcatgacgaatggtcaacacaagaatgaaaggccactgaacgagttcattcgcatattcctagaccatcaccgacgaacaggagaggctgactcgatcgaaaaatcacataccaatgttgcggtcggctacatatctgtgcttcttggctacctagcattgcataagccaacacgcttgagaatcaaagccacgcacccatcgaggagcatcggccccttgacggaatcaattcgagagttcaacacccatcatgagcaggttgagaatgccatgaacgaacataacggcattgaggcccacagcaacaatagccagtacacggaaagactacgagcattgatcctgcagctggaattcgaggcatcaaaggactga

SEQ ID NO: 14484 - protein, 882 aa, Muscodor strobelii
  misc_feature: SGI Peptide ID NO. 564773
  misc_feature (274)..(875): NCBI GI: 116199283 Blast Desc: CHGG_07797 [Chaetomium globosum CBS 148.51] gi|88179076|gb|EAQ86544.1| CHGG_07797 [Chaetomium globosum CBS 148.51]
  misc_feature (223)..(880): NCBI GI: 85077079 Blast Desc: NCU01445 [Neurospora crassa OR74A] gi|28917004|gb|EAA26731.1| [Neurospora crassa OR74A] gi|28950359|emb|CAD70983.1| [Neurospora crassa]
  misc_feature (309)..(875): NCBI GI: 154312134 Blast Desc: BC1G_06100 [Botryotinia fuckeliana B05.10] gi|150850063|gb|EDN25256.1| BC1G_06100 [Botryotinia fuckeliana B05.10]
  misc_feature (2)..(842): NCBI GI: 171692725 Blast Desc: protein product [Podospora anserina] gi|170946311|emb|CAP73112.1| protein product [Podospora anserina]
  misc_feature (251)..(749): NCBI GI: 156064363 Blast Desc: SS1G_00189 [Sclerotinia sclerotiorum 1980] gi|154691051|gb|EDN90789.1| SS1G_00189 [Sclerotinia sclerotiorum 1980]
  misc_feature (223)..(719): NCBI GI: 28950338 Blast Desc: (fragment) [Neurospora crassa]
  misc_feature (155)..(869): NCBI GI: 256730879 Blast Desc: NECHADRAFT_96051 [Nectria haematococca mpVI 77-13-4]
  misc_feature (384)..(750): NCBI GI: 145605711 Blast Desc: MGG_11796 [Magnaporthe grisea 70-15] gi|145013516|gb|EDJ98157.1| MGG_11796 [Magnaporthe grisea 70-15]
  misc_feature (410)..(867): NCBI GI: 46126193 Blast Desc: FG07474.1 [Gibberella zeae PH-1]
  misc_feature (347)..(876): NCBI GI: 189189978 Blast Desc: PTRG_00995 [Pyrenophora tritici-repentis Pt-1C-BFP] gi|187972934|gb|EDU40433.1| PTRG_00995 [Pyrenophora tritici-repentis Pt-1C-BFP]
MATIMTDVGARPKKKLNTYGKSGARKRQPKAVFTPQTTSESMSEEDPITSPNPPGTATRPKPSIVASPNAVSPIARIKRPDSNRNANVDATTKPSSTRTTSLVERKRKVPQIEAAKKITKQAVASEWDFDDAQSAPEPSRLAKTATDNVPAKIQNKRRMRVQSTPPDSIDRHTAKPRLSSPPPTPPTQRKVPKPSTQPTFSGARTKTTSAPIQSTAGPTVPRQHQIPLHLARDSIQKTKQPSAPLTTATTVTSEPKQSAPKRKATNSSLQSRPKKRLIDALVEQSQDDEDELDEDILENLLKPTQSSLRQMSIEPDLPSLPSTPNSKARGVPGTGARTFQRSSSALKFTYGQSRKVLEEEDNLLESLALPESSSYSLKGRRLELGVPKKPVPTMGMFDDDDPTDSPSSKLRDIHELRQAGANSRAADTMQDLIDRMGKAGVRSSSRRSALLEVAEKLREKTYIRQCRDHGAESAMLRGVGEETDVICGYLIFSSLATIMAKDPSAHIGRVLQEEEAGPLFARLLRIREDIKRIVKDRKSNVSPRNQSSIISVEGSLQKLSIWEEGRPSYISPRHLAIKCLQLLIAQGAITGENTIIFAEDVTKHLFDVLLDAGTSDDYWEYPTTTQAMELYCTLSVLEVHVIASALVDGERQRTNRYLPNVADAFHAWLQTPARCGEAMNMSILKLVLNLTNDNDEATEIFARKGIIAPLAASACTAFNQAVTSISQGLWTERSMDPVILRLGILINFAEGSPMIRQIMTNGQHKNERPLNEFIRIFLDHHRRTGEADSIEKSHTNVAVGYISVLLGYLALHKPTRLRIKATHPSRSIGPLTESIREFNTHHEQVENAMNEHNGIEAHSNNSQYTERLRALILQLEFEASKD

SEQ ID NO: 14485 - DNA, 3463 bp, Muscodor strobelii
  misc_feature: SGI EST ID NO. CUFF.34488.0
  misc_feature: Variant of the nucleotide sequence at SEQ ID NO 14483
gccggccctcacataccgccgcacctaccccggtcaagtcgcccctccacctcacattcacagccttgattgttgacagcccttccactgtcgcgttcctgcgtactgtgatctacttctttcttagtctcacaatctattcattgcccatattgacctgatcgccatccaacagatatcccagctgccatcttgagacttactttccaatcaaacgagatcttgcgctggttgcaccgcgttttccactacgacgtatttcggattatatcacatctatccacgaactacaaagagcttgccacaatgaagcactcctgatgctcaaactcccgtcttcatccatctagtcattgcgccttcaactaagtctcgtcttgagcaccgtcgcctccgatggcgacgatcatgactgatgttggcgctcggccaaagaagaaactaaacacatatggaaagagcggtgcgagaaagagacagcccaaggcggtcttcacaccgcagacaacatctgagtctatgtcagaggaggatcctatcacttcacctaatccaccaggtacagccacgcgcccgaagccatccatcgtcgcctcgccgaatgccgtctctcccattgcgcgcatcaaacgccctgacagcaatcgcaatgccaatgttgatgctacgacaaagccttcctctactcgaactacttcattagtcgagaggaagcggaaagtaccgcaaatagaagctgccaagaaaatcacaaagcaggcagtcgcaagcgaatgggatttcgacgatgcgcagtctgcgcccgagcccagtcgcttagcgaagacggcaacagacaatgtaccagcaaagatacagaacaaacggcgcatgcgggtgcaatcgacacctcccgattcgatagatagacataccgccaaacctcgtctatcaagcccgccgccaacgccgcccacgcaacggaaagttcccaaaccatccacacagccgacattcagtggcgcaaggaccaagactaccagcgcgccaatacaatcgactgcggggccgaccgttccacgccaacaccaaattcctctgcatctggcgagagattccatccagaagaccaagcaacctagcgcaccgctcaccacagcgaccacagtgaccagtgaaccgaagcaatctgcgcccaaaaggaaagctacaaactcaagtctccagtccagaccaaaaaagcgattaatagacgctctagtggaacagtctcaagatgacgaagatgagctcgatgaagatatccttgaaaatctactcaagccaactcagtccagtctgagacaaatgagcatcgagccggatcttcccagtctgccgtcaactccgaatagtaaagccagaggtgtaccgggcacaggagctcgcaccttccaacgttccagcagcgcactcaagttcacctatggacaaagtcgaaaagtgctggaagaagaagataacttgctagagtcgttagctcttccagaatcttcgtcttattctttgaaaggcaggcgcttggaattaggtgttccaaagaaacccgtgcctacaatggggatgttcgacgacgacgatcccacagactctccaagttcgaaacttcgtgatattcatgaacttcgccaagcgggagcaaattcgcgggctgcagataccatgcaggaccttattgatcggatgggtaaagcaggcgtaagatcatcttcgcgccgatcagcattgttagaagtagcagaaaaactgagagagaagacttacattcgacaatgccgtgaccatggggccgaaagcgcgatgttgagaggagttggcgaagagactgatgttatttgcggctatctcatcttttcgtctctggcgacgatcatggcgaaggatccatccgcacacataggtcgtgtcctacaggaggaagaagcagggcctctgttcgctcgtttgctacgcattcgagaagacattaagagaattgtgaaagatcgcaaaagcaatgtttcaccaaggaaccagagctccatcatatcagttgaaggctcactgcagaagctatctatctgggaagaaggtcggccttcatacatctcaccaaggcatctcgctatcaaatgcttgcaactactcatcgcgcaaggtgccatcaccggcgagaacacaatcattttcgccgaagatgtcacgaagcacctcttcgatgtactgttggatgccggtacaagcgatgactattgggagtatccgacgacaacacaggctatggaactctactgcacactctctgtgctcgaggttcatgtcattgcatcggcattggttgatggcgaaagacaaagaaccaacagatatcttccgaacgtggccgatgctttccatgcttggcttcaaacgccagcacgttgcggcgaggctatgaatatgtcgatacttaaattggtactcaacttgacgaacgacaatgacgaagccactgagatcttcgctcgaaaaggaattattgctcccttggccgcctctgcttgtactgcctttaatcaggccgtaacatctatctcacaaggcctctggacggaacgatctatggaccccgttattctccgacttggtattctgatcaacttcgccgagggtagtcccatgataaggcagatcatgacgaatggtcaacacaagaatgaaaggccactgaacgagttcattcgcatattcctagaccatcaccgacgaacaggagaggctgactcgatcgaaaaatcacataccaatgttgcggtcggctacatatctgtgcttcttggctacctagcattgcataagccaacacgcttgagaatcaaagccacgcacccatcgaggagcatcggccccttgacggaatcaattcgagagttcaacacccatcatgagcaggttgagaatgccatgaacgaacataacggcattgaggcccacagcaacaatagccagtacacggaaagactacgagcattgatcctgcagctggaattcgaggcatcaaaggactgagatttcgaaagacacatctccctcgacagctgcatcattctgttggagcacactatgtctgcatagcttgtagcgatgagaggttagatcatgtattactaggcgaatttctcagcatgattttcaaacaggccggcgcggtggaaaacgtgacgacgaactgcatctttttttcattcaatacccgggggttaacgcggatatcttgtatttatcaaattagagagggaggtgaaaacccagtacccaagtcatgacggaacgcgagatgaattctgaagactaccaccccggcttctccaagtatgtagtgcgtgttgcttggctgatcatgtgctctattgtgagtacctctgataccgattctgtgaatgctcacttaggacttcccgatgatgcccggcaagcccgattgaga

SEQ ID NO: 14486 - DNA, 747 bp, Muscodor strobelii
  misc_feature: SGI cDNA ID NO. 564774
  misc_feature: Encodes the peptide sequence at SEQ ID NO 14487
atggcttcagcaccggcaaaacgccctggggtggctcctacacaatgcgtaggacctgaatacaggtctgaaagccagaagccaattgccaccgtttctaccgaggtgaaatacgagactgtcaccaccttggctcagacaccacagcttatcgctctgctcaccaaaatccgtgataagaacacagatcgcgccgacttcatcttctactcgaaccgaattattcgtttgctggtcgaggagggtctcaatcatctacctgtcgttgagcatacagtgacaactcccgtcggccgtaactatgccggcctgctgttccagggcaaaatctgcggtgtctcgatcatgagagcgggcgaggcaatggagcagggccttcgggattgttgccggtctgtgagaatcggcaagatactaattcagcgtgacgaggagacttctcagccgaagttattctacgataagctgcctgaggacatcgctgagcgatgggtgcttttgcttgatcccatgtttgctacaggtggctccgccattatggctgtcaatgtcctcaaggagcggggagtgcctgaagagaggatcatattcctgaacttgatcgcaagtccagagggaattcagaacttcgccatcaaattcccgcagttgagagtcgttacagcgttcgtagatcagggtctcgactcaaggaattatatcgtacctggactcggagacttcggcgacagattctataccatgtag

SEQ ID NO: 14487 - protein, 248 aa, Muscodor strobelii
  misc_feature: SGI Peptide ID NO. 564774
  misc_feature (64)..(220): Pfam Id: PF00156 Pfam Desc: Phosphoribosyl transferase domain
  misc_feature (156)..(220): Pfam Id: PF00156 Pfam Desc: Phosphoribosyl transferase domain
  misc_feature (11)..(248): NCBI GI: 85077083 Blast Desc: uracil phosphoribosyltransferase [Neurospora crassa OR74A] gi|28917005|gb|EAA26732.1| uracil phosphoribosyltransferase [Neurospora crassa OR74A] uracil FUR1
  misc_feature (5)..(248): NCBI GI: 145605709 Blast Desc: conserved [Magnaporthe grisea 70-15] gi|145013515|gb|EDJ98156.1| conserved [Magnaporthe grisea 70-15]
  misc_feature (14)..(248): NCBI GI: 116199285 Blast Desc: conserved [Chaetomium globosum CBS 148.51] gi|88179077|gb|EAQ86545.1| conserved [Chaetomium globosum CBS 148.51]
  misc_feature (12)..(248): NCBI GI: 256731253 Blast Desc: [Nectria haematococca mpVI 77-13-4]
  misc_feature (12)..(248): NCBI GI: 156064365 Blast Desc: uracil phosphoribosyltransferase [Sclerotinia sclerotiorum 1980] gi|154691052|gb|EDN90790.1| uracil phosphoribosyltransferase [Sclerotinia sclerotiorum 1980]
  misc_feature (12)..(248): NCBI GI: 242794664 Blast Desc: cytosine deaminase-uracil phosphoribosyltransferase fusion protein [Talaromyces stipitatus ATCC 10500] gi|218719009|gb|EED18429.1| cytosine deaminase-uracil fusion ATCC
  misc_feature (12)..(248): NCBI GI: 212536020 Blast Desc: cytosine deaminase-uracil phosphoribosyltransferase fusion protein [Penicillium marneffei ATCC 18224] gi|210070565|gb|EEA24655.1| cytosine deaminase-uracil fusion ATCC
  misc_feature (14)..(248): NCBI GI: 46126195 Blast Desc: FG07475.1 [Gibberella zeae PH-1]
  misc_feature (12)..(248): NCBI GI: 169612607 Blast Desc: SNOG_09427 [Phaeosphaeria nodorum SN15] gi|111062499|gb|EAT83619.1| SNOG_09427 [Phaeosphaeria nodorum SN15]
  misc_feature (12)..(248): NCBI GI: 189189980 Blast Desc: uracil phosphoribosyltransferase [Pyrenophora tritici-repentis Pt-1C-BFP] gi|187972935|gb|EDU40434.1| uracil phosphoribosyltransferase [Pyrenophora tritici-repentis
  misc_feature (38)..(248): SWISSPROT Homolog: EC 2.4.2.9 Uracil phosphoribosyltransferase
MASAPAKRPGVAPTQCVGPEYRSESQKPIATVSTEVKYETVTTLAQTPQLIALLTKIRDKNTDRADFIFYSNRIIRLLVEEGLNHLPVVEHTVTTPVGRNYAGLLFQGKICGVSIMRAGEAMEQGLRDCCRSVRIGKILIQRDEETSQPKLFYDKLPEDIAERWVLLLDPMFATGGSAIMAVNVLKERGVPEERIIFLNLIASPEGIQNFAIKFPQLRVVTAFVDQGLDSRNYIVPGLGDFGDRFYTM

SEQ ID NO: 14488 - DNA, 1999 bp, Muscodor strobelii
  misc_feature: SGI EST ID NO. CUFF.34730.1
  misc_feature: Variant of the nucleotide sequence at SEQ ID NO 14486
ctcgtggtgacctgcaggaggcgggcatgtccgggcacaagctggctggacctcagcgttgaacatttgcatttgccattactgtcgagatctggaacttctacagcagttattgcccacttcagaatttgacatagcccctcctcttgctactccctagacattcaatattgaagcaaatggtatttgttcattcaatcattcagcagtcttcccgtattctacagatcaaaggcgtgaaaacgaatataagtctcgaagtgcacctgcatttgtcttactcgcgctaagcaggtcgtgcattacaagcaattctacgttaattctatattcattagctgcaagttattcaagatcctctcaccgttccctgtcatggcttcagcaccggcaaaacgccctggggtggctcctacacaatgcgtaggacctgaatacaggtctgaaagccagaagccaattgccaccgtttctaccgaggtgaaatacgagactgtcaccaccttggctcagacaccacagcttatcgctctgctcaccaaaatccgtgataagaacacagatcgcgccgacttcatcttctactcgaaccgaattattcgtttgctggtcgaggagggtctcaatcatctacctgtcgttgagcatacagtgacaactcccgtcggccgtaactatgccggcctgctgttccagggcaaaatctgcggtgtctcgatcatgagagcgggcgaggcaatggagcagggccttcgggattgttgccggtctgtgagaatcggcaagatactaattcagcgtgacgaggagacttctcagccgaagttattctacgataagctgcctgaggacatcgctgagcgatgggtgcttttgcttgatcccatgtttgctacaggtggctccgccattatggctgtcaatgtcctcaaggagcggggagtgcctgaagagaggatcatattcctgaacttgatcgcaagtccagagggaattcagaacttcgccatcaaattcccgcagttgagagtcgttacagcgttcgtagatcagggtctcgactcaaggaattatatcgtacctggactcggagacttcggcgacagattctataccatgtagacaatcatcagctttgttggttgggttggagtatggccgcgaggtatatgggactagcagtatgtttgcaagttattatattcgcaggactaccctctgattcgtcaatgcgttaaagtcacaaaggacaatgcaagattgtccatctaggctagcatcagttcctttgcctatttccttaaggatttctccctctttcaaaccaccgcctctgtgccatggatacgtaaactgtaagcatgtataagtccagtgtttaaaggccagcctatatttatatccgcaaagtgatgagagactagatcaatactcctcgtcgtctcccacaatgccctctccttcgtactgatggtcatcctcttcgtcttccacttctctatccgctcgggggcgcgcagcagcacgtggcatcgcagatccggagcctcgatcggcagctgagtccttcgcgacagcatctagttatcagattgatcagtctttggtcctcttctgtatcccccatttgggcagttgcaacaaccgcgaacgtacctgcggcgtcgacccattcgctgtagacatcaatagcatccatgagcgctttccaccgtagtcagcacaagcaggtcggtcgtagtcgttggaggtaggataacgaacaatgaatgccacactggaaatgttgaccacagaccgcacaagatagttctcccacgccaagtttcttattcagcttgacggtgacagacttctcgtgattgcaaaacagacaggtgaactcttttgccagaggctcgcgctatacatgtgtattgtcttttagtatgttcgtaggtcgaggtcggcgaggctgtgtaccttcttggggccttgcggctttcgcgacgacttcttg

SEQ ID NO: 14489 - DNA, 390 bp, Muscodor strobelii
  misc_feature: SGI cDNA ID NO. 564775
  misc_feature: Encodes the peptide sequence at SEQ ID NO 14490
atgggtaaacgcaagaagtcgtcgcgaaagccgcaaggccccaagaagcgcgagcctctggcaaaagagttcacctgtctgttttgcaatcacgagaagtctgtcaccgtcaagctgaataagaaacttggcgtgggagaactatcttgtgcggtctgtggtcaacatttccagtgtggcattcattcgctcatggatgctattgatgtctacagcgaatgggtcgacgccgcagatgctgtcgcgaaggactcagctgccgatcgaggctccggatctgcgatgccacgtgctgctgcgcgcccccgagcggatagagaagtggaagacgaagaggatgaccatcagtacgaaggagagggcattgtgggagacgacgaggagtattga

SEQ ID NO: 14490 - protein, 129 aa, Muscodor strobelii
  misc_feature: SGI Peptide ID NO. 564775
  misc_feature (9)..(69): Pfam Id: PF05129 Pfam Desc: Transcription elongation factor Elf1 like
  misc_feature (1)..(107): NCBI GI: 242794675 Blast Desc: conserved [Talaromyces stipitatus ATCC 10500] gi|218719011|gb|EED18431.1| conserved [Talaromyces stipitatus ATCC 10500]
  misc_feature (1)..(86): NCBI GI: 238503384 Blast Desc: transcription elongation factor, [Aspergillus flavus NRRL3357] gi|220690396|gb|EED46745.1| transcription elongation factor, [Aspergillus flavus NRRL3357]
  misc_feature (1)..(129): NCBI GI: 171692729 Blast Desc: protein product [Podospora anserina] gi|170946313|emb|CAP73114.1| protein product [Podospora anserina]
  misc_feature (1)..(86): NCBI GI: 212536022 Blast Desc: conserved [Penicillium marneffei ATCC 18224] gi|210070566|gb|EEA24656.1| conserved [Penicillium marneffei ATCC 18224]
  misc_feature (1)..(86): NCBI GI: 255943681 Blast Desc: Pc20g00450 [Penicillium chrysogenum Wisconsin 54-1255] gi|211587343|emb|CAP85374.1| Pc20g00450 [Penicillium chrysogenum Wisconsin 54-1255]
  misc_feature (1)..(87): NCBI GI: 259482909 Blast Desc: TPA: [Aspergillus nidulans FGSC A4]
  misc_feature (1)..(86): NCBI GI: 121717540 Blast Desc: zinc finger protein, [Aspergillus clavatus NRRL 1] gi|119404279|gb|EAW14655.1| zinc finger protein, [Aspergillus clavatus NRRL 1]
  misc_feature (1)..(95): NCBI GI: 119182660 Blast Desc: CIMG_06348 [Coccidioides immitis RS]
  misc_feature (1)..(111): NCBI GI: 225685088 Blast Desc: transcription elongation factor [Paracoccidioides brasiliensis Pb03]
  misc_feature (1)..(107): NCBI GI: 226294401 Blast Desc: transcription elongation factor 1 [Paracoccidioides brasiliensis Pb18]
MGKRKKSSRKPQGPKKREPLAKEFTCLFCNHEKSVTVKLNKKLGVGELSCAVCGQHFQCGIHSLMDAIDVYSEWVDAADAVAKDSAADRGSGSAMPRAAARPRADREVEDEEDDHQYEGEGIVGDDEEY

SEQ ID NO: 14491 - DNA, 1587 bp, Muscodor strobelii
  misc_feature: SGI EST ID NO. CUFF.34731.2
  misc_feature: Variant of the nucleotide sequence at SEQ ID NO 14489
tgcaacttccaggtccaatgagcctctgaatttgtacatttgatcttcattgattctggttgcccctcccccgcgcatcaagacagaccgattctcttatcgatacatttatctattctgctagcgtcaaatagcggtagcactaacgaccgattctctttgtggcttgcagtgaaatagggaaacacgcattgctgggattcaatcaccaggttctggtattggcaatgaggcgcctggtggaaatagtctttgtcctcgattctccattcagtgtggaaagaaatcggtcatcattcggcaacacaggccgatattttgtgccggtctccttggtctgttctgtgctggagttcctggtctattcatggtgaagcaaaaccgcctgtaattatagcgctttcctagcctgtaattatagcatatctcgtctgaagcgagataggacagaagtcgtaattacgtcatcttcaacgctttcgcgctttgcactagctggggcgcaaccaacgcgactctgaagtgaaagacccttgttccgctttgcgacgccgaatctctaacctctacacacctgtgtcgccgccctttcaacccatttccaggccggcgcaagcaccatgggtaaacgcaagaagtcgtcgcgaaagccgcaaggccccaagaagcgcgagcctctggcaaaagagttcacctgtctgttttgcaatcacgagaagtctgtcaccgtcaagctgaataagaaacttggcgtgggagaactatcttgtgcggtctgtggtcaacatttccagtgtggcattcattcgctcatggatgctattgatgtctacagcgaatgggtcgacgccgcagatgctgtcgcgaaggactcagctgccgatcgaggctccggatctgcgatgccacgtgctgctgcgcgcccccgagcggatagagaagtggaagacgaagaggatgaccatcagtacgaaggagagggcattgtgggagacgacgaggagtattgatctagtctctcatcactttgcggatataaatataggctggcctttaaacactggacttatacatgcttacagtttacgtatccatggcacagaggcggtggtttgaaagagggagaaatccttaaggaaataggcaaaggaactgatgctagcctagatggacaatcttgcattgtcctttgtgactttaacgcattgacgaatcagagggtagtcctgcgaatataataacttgcaaacatactgctagtcccatatacctcgcggccatactccaacccaaccaacaaagctgatgattgtctacatggtatagaatctgtcgccgaagtctccgagtccaggtacgatataactagatcgggattagaaatgagcactttgattgtagtgactttacttacttccttgagtcgagaccctgatctacgaacgctgtaacgactctcaactgcgggaatttgatggcgaagttctgaattccctctggacttgcgatcaagttcaggaatatgatcctctcttcaggcactccccgctccttgaggacattgacagccataatggcggagccacc

SEQ ID NO: 14492 - DNA, 1509 bp, Muscodor strobelii
  misc_feature: SGI cDNA ID NO. 564776
  misc_feature: Encodes the peptide sequence at SEQ ID NO 14493
atggctagcacctcagatagcaatggcggtatggccgacgttttgcaggtcctgaaggccatccaagaaaaccaaagcaagttagctgccgaggttgaatctatttctcagcgtgttgacacgcttgcgcctcctgctcagagtccggatctagacaagaaaacaacatctgaagatcaacctcctgcggtttcggctctgccgtccccagccgtaagcggatcgtcgcccggaaatgctgctacacaagcagagcaatcgggtttcacatctcgaatcattctgacaacgtatccgaaacaaataggcatcaagcctattcctctcaattggggcgcgcagggacctgaaagaggtcccgtagttgtttctagagcttcatccacgattcggaaacgtaacgctatcggagcacacggtggctcctattcgatctacttcgcgctagcagtagctagcaagcagctcaatgttaaccacaggcctgacttcaccaacacggagcccgctgctaatattggaccatttccacaatgggctgacaagaagaaaattgttgctatggacccatggggtcatctggcaccctggatgttcgcggagaccatgcaaaaggagaatgtggacattcgaccaaccattgcaattaccaaggcccacatgaagcttccagaactcgaagagagcgttcgaagcggcagattagtacctgacggcaaagtctgtttgaatgctctcggtgaattggctgtgacaaagttcgctgttgagcctgtttggtatcttcctggcgtggctgagcgattcggcattgacgagggtgtgctgcgacggtctctgtttgagcatacaggtggaagctatcccgagctcattactcgaaatgatatcaaagtcttcctgcctccgattggtggtctaacggtctactgctttggcgatccggctaagatgtccgatgcaaacgcaagattatccttgcgaattcatgatgagtgtaatggtagtgacgtgtttggatccgatatctgcacttgcaggccttatctcatcttcggtatcgaggaagccgtcaaagaagcccagaagggcggcagtggagttgtcatctacttcagaaaggaaggtagagctcttggtgaagtcacgaaggtactggtatataatgcgcggaagcgcggcgaagatcgtgcttcggactatttcaaacgaaccgagaacattgccggtgtgaaggatatgagattccaagctctcatgcctgatatactccactggctcggcataaccaagattgatagaatgctgagtatgagcaacatgaaacacgatgccatcgttggacaaggtattccaattcacgagcgagtggagttgcccgaagaactgatccctgcggactcgcgtgttgaaatcgatgcgaagatcactgccggatacttcacaactggccacagaatgaccgaggacgaattgaaagcggttcaagggcgcatgtgggaagagtaa

SEQ ID NO: 14493 - protein, 502 aa, Muscodor strobelii
  misc_feature: SGI Peptide ID NO. 564776
  misc_feature (7)..(502): NCBI GI: 46126199 Blast Desc: FG07477.1 [Gibberella zeae PH-1]
  misc_feature (2)..(502): NCBI GI: 145605707 Blast Desc: GTP cyclohydrolase II, [Magnaporthe grisea 70-15] gi|145013513|gb|EDJ98154.1| GTP cyclohydrolase II, [Magnaporthe grisea 70-15]
  misc_feature (12)..(502): NCBI GI: 256731252 Blast Desc: [Nectria haematococca mpVI 77-13-4]
  misc_feature (1)..(502): NCBI GI: 171692731 Blast Desc: protein product [Podospora anserina] gi|170946314|emb|CAP73115.1| protein product [Podospora anserina]
  misc_feature (6)..(502): NCBI GI: 240109354 Blast Desc: conserved [Coccidioides posadasii C735 delta SOWgp]
  misc_feature (4)..(502): NCBI GI: 189189984 Blast Desc: GTP cyclohydrolase II [Pyrenophora tritici-repentis Pt-1C-BFP] gi|187972937|gb|EDU40436.1| GTP cyclohydrolase II [Pyrenophora tritici-repentis Pt-1C-BFP]
  misc_feature (10)..(479): NCBI GI: 85077097 Blast Desc: NCU01449 [Neurospora crassa OR74A] gi|28917008|gb|EAA26735.1| NCU01449 [Neurospora crassa OR74A] gi|28950334|emb|CAD70959.1| conserved [Neurospora crassa]
  misc_feature (2)..(502): NCBI GI: 261190408 Blast Desc: GTP cyclohydrolase [Ajellomyces dermatitidis SLH14081] gi|239591036|gb|EEQ73617.1| GTP cyclohydrolase [Ajellomyces dermatitidis SLH14081] gi|239614952|gb|EEQ91939.1| GTP II ER-3]
  misc_feature (5)..(502): NCBI GI: 169612603 Blast Desc: SNOG_09425 [Phaeosphaeria nodorum SN15] gi|160702544|gb|EAT83617.2| SNOG_09425 [Phaeosphaeria nodorum SN15]
  misc_feature (6)..(502): NCBI GI: 119182658 Blast Desc: CIMG_06347 [Coccidioides immitis RS]
MASTSDSNGGMADVLQVLKAIQENQSKLAAEVESISQRVDTLAPPAQSPDLDKKTTSEDQPPAVSALPSPAVSGSSPGNAATQAEQSGFTSRIILTTYPKQIGIKPIPLNWGAQGPERGPVVVSRASSTIRKRNAIGAHGGSYSIYFALAVASKQLNVNHRPDFTNTEPAANIGPFPQWADKKKIVAMDPWGHLAPWMFAETMQKENVDIRPTIAITKAHMKLPELEESVRSGRLVPDGKVCLNALGELAVTKFAVEPVWYLPGVAERFGIDEGVLRRSLFEHTGGSYPELITRNDIKVFLPPIGGLTVYCFGDPAKMSDANARLSLRIHDECNGSDVFGSDICTCRPYLIFGIEEAVKEAQKGGSGVVIYFRKEGRALGEVTKVLVYNARKRGEDRASDYFKRTENIAGVKDMRFQALMPDILHWLGITKIDRMLSMSNMKHDAIVGQGIPIHERVELPEELIPADSRVEIDAKITAGYFTTGHRMTEDELKAVQGRMWEE

SEQ ID NO: 14494 - DNA, 2374 bp, Muscodor strobelii
  misc_feature: SGI EST ID NO. CUFF.34772.2
  misc_feature: Variant of the nucleotide sequence at SEQ ID NO 14492
tgacttgcgggtccggagccatggactggaacctcgactaagacaagccacgcatccgatctccgaacgtgctcccttaatttctggccattagtcttggaacgtttacctaaccttcttactattatcgttcgaattcattgaatctggaagaatctcaactgcccctagtttaggcgttccgaccgttggctgaagtgctccccgcgttgttctaagtctctcgctattcactgggcagattatcggagtcggaaagttatccggaataggcccaacagcaagatcactcacgatctctctccgtcaactttcatcatggctagcacctcagatagcaatggcggtatggccgacgttttgcaggtcctgaaggccatccaagaaaaccaaagcaagttagctgccgaggttgaatctatttctcagcgtgttgacacgcttgcgcctcctgctcagagtccggatctagacaagaaaacaacatctgaagatcaacctcctgcggtttcggctctgccgtccccagccgtaagcggatcgtcgcccggaaatgctgctacacaagcagagcaatcgggtttcacatctcgaatcattctgacaacgtatccgaaacaaataggcatcaagcctattcctctcaattggggcgcgcagggacctgaaagaggtcccgtagttgtttctagagcttcatccacgattcggaaacgtaacgctatcggagcacacggtggctcctattcgatctacttcgcgctagcagtagctagcaagcagctcaatgttaaccacaggcctgacttcaccaacacggagcccgctgctaatattggaccatttccacaatgggctgacaagaagaaaattgttgctatggacccatggggtcatctggcaccctggatgttcgcggagaccatgcaaaaggagaatgtggacattcgaccaaccattgcaattaccaaggcccacatgaagcttccagaactcgaagagagcgttcgaagcggcagattagtacctgacggcaaagtctgtttgaatgctctcggtgaattggctgtgacaaagttcgctgttgagcctgtttggtatcttcctggcgtggctgagcgattcggcattgacgagggtgtgctgcgacggtctctgtttgagcatacaggtggaagctatcccgagctcattactcgaaatgatatcaaagtcttcctgcctccgattggtggtctaacggtctactgctttggcgatccggctaagatgtccgatgcaaacgcaagattatccttgcgaattcatgatgagtgtaatggtagtgacgtgtttggatccgatatctgcacttgcaggccttatctcatcttcggtatcgaggaagccgtcaaagaagcccagaagggcggcagtggagttgtcatctacttcagaaaggaaggtagagctcttggtgaagtcacgaaggtacgttttttttttcaattgttctaccttagtcttcgcttgtttgctaaccatatatagtatcgtaagtactattcccaattatgtctctaagagcgatgttgatgagatgatgttgtagtggtatataatgcgcggaagcgcggcgaagatcgtgcttcggactatttcaaacgaaccgagaacattgccggtgtgaaggatatgagattccaagctctcatgcctgatatactccactggctcggcataaccaagattgatagaatgctgagtatgagcaacatgaaacacgatgccatcgttggacaagggtaagcagtctattgttctataatcgatttcacgaacctaatacataacagtattccaattcacgagcgagtggagttgcccgaagaactgatccctgcggactcgcgtgttgaaatcgatgcgaagatcactgccggtttgctttgccctccggagccgcgaatcaggataaaaacagctgaccaagtgcaggatacttcacaactggccacagaatgaccgaggacgaattgaaagcggttcaagggcgcatgtgggaagacattgatcactgaggaggagccaatagagtcttatgtatgtgtgccgatgaccgatgaccgcagtaggaaacgaccactgggaactgcatcttcaaggtttatatgcacagtagctagtactagaagcacatacatgcgagacatgttagccttgtgtgaacaatagaatgtccccgcagctgggatcatccacgcgtacagcttcacatcgccgcccagatcgcgtctctcgtgctttgtttccggaaatgtgtgacagctccgtgtctgctgtgagaggtcgcgaccaatgccgagacggtgcttcccaagataccatgctaaag

SEQ ID NO: 14495 - DNA, 1494 bp, Muscodor strobelii
  misc_feature: SGI cDNA ID NO. 564777
  misc_feature: Reduced expression when VOC is produced
  misc_feature: Encodes the peptide sequence at SEQ ID NO 14496
atggctagcacctcagatagcaatggcggtatggccgacgttttgcaggtcctgaaggccatccaagaaaaccaaagcaagttagctgccgaggttgaatctatttctcagcgtgttgacacgcttgcgcctcctgctcagagtccggatctagacaagaaaacaacatctgaagatcaacctcctgcggtttcggctctgccgtccccagccgtaagcggatcgtcgcccggaaatgctgctacacaagcagagcaatcgggtttcacatctcgaatcattctgacaacgtatccgaaacaaataggcatcaagcctattcctctcaattggggcgcgcagggacctgaaagaggtcccgtagttgtttctagagcttcatccacgattcggaaacgtaacgctatcggagcacacggtggctcctattcgatctacttcgcgctagcagtagctagcaagcagctcaatgttaaccacaggcctgacttcaccaacacggagcccgctgctaatattggaccatttccacaatgggctgacaagaagaaaattgttgctatggacccatggggtcatctggcaccctggatgttcgcggagaccatgcaaaaggagaatgtggacattcgaccaaccattgcaattaccaaggcccacatgaagcttccagaactcgaagagagcgttcgaagcggcagattagtacctgacggcaaagtctgtttgaatgctctcggtgaattggctgtgacaaagttcgctgttgagcctgtttggtatcttcctggcgtggctgagcgattcggcattgacgagggtgtgctgcgacggtctctgtttgagcatacaggtggaagctatcccgagctcattactcgaaatgatatcaaagtcttcctgcctccgattggtggtctaacggtctactgctttggcgatccggctaagatgtccgatgcaaacgcaagattatccttgcgaattcatgatgagtgtaatggtagtgacgtgtttggatccgatatctgcacttgcaggccttatctcatcttcggtatcgaggaagccgtcaaagaagcccagaagggcggcagtggagttgtcatctacttcagaaaggaaggtagagctcttggtgaagtcacgaagcgcggcgaagatcgtgcttcggactatttcaaacgaaccgagaacattgccggtgtgaaggatatgagattccaagctctcatgcctgatatactccactggctcggcataaccaagattgatagaatgctgagtatgagcaacatgaaacacgatgccatcgttggacaaggtattccaattcacgagcgagtggagttgcccgaagaactgatccctgcggactcgcgtgttgaaatcgatgcgaagatcactgccggatacttcacaactggccacagaatgaccgaggacgaattgaaagcggttcaagggcgcatgtgggaagacattgatcactga

SEQ ID NO: 14496 - protein, 497 aa, Muscodor strobelii
  misc_feature: SGI Peptide ID NO. 564777
  misc_feature (2)..(497): NCBI GI: 145605707 Blast Desc: GTP cyclohydrolase II, [Magnaporthe grisea 70-15] gi|145013513|gb|EDJ98154.1| GTP cyclohydrolase II, [Magnaporthe grisea 70-15]
  misc_feature (7)..(494): NCBI GI: 46126199 Blast Desc: FG07477.1 [Gibberella zeae PH-1]
  misc_feature (12)..(497): NCBI GI: 256731252 Blast Desc: [Nectria haematococca mpVI 77-13-4]
  misc_feature (1)..(494): NCBI GI: 171692731 Blast Desc: protein product [Podospora anserina] gi|170946314|emb|CAP73115.1| protein product [Podospora anserina]
  misc_feature (6)..(496): NCBI GI: 240109354 Blast Desc: conserved [Coccidioides posadasii C735 delta SOWgp]
  misc_feature (4)..(497): NCBI GI: 189189984 Blast Desc: GTP cyclohydrolase II [Pyrenophora tritici-repentis Pt-1C-BFP] gi|187972937|gb|EDU40436.1| GTP cyclohydrolase II [Pyrenophora tritici-repentis Pt-1C-BFP]
  misc_feature (2)..(497): NCBI GI: 261190408 Blast Desc: GTP cyclohydrolase [Ajellomyces dermatitidis SLH14081] gi|239591036|gb|EEQ73617.1| GTP cyclohydrolase [Ajellomyces dermatitidis SLH14081] gi|239614952|gb|EEQ91939.1| GTP II ER-3]
  misc_feature (5)..(497): NCBI GI: 169612603 Blast Desc: SNOG_09425 [Phaeosphaeria nodorum SN15] gi|160702544|gb|EAT83617.2| SNOG_09425 [Phaeosphaeria nodorum SN15]
  misc_feature (10)..(471): NCBI GI: 85077097 Blast Desc: NCU01449 [Neurospora crassa OR74A] gi|28917008|gb|EAA26735.1| NCU01449 [Neurospora crassa OR74A] gi|28950334|emb|CAD70959.1| conserved [Neurospora crassa]
  misc_feature (6)..(497): NCBI GI: 119182658 Blast Desc: CIMG_06347 [Coccidioides immitis RS]
  misc_feature: Useful for introducing or modulating the production of volatile compounds
MASTSDSNGGMADVLQVLKAIQENQSKLAAEVESISQRVDTLAPPAQSPDLDKKTTSEDQPPAVSALPSPAVSGSSPGNAATQAEQSGFTSRIILTTYPKQIGIKPIPLNWGAQGPERGPVVVSRASSTIRKRNAIGAHGGSYSIYFALAVASKQLNVNHRPDFTNTEPAANIGPFPQWADKKKIVAMDPWGHLAPWMFAETMQKENVDIRPTIAITKAHMKLPELEESVRSGRLVPDGKVCLNALGELAVTKFAVEPVWYLPGVAERFGIDEGVLRRSLFEHTGGSYPELITRNDIKVFLPPIGGLTVYCFGDPAKMSDANARLSLRIHDECNGSDVFGSDICTCRPYLIFGIEEAVKEAQKGGSGVVIYFRKEGRALGEVTKRGEDRASDYFKRTENIAGVKDMRFQALMPDILHWLGITKIDRMLSMSNMKHDAIVGQGIPIHERVELPEELIPADSRVEIDAKITAGYFTTGHRMTEDELKAVQGRMWEDIDH

SEQ ID NO: 14497 - DNA, 2374 bp, Muscodor strobelii; identical to SEQ ID NO: 14494
  misc_feature: SGI EST ID NO. CUFF.34772.2
  misc_feature: Variant of the nucleotide sequence at SEQ ID NO 14495

SEQ ID NO: 14498 - DNA, 771 bp, Muscodor strobelii
  misc_feature: SGI cDNA ID NO. 564778
  misc_feature: Reduced expression when VOC is produced
  misc_feature: Encodes the peptide sequence at SEQ ID NO 14499
atggcggtcggaaagaacaagagattgtcaaagggcaagaagggtctcaagaagaaggcccaggaccccttcgcccgcaaggactggttctccatcaaggcccccgctccctttaacgtcagagatgtcggcaagaccctggtcaaccgctccaccggtctgaagaacgccaacgacgccctcaagggccgcatcctcgaggtctccctcgccgatctgcagaaggatgaggaccacgctttccgcaaggtcaagctcagagtcgacgaggttcagggcaagaactgcttgaccaacttctacggtctcgacttcacctccgacaagctgcgatcgcttgtccgcaagtggcagtccctcatcgaggccaacgtcaccgtcaagaccaccgacgactacctcctccgcctcttcgccattgccttcaccaagcgccgacccaaccaggtccgcaagaccacctacgccgcctcttcccagattcgcgccatccgaaagaagatggtcgagatcatccagcgtgaggctgctacctgcaccctgcagcagttgacgtctaagctcatccccgaggtcatcggccgcgagatcgagaagtccacccagggcatctaccccctccagaacgttcacatccgcaaggtcaagctactgaaggctcccaagttcgacctcggtgccttgatggccctccacggggagtccacgacgaacgaggacggacagaagatcgagcgggagttcaaggagcgtgtgcttgaggaggtctaa

SEQ ID NO: 14499 - protein, 256 aa, Muscodor strobelii
  misc_feature: SGI Peptide ID NO. 564778
  misc_feature (11)..(222): Pfam Id: PF01015 Pfam Desc: Ribosomal S3Ae family
  misc_feature (1)..(256): NCBI GI: 39978069 Blast Desc: conserved [Magnaporthe grisea 70-15] gi|269969585|sp|A4R1I7.1|RS3A_MAGGR RecName: Full=40S ribosomal protein S1 gi|145013511|gb|EDJ98152.1| conserved [Magnaporthe
  misc_feature (1)..(256): NCBI GI: 59802924 Blast Desc: 40S ribosomal protein S1-like protein [Magnaporthe grisea]
  misc_feature (1)..(256): NCBI GI: 269969589 Blast Desc: RS3A_NECH7 RecName: Full=40S ribosomal protein S1 gi|256731251|gb|EEU44601.1| [Nectria haematococca mpVI 77-13-4]
  misc_feature (1)..(256): NCBI GI: 164429338 Blast Desc: 40S ribosomal protein S1 [Neurospora crassa OR74A] gi|74663575|sp|Q871N9.1|RS3A_NEUCR RecName: Full=40S ribosomal protein S1; AltName: Full=Cytoplasmic ribosomal protein 8 protein
  misc_feature (1)..(256): NCBI GI: 255943679 Blast Desc: Pc20g00440 [Penicillium chrysogenum Wisconsin 54-1255] gi|269969599|sp|B6HFE0.1|RS3A_PENCW RecName: Full=40S ribosomal protein S1 gi|211587342|emb|CAP85373.1| Pc20g00440 [Penicillium
  misc_feature (1)..(256): NCBI GI: 169765315 Blast Desc: [Aspergillus oryzae RIB40] gi|238503382|ref|XP_002382924.1| 40S ribosomal protein S3Ae [Aspergillus flavus NRRL3357] gi|121806889|sp|Q2UTI8.1|RS3A_ASPOR
  misc_feature (1)..(256): NCBI GI: 121717536 Blast Desc: 40S ribosomal protein S3Ae [Aspergillus clavatus NRRL 1] gi|269969559|sp|A1C4N6.1|RS3A_ASPCL RecName: Full=40S ribosomal protein S1 gi|119404278|gb|EAW14654.1| 40S ribosomal 1]
  misc_feature (1)..(256): NCBI GI: 70998726 Blast Desc: 40S ribosomal protein S3Ae [Aspergillus fumigatus Af293] gi|119498653|ref|XP_001266084.1| 40S ribosomal protein S3Ae [Neosartorya fischeri NRRL 181] RecName: Full=40S ribosomal
  misc_feature (1)..(256): NCBI GI: 115438592 Blast Desc: 40S ribosomal protein S3aE [Aspergillus terreus NIH2624] gi|121733910|sp|Q0CA00.1|RS3A_ASPTN RecName: Full=40S ribosomal protein S1 gi|114188921|gb|EAU30621.1| 40S ribosomal
  misc_feature (1)..(256): NCBI GI: 154312122 Blast Desc: 40S ribosomal protein S3 [Botryotinia fuckeliana B05.10] gi|269969565|sp|A6RZS5.1|RS3A_BOTFB RecName: Full=40S ribosomal protein S1 gi|150850057|gb|EDN25250.1| 40S ribosomal S3
  misc_feature: Useful for introducing or modulating the production of volatile compounds
MAVGKNKRLSKGKKGLKKKAQDPFARKDWFSIKAPAPFNVRDVGKTLVNRSTGLKNANDALKGRILEVSLADLQKDEDHAFRKVKLRVDEVQGKNCLTNFYGLDFTSDKLRSLVRKWQSLIEANVTVKTTDDYLLRLFAIAFTKRRPNQVRKTTYAASSQIRAIRKKMVEIIQREAATCTLQQLTSKLIPEVIGREIEKSTQGIYPLQNVHIRKVKLLKAPKFDLGALMALHGESTTNEDGQKIEREFKERVLEEV

SEQ ID NO: 14500 - DNA, 1775 bp, Muscodor strobelii
  misc_feature: SGI EST ID NO. CUFF.35093.0
  misc_feature: Variant of the nucleotide sequence at SEQ ID NO 14498
gaaaaattatccagggccacactacaatttacagcacgctccatccatccaacctcacctgcacgccaatcccacacatcttcagcatcgtctaacctgcgagccatatcgagtacctcgcaaacatggcggtcggaaagaacaagagattgtcaaagggcaagaagggtctcaagaagaaggcccaggaccccttcgcccgcaaggactggttctccatcaaggcccccgctccctttaacgtcagagatgtcggcaagaccctggtcaaccgctccaccggtctgaagaacgccaacgacgccctcaagggccgcatcctcgaggtctccctcgccgatctgcagaaggatgaggaccacgctttccgcaaggtcaagctcagagtcgacgaggttcagggcaagaactgcttgaccaacttctacggtctcgacttcacctccgacaagctgcgatcgcttgtccgcaagtggcagtccctcatcgaggccaacgtcaccgtcaagaccaccgacgactacctcctccgcctcttcgccattgccttcaccaagcgccgacccaaccaggtccgcaagaccacctacgccgcctcttcccagattcgcgccatccgaaagaagatggtcgagatcatccagcgtgaggctgctacctgcaccctgcagcagttgacgtctaagctcatccccgaggtcatcggccgcgagatcgagaagtccacccagggcatctaccccctccagaacgttcacatccgcaaggtcaagctactgaaggctcccaagttcgacctcggtgccttgatggccctccacggggagtccacgacgaacgaggacggacagaagatcgagcgggagttcaaggagcgtgtgcttgaggaggtctaatttctgtgattatgtctggtcatggaacggcgcgggtttttctgcaatggcattaggtctcacttctgattgcattcggcgtggcagggaagccacggatacagctattccctcaaaaatgaatgaatgagaaatttagctgactacgcccggtcttgttatgaatagaagattggtgatgataccaaaagatcaatgattcttcggacaatgtatatgggcctgagagtgtcttcaggttaaccggtcgtcccaaataccacggccatggtctgtccagctctcaaggcgtgagccttgaggagagtgagactgactgagcttggcttcggacaaactataaactgtcaaactgggcaggccatttgcggcttgatggttttcatgttcagatccgatatcaaacacttggtcaaccagtttgaggctagtatttcggctgatgtcttgttcacaatgcagaagccagatagagatacaacagaaaatatgattctgttgccaacgccaaagtgataatttcaagtatcaatggactccagcctgagatatcagagattcgtttagagttttgtaagagtcggaacaaggattccccacaatcccaacgtttgtgactgaaactggggttgaactgaattgaacacggcctgtgacctgtgacgctcgtaacatttccccgagtctgaacatcaaacagacttcgcactttgtgccatagaaagaaaccccattaaactgtactgcgtaatcaatatagcattcagctcagcatccgtgcatcccgtcgtgccacttttagagcttattctcgctgcctattacctacctttgccaagtccctgccaatggctggagtgataggccaggaattcgcgg

SEQ ID NO: 14501 - DNA, 621 bp, Muscodor strobelii
  misc_feature: SGI cDNA ID NO. 564779
  misc_feature: Encodes the peptide sequence at SEQ ID NO 14502
atggctgctagttcggaggactcgcttcctgtcctcaagatattgattatcggaccgtcaggcgcggggaaatctgctttgttgctgagatactgtgaagaccacttcgatcccgagtcggcgtctgcaacgatcggtattgacttcaagatgaaaaagctacaagtcagaggcaaagcctacagattaaacatcttcgacacagccggtcaggagcgtttccgcactctgtcaacgagctactaccgaggcgcgcacgccgtcatattagtctatgacatttctaacagaaagagcttcgcgaccatggagaagtggtgtgaggaggcgaggactaatgctaaccctgaggctgtgctgtatctggtcggaagcaaactggacaaagtctctgcaggcggccgcgcagtctcaacagaagaaggcaagcggttcgccgaatcgcacggcgcgggattctgcgaaatcagctccaagacgcgggagaatgtcaagagaccgtttgtcgaggtcgttgaccaaattgtgcagaagccgtcgctgatcgccagcgcgttgccgaaacgggataacttcgacattggcgggttctcgggcgacaattcctcatgttcttgttga

SEQ ID NO: 14502 - protein, 206 aa, Muscodor strobelii
  misc_feature: SGI Peptide ID NO. 564779
  misc_feature (13)..(128): Pfam Id: PF08477 Pfam Desc: Miro-like protein
  misc_feature (13)..(177): Pfam Id: PF00071 Pfam Desc: Ras family
  misc_feature (1)..(206): NCBI GI: 39978071 Blast Desc: MGG_06920 [Magnaporthe grisea 70-15] gi|145013510|gb|EDJ98151.1| MGG_06920 [Magnaporthe grisea 70-15]
  misc_feature (4)..(185): NCBI GI: 171692737 Blast Desc: protein product [Podospora anserina] gi|170946317|emb|CAP73118.1| protein product [Podospora anserina]
  misc_feature (4)..(206): NCBI GI: 28950331 Blast Desc: related to GTP-binding protein rab18a [Neurospora crassa]
  misc_feature (4)..(206): NCBI GI: 156064377 Blast Desc: SS1G_00196 [Sclerotinia sclerotiorum 1980] gi|154691058|gb|EDN90796.1| SS1G_00196 [Sclerotinia sclerotiorum 1980]
  misc_feature (4)..(206): NCBI GI: 154312120 Blast Desc: BC1G_06093 [Botryotinia fuckeliana B05.10] gi|150850056|gb|EDN25249.1| BC1G_06093 [Botryotinia fuckeliana B05.10]
  misc_feature (6)..(184): NCBI GI: 260794026 Blast Desc: BRAFLDRAFT_122387 [Branchiostoma floridae] gi|229277224|gb|EEN48022.1| BRAFLDRAFT_122387 [Branchiostoma floridae]
  misc_feature (9)..(205): NCBI GI: 225711468 Blast Desc: Ras-related protein Rab-18 [Caligus rogercresseyi]
  misc_feature (7)..(181): NCBI GI: 198429489 Blast Desc: : similar to RAB18, member RAS oncogene family isoform 2 [Ciona intestinalis] gi|198429491|ref|XP_002131333.1| : similar to RAB18, member RAS oncogene family isoform 1 [Ciona
  misc_feature (6)..(187): NCBI GI: 47228002 Blast Desc: protein product [Tetraodon nigroviridis]
  misc_feature (6)..(184): NCBI GI: 34068436 Blast Desc: ras-related GTP-binding protein Rab18 [Rana ridibunda]
  misc_feature (12)..(128): SWISSPROT Homolog: EC 2.7.11.1 Non-specific serine/threonine protein kinase
MAASSEDSLPVLKILIIGPSGAGKSALLLRYCEDHFDPESASATIGIDFKMKKLQVRGKAYRLNIFDTAGQERFRTLSTSYYRGAHAVILVYDISNRKSFATMEKWCEEARTNANPEAVLYLVGSKLDKVSAGGRAVSTEEGKRFAESHGAGFCEISSKTRENVKRPFVEVVDQIVQKPSLIASALPKRDNFDIGGFSGDNSSCSC

SEQ ID NO: 14503 - DNA, 1483 bp, Muscodor strobelii
  misc_feature: SGI EST ID NO. CUFF.34762.1
  misc_feature: Variant of the nucleotide sequence at SEQ ID NO 14501
gccgatttctgtaaattgccattattgcttttccatacttgctttcttaatctgtactctatatgtaaatactcaacgctcgatgcttcatcggtattaaattgccctgccaatctacgataacacttacaaagtagagaaagtctacttgtctcaacacctgagctccgcctcgtgcccactttccgaccacttttgggtttccattccatcgcactcgtacctaaagctccctacctacctgcgcatgctgcatacccatcgtgtggtgttgcttgattatttcaaacttgccaatactaattgtactctcgctgtgcatactggcttcatcagaattgcgacaaacaggttcaacgggtcgagccgaggcaggttaggcagtatcggacttagacgggcgacaagttcaaccgtaacgacgccactgtcaccggcgcggtaaagcatcattgttgagcagtctgaggccgacatcatggctgctagttcggaggactcgcttcctgtcctcaagatattgattatcggaccgtcaggcgcggggaaatctgctttgttgctgagatactgtgaagaccacttcgatcccgagtcggcgtctgcaacgatcggtattgacttcaagatgaaaaagctacaagtcagaggcaaagcctacagattaaacatcttcgacacagccggtcaggagcgtttccgcactctgtcaacgagctactaccgaggcgcgcacgccgtcatattagtctatgacatttctaacagaaagagcttcgcgaccatggagaagtggtgtgaggaggcgaggactaatgctaaccctgaggctgtgctgtatctggtatgactcccatctgtctgattcatcctatgtctctcatatcctctatatcatggctcgcattacccaattgtctatcttgccattccatagactgacatgccccaaggtcggaagcaaactggacaaagtctctgcaggcggccgcgcagtctcaacagaagaaggcaagcggttcgccgaatcgcacggcgcgggattctgcgaaatcagctccaagacgcgggagaatgtcaagagaccgtttgtcgaggtcgttgaccaaattgtgcagaagccgtcgctgatcgccagcgcgttgccgaaacgggataacttcgacattggcgggttctcgggcgacaattcctcatgttcttgttgatattacgatgttcttgaccggcctctgtttgagttgatggtattatgaatgttggctgttcggtgttgtgtacataaacgctgcgtggtttggctccatacgatatccccccttttgccctggatgcagtgctatgcaagattgaatacattatatacaatactatggtatctctgggtttctgtcgtgagatctatgccgtctatgtcgtccaagtgcgtctctatgtctatgtgtccgagattattcttttggtgtgaggaactcaattacag

SEQ ID NO: 14504 - DNA, 939 bp, Muscodor strobelii
  misc_feature: SGI cDNA ID NO. 564780
  misc_feature: Reduced expression when VOC is produced
  misc_feature: Encodes the peptide sequence at SEQ ID NO 14505
atggcgccagcaatgcgcattatcctaccgcgatcgtcgcccttccgggcgacactccgctacgcgcatcgatcatactcatcgtttccctccagcgaacgagtcgagctcgtctacgaccaccacgaaccacccaaatccacgcgtgcagcggaagactcaccgataatattcctgcacggcatcttcggttcgaaaaagaacaacaggacagtctccaaagtcctagcccgcgatctcaagcgccacgtcttcgccctcgacctacggaaccacggcgaatccccccacgcaccacgccacgactacacggcaatggcctcagacgtacaaggcttcatcgaatcgcaaaatctgcactctccaacactaatcggccattcaatgggcgcaaaagtagccatgaccctcgccttatccaacccctccctaatcaccgacctagtcgccgtagacaacgcaccagtcgacacatcaatcccgcggtccttcgcgtcctacgtccacggacttcgcaaaatccaagagtccgccgtctctcgacaaacagaagccgacgccatactctcagaattcgaaaaggagttacccgttcgacagttcatattaggtaatttataccgtgagcccatcacgctggaaaacggagagaggaagagtgtgtttaaaagtaggataccgctggatattatagggaagggattagaccatataggtgatttccccttccgtgaccctaatgtgcgcaggtttgagaagcccgcgttgtttattaggggcagtaagagtgggtatgtgcctgatgagagtatacccgccataggccagttcttcccccggtttagactggtggatgttgaggcgggacattgggttatttctgataatcccaccgactttttgaaagctgtaattgagttcctcacaccaaaagaataa

SEQ ID NO: 14505 - protein, 312 aa, Muscodor strobelii
  misc_feature: SGI Peptide ID NO. 564780
  misc_feature (82)..(306): Pfam Id: PF00561 Pfam Desc: alpha/beta hydrolase fold
  misc_feature (82)..(152): Pfam Id: PF00561 Pfam Desc: alpha/beta hydrolase fold
  misc_feature (244)..(306): Pfam Id: PF00561 Pfam Desc: alpha/beta hydrolase fold
  misc_feature (37)..(312): NCBI GI: 46126207 Blast Desc: FG07481.1 [Gibberella zeae PH-1]
  misc_feature (24)..(296): NCBI GI: 256730877 Blast Desc: NECHADRAFT_106355 [Nectria haematococca mpVI 77-13-4]
  misc_feature (19)..(304): NCBI GI: 154312118 Blast Desc: BC1G_06092 [Botryotinia fuckeliana B05.10] gi|150850055|gb|EDN25248.1| BC1G_06092 [Botryotinia fuckeliana B05.10]
  misc_feature (5)..(312): NCBI GI: 116199297 Blast Desc: CHGG_07804 [Chaetomium globosum CBS 148.51] gi|88179083|gb|EAQ86551.1| CHGG_07804 [Chaetomium globosum CBS 148.51]
  misc_feature (30)..(312): NCBI GI: 85075917 Blast Desc: NCU01454 [Neurospora crassa OR74A] gi|28916864|gb|EAA26606.1| conserved [Neurospora crassa OR74A] gi|28950330|emb|CAD70955.1| conserved [Neurospora crassa]
  misc_feature (24)..(309): NCBI GI: 261351467 Blast Desc: abhydrolase domain-containing protein [Verticillium albo-atrum VaMs.102]
  misc_feature (1)..(294): NCBI GI: 171692739 Blast Desc: protein product [Podospora anserina] gi|170946318|emb|CAP73119.1| protein product [Podospora anserina]
  misc_feature (4)..(308): NCBI GI: 226284541 Blast Desc: abhydrolase domain-containing protein [Paracoccidioides brasiliensis Pb01]
  misc_feature (45)..(308): NCBI GI: 255950626 Blast Desc: Pc22g21850 [Penicillium chrysogenum Wisconsin 54-1255] gi|211593097|emb|CAP99473.1| Pc22g21850 [Penicillium chrysogenum Wisconsin 54-1255]
  misc_feature (24)..(312): NCBI GI: 169612365 Blast Desc: SNOG_09304 [Phaeosphaeria nodorum SN15] gi|111062376|gb|EAT83496.1| SNOG_09304 [Phaeosphaeria nodorum SN15]
  misc_feature: Useful for introducing or modulating the production of volatile compounds
MAPAMRIILPRSSPFRATLRYAHRSYSSFPSSERVELVYDHHEPPKSTRAAEDSPIIFLHGIFGSKKNNRTVSKVLARDLKRHVFALDLRNHGESPHAPRHDYTAMASDVQGFIESQNLHSPTLIGHSMGAKVAMTLALSNPSLITDLVAVDNAPVDTSIPRSFASYVHGLRKIQESAVSRQTEADAILSEFEKELPVRQFILGNLYREPITLENGERKSVFKSRIPLDIIGKGLDHIGDFPFRDPNVRRFEKPALFIRGSKSGYVPDESIPAIGQFFPRFRLVDVEAGHWVISDNPTDFLKAVIEFLTPKE

SEQ ID NO: 14506 - DNA, 2169 bp, Muscodor strobelii
  misc_feature: SGI EST ID NO. CUFF.34763.3
  misc_feature: Variant of the nucleotide sequence at SEQ ID NO 14504
caggtggatcgcgcgccaaaagagccgccgacgtagcctccgaaatcgaagctctctactgcgcaaatttccagctcaaactaagctgccatgtcagctccaaacaacctcaacagacggaaataagcgtcgcataccgcgagggaataatattccacaccatggcgccagcaatgcgcattatcctaccgcgatcgtcgcccttccgggcgacactccgctacgcgcatcgatcatactcatcgtttccctccagcgaacgagtcgagctcgtctacgaccaccacgaaccacccaaatccacgcgtgcagcggaagactcaccgataatattcctgcacggcatcttcggttcgaaaaagaacaacaggacagtctccaaagtcctagcccgcgatctcaagcgccacgtcttcgccctcgacctacggaaccacggcgaatccccccacgcaccacgccacgactacacggcaatggcctcagacgtacaaggcttcatcgaatcgcaaaatctgcactctccaacactaatcggccattcaatgggcgcaaaagtagccatgaccctcgccttatccaacccctccctaatcaccgacctagtcgccgtagacaacgcaccagtcgacacatcaatcccgcggtccttcgcgtcctacgtccacggacttcgcaaaatccaagagtccgccgtctctcgacaaacagaagccgacgccatactctcagaattcgaaaaggagttacccgttcgacagttcatattaggtaatttataccgtgagcccatcacgctggaaaacggagagaggaagagtgtgtttaaaagtaggataccgctggatattatagggaagggattagaccatataggtgatttccccttccgtgaccctaatgtgcgcaggtttgagaagcccgcgttgtttattaggggcagtaagagtgggtatgtgcctgatgagagtatacccgccataggccagttcttcccccggtttagactggtggatgttgaggcgggacattgggttatttctgataatcccaccgactttttgaaagctgtaattgagttcctcacaccaaaagaataatctcggacacatagacatagagacgcacttggacgacatagacggcatagatctcacgacagaaacccagagataccatagtattgtatataatgtattcaatcttgcatagcactgcatccagggcaaaaggggggatatcgtatggagccaaaccacgcagcgtttatgtacacaacaccgaacagccaacattcataataccatcaactcaaacagaggccggtcaagaacatcgtaatatcaacaagaacatgaggaattgtcgcccgagaacccgccaatgtcgaagttatcccgtttcggcaacgcgctggcgatcagcgacggcttctgcacaatttggtcaacgacctcgacaaacggtctcttgacattctcccgcgtcttggagctgatttcgcagaatcccgcgccgtgcgattcggcgaaccgcttgccttcttctgttgagactgcgcggccgcctgcagagactttgtccagtttgcttccgaccttggggcatgtcagtctatggaatggcaagatagacaattgggtaatgcgagccatgatatagaggatatgagagacataggatgaatcagacagatgggagtcataccagatacagcacagcctcagggttagcattagtcctcgcctcctcacaccacttctccatggtcgcgaagctctttctgttagaaatgtcatagactaatatgacggcgtgcgcgcctcggtagtagctcgttgacagagtgcggaaacgctcctgaccggcctttttgtgcgagtgagtgtctggttagtgattgattttatataaccttgcactagttgggggtgatctcactgtgtcgaagatgtttaatctgtaggctttgcctctgacttgtagctttttcatctgtgagattgcgttagcaaaatgtcgtatatcgaatgtcttagtggctcgttgtgagactcgtgagtgtctccatgttgtggcccccgcggtctgtgttatataaacatcatgataattgaacataccttgaagtcaataccgatcgttgcagacgccgactcgggatcgaag

SEQ ID NO: 14507 - DNA, 2475 bp, Muscodor strobelii
  misc_feature: SGI cDNA ID NO. 564781
  misc_feature: Encodes the peptide sequence at SEQ ID NO 14508
atgaccagtgatttaaaagtttacgtgctcaaggacatgtgtcctctgacggatttgtcacgagaaattcggtacctcaagatacagcagagacctgagggagataagctctcatgccaagtgatagtacgtcggctcttgagcgctgatactgaccgaaagaagcaatacgacgaagaacacgatgtcaacagtaagagccgaaatgaaccgggttacagcacgctctcgtggtgctggcaggtcgcttcgcctgataatcagatgactcagatctatatcacccacaacaatgaagaatatcaatttcgcgttcctaaacacctcgaagacgcgttacatgaactacgcaggcgggaagtatccaacatttggatcgattacatttgcattgaccaacatgaccaagacgagaagaaccatcaagttcccttaatgtctgagatctacggaaattcagaatgtgtctatatttggctcggggacaaaagcaagaatagcacccttgcgatgaacttcatcacggatgaagtactgaaacttgagaattttgacacattggtgaaagatgccaaaatgaaggacgaatgggatgctctgatggaactcattaagcgcccttggttcagtcggcggtggattctgcaagaaatcgccttagctcgaaaggcatatttgctctgtggcaaggatatgatagattggtcggactttgctgacgcaatatcgctattcaacgaagtcgagacaggcacaaagaacttatctgagcatataaagggtgacaaatcgcggaaatatatgcctaatttctttggctacgtcccagcgctgagcgcgacacaactagttgaaatgacgaacaacttatttcgtcatgtgtccaccaataaacgagaagccagatttgatctcgaataccttgtctcgttgtttacagccttcgaatcaagtgaacctcgcgacactatttatgcactgttggcaatcgctagagacactgtaccgaaggttgacatggtccaggtggctgaggcttcctggaaggagtctgttcgaacgaaattcctcgaggcgatggcgaagaaggtacccatggtgtcacaaccatacaatgtagactatagtctgcccttgtccgatgtgtatgtccaatttgtgcaatgggcaattgaccatgcggatcaaacccgcgcactggacatcatctgccgaccttgggctccgacgccacacggcaatttcgacgacgacagtctaaagcactggcgagccgttttcacccaagaagaatcacagcggccagaccacgaaggcgtagatagtttgccatcgtggattccgacaaaaatgggtgcagcattcactatgcacaagtcgcgccggacaatgatccgtagggaagctgacagtcttgtcggacttcctacgcagcgcaactatagcgccgcaggaacccggcctgtgacgtccgcaatccggtttgagaacggggtaacaagattcggcaaggatccgagcttggatggcgtgcactactacagcatgtttgcagaagggatagaggtggacaaagtaagggtgacgaaacctgcatcactggcaggtgtgatccctgacagctgggcgagaatggggcgaggtggaaaaaaggagggcgactttcgagatgaatatttccgtacaatagtggcagatcgtggatcaacaggtggcaacgcaccaagatactatgctaggctgataaagcatgcgtacgagcagatcggcgaggtggatattctcaatacggaatcgcaaatgcattacggagactccaatattgtcggcggcggtgtctttagaagggtggaatcggtagtttataaccgcaaaatgatgaggacggaaagagatcgaatgggcctcatcccgaaaaatgcggcggagggtgacctcatctgcatcctgtacgggtgtagtgtaccggttgtgttgagaaaatttgaaaagtcggccgaacaacatcaggatgaagtagcacaagcggaagcaaaacgtaaggccaggtgggaagaacaatgtgcgacaaagatctcacgctggtggaagaatcacctgtcagagcaagggacagtggtccccggaacaactcgtagcggtttgaagcggaagcggaccactcagaacgaacccacgacgcaaccaagagcggccaaaagggtgaaggtgttcgatggcagtgtttggaggttgaaggccgctaatcagacgatagatacgctttcgcaagagtcactaggcctgaacaagaagagcataaggaggcagtctcatgagggcaatgacaaggaaccacaggaaatcaagaagagaccacctccttgcgatcctcttgtcttctaccagcttatcggtgagtgttatgtggatggtataatgaatggggaggcaatattggctgggaataagtccaaaatgtttgagatcagatga

SEQ ID NO: 14508 - protein, 824 aa, Muscodor strobelii
  misc_feature: SGI Peptide ID NO. 564781
  misc_feature (73)..(217): Pfam Id: PF06985 Pfam Desc: Heterokaryon incompatibility protein (HET)
  misc_feature (73)..(167): Pfam Id: PF06985 Pfam Desc: Heterokaryon incompatibility protein (HET)
  misc_feature (70)..(411): NCBI GI: 169611378 Blast Desc: SNOG_08800 [Phaeosphaeria nodorum SN15] gi|160702276|gb|EAT83968.2| SNOG_08800 [Phaeosphaeria nodorum SN15]
  misc_feature (73)..(661): NCBI GI: 256722954 Blast Desc: NECHADRAFT_52679 [Nectria haematococca mpVI 77-13-4]
  misc_feature (73)..(670): NCBI GI: 256728433 Blast Desc: NECHADRAFT_87863 [Nectria haematococca mpVI 77-13-4]
  misc_feature (51)..(669): NCBI GI: 238494932 Blast Desc: conserved [Aspergillus flavus NRRL3357] gi|220695352|gb|EED51695.1| conserved [Aspergillus flavus NRRL3357]
  misc_feature (51)..(669): NCBI GI: 169777725 Blast Desc: [Aspergillus oryzae RIB40] gi|83772065|dbj|BAE62195.1| protein product [Aspergillus oryzae]
  misc_feature (20)..(688): NCBI GI: 169598776 Blast Desc: SNOG_02196 [Phaeosphaeria nodorum SN15] gi|111069288|gb|EAT90408.1| SNOG_02196 [Phaeosphaeria nodorum SN15]
  misc_feature (73)..(629): NCBI GI: 145237736 Blast Desc: An07g04330 [Aspergillus niger] gi|134075989|emb|CAK48183.1| protein product [Aspergillus niger]
  misc_feature (73)..(381): NCBI GI: 169609613 Blast Desc: SNOG_07899 [Phaeosphaeria nodorum SN15] gi|160701878|gb|EAT84175.2| SNOG_07899 [Phaeosphaeria nodorum SN15]
  misc_feature (74)..(664): NCBI GI: 239609180 Blast Desc: conserved [Ajellomyces dermatitidis ER-3]
  misc_feature (1)..(336): NCBI GI: 225683131 Blast Desc: conserved [Paracoccidioides brasiliensis Pb03]
MTSDLKVYVLKDMCPLTDLSREIRYLKIQQRPEGDKLSCQVIVRRLLSADTDRKKQYDEEHDVNSKSRNEPGYSTLSWCWQVASPDNQMTQIYITHNNEEYQFRVPKHLEDALHELRRREVSNIWIDYICIDQHDQDEKNHQVPLMSEIYGNSECVYIWLGDKSKNSTLAMNFITDEVLKLENFDTLVKDAKMKDEWDALMELIKRPWFSRRWILQEIALARKAYLLCGKDMIDWSDFADAISLFNEVETGTKNLSEHIKGDKSRKYMPNFFGYVPALSATQLVEMTNNLFRHVSTNKREARFDLEYLVSLFTAFESSEPRDTIYALLAIARDTVPKVDMVQVAEASWKESVRTKFLEAMAKKVPMVSQPYNVDYSLPLSDVYVQFVQWAIDHADQTRALDIICRPWAPTPHGNFDDDSLKHWRAVFTQEESQRPDHEGVDSLPSWIPTKMGAAFTMHKSRRTMIRREADSLVGLPTQRNYSAAGTRPVTSAIRFENGVTRFGKDPSLDGVHYYSMFAEGIEVDKVRVTKPASLAGVIPDSWARMGRGGKKEGDFRDEYFRTIVADRGSTGGNAPRYYARLIKHAYEQIGEVDILNTESQMHYGDSNIVGGGVFRRVESVVYNRKMMRTERDRMGLIPKNAAEGDLICILYGCSVPVVLRKFEKSAEQHQDEVAQAEAKRKARWEEQCATKISRWWKNHLSEQGTVVPGTTRSGLKRKRTTQNEPTTQPRAAKRVKVFDGSVWRLKAANQTIDTLSQESLGLNKKSIRRQSHEGNDKEPQEIKKRPPPCDPLVFYQLIGECYVDGIMNGEAILAGNKSKMFEIR

SEQ ID NO: 14509 - DNA, 479 bp, Muscodor strobelii
  misc_feature: SGI EST ID NO. CUFF.34508.0
  misc_feature: Variant of the nucleotide sequence at SEQ ID NO 14507
agaaggtacccatggtgtcacaaccatacaatgtagactatagtctgcccttgtccgatgtgtatgtccaatttgtgcaatgggcaattgaccatgcggatcaaacccgcgcactggacatcatctgccgaccttgggctccgacgccacacggcaatttcgacgacgacagtctaaagcactggcgagccgttttcacccaagaagaatcacagcggccagaccacgaaggcgtagatagtttgccatcgtggattccgacaaaaatgggtgcagcattcactatgcacaagtcgcgccggacaatgatccgtagggaagctgacagtcttgtcggacttcctacgcagcgcaactatagcgccgcaggaacccggcctgtgacgtccgcaatccggtttgagaacggggtaacaagattcggcaaggatccgagcttggatggcgtgcactactacagcatgtttgcagaagggata

SEQ ID NO: 14510 - DNA, 909 bp, Muscodor strobelii
  misc_feature: SGI cDNA ID NO. 564782
  misc_feature: Reduced expression when VOC is produced
  misc_feature: Encodes the peptide sequence at SEQ ID NO 14511
atggcgagtaacgaaagtcaaaaaatgcggatcggatttctggggttgggctatatgggtgccccgatggccctgaatctgtctcgagagttccctatcactgtttggaatagaaccgcgtccaaatgtgctcccctcgtcgaatcaggtgcatcagtcggcgccagtccatccgaagtcgccgagaagtccgacgttgtcttcatcatgctgtttaatgcgcctgcaatcgatagtattctcagcgatctcactaagtctcttggcggcaagattgtcgtgtgcacaagctctatcacggaagaatacagtcacttccttgccaaaacggtgaccgatgccgggggccaattcatcgaaatgccagtcagtggcagcaagctcccggcagaacaaggtcggctcgtaggcatgatggcaggagacgccgaagtggctgagagaatacgttatgtgatgaaaccgatcaccgctactgccctttactgcggtcccatcggctacggtctcagaaccaagtacgtcgcgaactgctttgcaacctctttgacagtcagcatcgcggagtcgatgaatctcgcccaagctcagggtctcgatctcaaggtcgtagccgatatgttcaactcaggtccgatggcatctccatactccaaaagcaagttggcgaagataatcgacgacgattggtctcctcactcggctgtcaaagactgttatcaaagcagtgaactgatttgtggtgctgcggaatccgtaaatgcacatacaccgctcatacagctctgtcgagccttatataaggaggcatctaaatctgagcttgcggaagaagacatgatcgccatcatgaagatcttatctcgttcttcatctaccaaaggtggaggggcgaagttagagagttga

SEQ ID NO: 14511 - protein, 302 aa, Muscodor strobelii
  misc_feature: SGI Peptide ID NO. 564782
  misc_feature (10)..(172): Pfam Id: PF03807 Pfam Desc: NADP oxidoreductase coenzyme F420-dependent
  misc_feature (8)..(165): Pfam Id: PF03446 Pfam Desc: NAD binding domain of 6-phosphogluconate dehydrogenase
  misc_feature (10)..(94): Pfam Id: PF03807 Pfam Desc: NADP oxidoreductase coenzyme F420-dependent
  misc_feature (9)..(293): NCBI GI: 121714879 Blast Desc: NAD binding NADP oxidoreductase coenzyme F420-dependent, [Aspergillus clavatus NRRL 1] gi|119403205|gb|EAW13623.1| NAD binding NADP oxidoreductase NRRL
  misc_feature (9)..(298): NCBI GI: 239927003 Blast Desc: NADP oxidoreductase, coenzyme F420-dependent:6-phosphogluconate dehydrogenase, NAD-binding protein [Streptomyces ghanaensis ATCC 14672]
  misc_feature (9)..(287): NCBI GI: 256806324 Blast Desc: NADP oxidoreductase, coenzyme F420-dependent:6-phosphogluconate dehydrogenase, NAD-binding protein [Streptomyces viridochromogenes DSM 40736]
  misc_feature (9)..(295): NCBI GI: 73539354 Blast Desc: NADP oxidoreductase, coenzyme F420-dependent:6-phosphogluconate dehydrogenase, NAD-binding [Ralstonia eutropha JMP134] gi|72122691|gb|AAZ64877.1| NADP
  misc_feature (9)..(294): NCBI GI: 238023750 Blast Desc: 2-hydroxy-3-oxopropionate reductase [Burkholderia glumae BGR1] gi|237878415|gb|ACR30747.1| 2-hydroxy-3-oxopropionate reductase [Burkholderia glumae BGR1]
  misc_feature (11)..(291): NCBI GI: 254247918 Blast Desc: 6-phosphogluconate dehydrogenase [Burkholderia cenocepacia PC184] gi|124872694|gb|EAY64410.1| 6-phosphogluconate dehydrogenase [Burkholderia cenocepacia PC184]
  misc_feature (9)..(297): NCBI GI: 167566991 Blast Desc: 2-hydroxy-3-oxopropionate reductase [Burkholderia oklahomensis EO147]
  misc_feature (9)..(297): NCBI GI: 167574064 Blast Desc: 2-hydroxy-3-oxopropionate reductase [Burkholderia oklahomensis C6786]
  misc_feature (11)..(295): NCBI GI: 163855500 Blast Desc: dehydrogenase [Bordetella petrii DSM 12804] gi|163259228|emb|CAP41528.1| dehydrogenase [Bordetella petrii]
  misc_feature (11)..(291): NCBI GI: 170733339 Blast Desc: 6-phosphogluconate dehydrogenase NAD-binding [Burkholderia cenocepacia MC0-3] gi|169816581|gb|ACA91164.1| 6-phosphogluconate dehydrogenase NAD-binding [Burkholderia MC0-3]
  misc_feature (6)..(209): SWISSPROT Homolog: EC 1.1.1.31 3-hydroxyisobutyrate dehydrogenase
  misc_feature: Useful for introducing or modulating the production of volatile compounds
MASNESQKMRIGFLGLGYMGAPMALNLSREFPITVWNRTASKCAPLVESGASVGASPSEVAEKSDVVFIMLFNAPAIDSILSDLTKSLGGKIVVCTSSITEEYSHFLAKTVTDAGGQFIEMPVSGSKLPAEQGRLVGMMAGDAEVAERIRYVMKPITATALYCGPIGYGLRTKYVANCFATSLTVSIAESMNLAQAQGLDLKVVADMFNSGPMASPYSKSKLAKIIDDDWSPHSAVKDCYQSSELICGAAESVNAHTPLIQLCRALYKEASKSELAEEDMIAIMKILSRSSSTKGGGAKLES

SEQ ID NO: 14512 - DNA, 1347 bp, Muscodor strobelii
  misc_feature: SGI cDNA ID NO. 564783
  misc_feature: Encodes the peptide sequence at SEQ ID NO 14513
atgccactttatcacgagtatcttcggggcgtagctaacgaacttggtgatgcccggcggctttcgcaacccccaggtccgccggttctggcttttcggccattgacgccctgctttgaagacatacctgtcccgcacaatggtaaaggatatcaggcacacaatcgtgacgaattcgccgtttggctacgccatgcgctgcgacacctacacggagaaagacatcaagatgatcacaaacatcgtgattttgagattcacgagctagcctacaaggatttagtcgcggccgcaattaagatctggatgctggaggtcgaggatgacagtagccagcctgtattcctgggatgggaggaagaaacagcgctcatcaatctggtcattgcttgcgctgacaaggatatgttagaggtgaaggcgctggattcagctctgaaaggattgtccggtacctctgcactgacgtcgccactgctattgcaggtgttgatagcgacggctttcagccaccacaacaacgcccttgtctttgatcttatcgaatggtctcccccaccatctcgtaatgttttcaacctgaggcctcgaaatccgagctcgtctaatacctggctttggcaccattggcttttctctggtccaactggctcgaagccgctagatacgtgggacaggctgctgcttgctggatgggtggcccctcatggagaaatgatggaatttgtttaccgcgcgaagaacaccgctgaagaatcagccagtgctatttacatattcgaccgcgtgcttgacagcaaagccggcttgcctcacagcaccctcagcaccattgaccagacggtaaacatggggcctccgagcgtagttgctcatatgctcacccggcttccacaccaaaaaataaagccacggccgcatttcttgcttacggacgcggcgaaatggtcacgattagatccaaaaatgggatttgttccgcttggagaaggtatgctggaggtcttgcggccgatgaaacttgatatcaactcaatcattgatccccgaggcaaagcagaaggtgtgtcaccacttgatgagtctccgctgcatgctgccacgtctttagccaatctgccggctgttgtatggtgcctgaaaaatggcgcgcggccggtgaaggactggtacggaaaatatccatggcagaggcagagaatcaaggaaaaggaaacagagttgcttgcactgtacaagagcgcgggctggaatgttgataacgatgagtggcttgcacaatgtgaagagagttctagcggtaatacggttcaaagagtggttgatcgactactgtgcggttcttaa

SEQ ID NO: 14513 - protein, 448 aa, Muscodor strobelii
  misc_feature: SGI Peptide ID NO. 564783
MPLYHEYLRGVANELGDARRLSQPPGPPVLAFRPLTPCFEDIPVPHNGKGYQAHNRDEFAVWLRHALRHLHGERHQDDHKHRDFEIHELAYKDLVAAAIKIWMLEVEDDSSQPVFLGWEEETALINLVIACADKDMLEVKALDSALKGLSGTSALTSPLLLQVLIATAFSHHNNALVFDLIEWSPPPSRNVFNLRPRNPSSSNTWLWHHWLFSGPTGSKPLDTWDRLLLAGWVAPHGEMMEFVYRAKNTAEESASAIYIFDRVLDSKAGLPHSTLSTIDQTVNMGPPSVVAHMLTRLPHQKIKPRPHFLLTDAAKWSRLDPKMGFVPLGEGMLEVLRPMKLDINSIIDPRGKAEGVSPLDESPLHAATSLANLPAVVWCLKNGARPVKDWYGKYPWQRQRIKEKETELLALYKSAGWNVDNDEWLAQCEESSSGNTVQRVVDRLLCGS

SEQ ID NO: 14514 - DNA, 366 bp, Muscodor strobelii
  misc_feature: SGI cDNA ID NO. 564784
  misc_feature: Reduced expression when VOC is produced
  misc_feature: Encodes the peptide sequence at SEQ ID NO 14515
atgtctcctctcgtcacagccacgggcgtgctggcgttcctcgccgacgacgaggtcgagctcaaagtgtttgcgctgcagacgctcaacgaggacatcgacacggtctggttcgaggtcgccccggccgtcaccgacattgaggcactctacgaggatgagtccttccccgagcgcaagctggcggcgctcgtgctgtccaaggtctacttccacctgcaggcctacgacgagtccatgttcttcgccctcgccgccggcagcctgttcaagctcgacagccccggcgagttcgaggagaccatcatctccaagtgcgtcgaccactacatcgccctctcctccgaccacgcgcccccctcggcc

SEQ ID NO: 14515 - protein, 122 aa, Muscodor strobelii
  misc_feature: SGI Peptide ID NO. 564784
  misc_feature (1)..(121): NCBI GI: 145603522 Blast Desc: MGG_05991 [Magnaporthe grisea 70-15] gi|145011736|gb|EDJ96392.1| MGG_05991 [Magnaporthe grisea 70-15]
  misc_feature (1)..(121): NCBI GI: 85089629 Blast Desc: NCU09450 [Neurospora crassa OR74A] gi|28919347|gb|EAA28800.1| NCU09450 [Neurospora crassa OR74A]
  misc_feature (1)..(121): NCBI GI: 116203885 Blast Desc: CHGG_09826 [Chaetomium globosum CBS 148.51] gi|88175954|gb|EAQ83422.1| CHGG_09826 [Chaetomium globosum CBS 148.51]
  misc_feature (1)..(114): NCBI GI: 46126243 Blast Desc: FG07499.1 [Gibberella zeae PH-1]
  misc_feature (1)..(121): NCBI GI: 171681561 Blast Desc: protein product [Podospora anserina] gi|170940739|emb|CAP65967.1| protein product [Podospora anserina]
  misc_feature (1)..(117): NCBI GI: 156057609 Blast Desc: SS1G_04536 [Sclerotinia sclerotiorum 1980] gi|154702321|gb|EDO02060.1| SS1G_04536 [Sclerotinia sclerotiorum 1980]
  misc_feature (1)..(122): NCBI GI: 119500834 Blast Desc: 26S proteasome regulatory subunit Rpn2, [Neosartorya fischeri NRRL 181] gi|119415339|gb|EAW25277.1| 26S proteasome regulatory subunit Rpn2, [Neosartorya fischeri NRRL 181]
  misc_feature (1)..(122): NCBI GI: 169773517 Blast Desc: [Aspergillus oryzae RIB40] gi|238491506|ref|XP_002376990.1| 26S proteasome regulatory subunit Rpn2, [Aspergillus flavus NRRL3357] protein product 26S
  misc_feature (1)..(119): NCBI GI: 145257344 Blast Desc: An04g03270 [Aspergillus niger] gi|134058609|emb|CAK38593.1| protein product [Aspergillus niger]
  misc_feature (1)..(122): NCBI GI: 159125109 Blast Desc: 26S proteasome regulatory subunit Rpn2, [Aspergillus fumigatus A1163]
  misc_feature: Useful for introducing or modulating the production of volatile compounds
MSPLVTATGVLAFLADDEVELKVFALQTLNEDIDTVWFEVAPAVTDIEALYEDESFPERKLAALVLSKVYFHLQAYDESMFFALAAGSLFKLDSPGEFEETIISKCVDHYIALSSDHAPPSA

SEQ ID NO: 14516 - DNA, 700 bp, Muscodor strobelii
  misc_feature: SGI EST ID NO. CUFF.34595.1
  misc_feature: Variant of the nucleotide sequence at SEQ ID NO 14514
cggtaatgctgccgccactacgaattacattacctgcatcaccaccaaagctgaccactactaccttacaacctcatctttccccatccatcggatcctccaccatccgcatcaacaacggtgtcgagttgttcttgctctgcatcgtcactccaccaacacccggtgctctccctgcctccgcggtatctggccaggtttctatcttggaatcccgccgtccgtgagccacatatcatcctcgatctcgggagtttactcagcctttccatcgtcttccgtcacagctccctcgcccacgatagccgtcacaacaacaacgacaacaacagccatgtctcctctcgtcacagccacgggcgtgctggcgttcctcgccgacgacgaggtcgagctcaaagtgtttgcgctgcagacgctcaacgaggacatcgacacggtctggttcgaggtcgccccggccgtcaccgacattgaggcactctacgaggatgagtccttccccgagcgcaagctggcggcgctcgtgctgtccaaggtctacttccacctgcaggcctacgacgagtccatgttcttcgccctcgccgccggcagcctgttcaagctcgacagccccggcgagttcgaggagaccatcatctccaagtgcgtcgaccactacatcgccctctcctccgaccacgcgcccccctcggcc

SEQ ID NO: 14517 - DNA, 6285 bp, Muscodor strobelii
  misc_feature: SGI cDNA ID NO. 564785
  misc_feature: Encodes the peptide sequence at SEQ ID NO 14518
atggcagctcaaacgtctcagacgtctgcaaagacgactgcggctcctaagagcacagctaaaaatacgacaaagatatttcatgcaactggtgggcctcaaaatcgtccggctgctgatgtgaagtctatgccgagtacgacaacccaggctacacagacctcgcccgagacggcaaacacaaatgctacgaaattattccacgcaactggtggaccgcaaatggacatagataacgattcgatttcggaagatgaagacatgctaagtgagatcgacgttgagctcggcccttttcgacccatgaagccctatgaaacgcgagccaaccactttgtcagtgcagactctgaggcgttccaagatgtagagagctattacaaatcacttttgaacactcccaaacttactatcgaggatgtcctcgagggctgcttcaatgaccacgagatctctcttattacacctcagacatcaccgccagcccttgtcaggtggcagtatcacaactcgcttcggtatcgccagaaccttaaacatcgattccaaggtcgcaagtctacaaatgagtttaaaatgacatgtctctactttggtcttcctgttgagccaatacacatgtcgtcagagccgtgggagcccagcccagcgctcatggtggacgaaatggcggagccaaacatcgaccccttaaaattcttgcaagaatacgacgaaaagttcaactacccgcagcctagtgatgatggagatagtatgtatagtggtttgttcggtctgcgtggcggcggcgatagcgatgtttcgatgtcggactacgatgacgatgccgatagcataactagccttggaagtgaagaagatgaatttgctgcggccccgagtcctagcaaggaggaagctgttccgaaagagaacaagaaacttcccggccttagagtgcatggagaatcagttctcaaagctcccccccgccgtatagctgtctatggctatcagggtttgctgaatatggaatacgtccgatacgaccatttcgtgaggactgtagacagacttctcagcaatctggatggtcaagatcaacgcatttgcttggaagtctgggcagcggctggtcctgaaactgcggttttccgcgagcgtacgtttggtcagacatggcacggaaacaagaatgcaccccaagaggaccctatttggcgcctgatctcgaaattgcccgctaccggaacaactagcttcctctattttgtccaccttgaatccgaagatcacccaaccagtatccggccggatgctagtgatgcgcaagaccggtccgtcattcaattaaggaacatttcgagagaagagacggcctatatgagaattccactcaatctcgccgcactcaactgcagaccacatcaatttagcgcagagtattcacgggccatgcgattcctgatgcttccagggtttatgcgggacaatcgcattatcagaatggctgtcccggacggtccttctgtgagaaacaaccatgccgaaattgtatatgagaatcgacttcgaacatactcggacctcgatccttcatccgcggtatgggaattaattgcatctcggcaaggggctgatgacgataaacagcaaccctcggtttcgtttcgtgaggatatcgtagacggcggccacattgtgatctacgacgtgggtgatgtaaactctaagggaggcggattatcatctagaacacaacggctaccagtgcttaggagagatgcatttttcagtgcgtccgagtcaagaataaatgacgtggtctctgcgactgcagatcgttatatgcaaaatctcaacaaagctggcaatgatgtttttgccggtgtagaaatctggggtatgggcagcgagcaagagatcaaggaggggttcgacggggttcgacaagcatttgctgcctccgatcacaatccgttcaagaacatgcactctggaccgttgttgatcccacgcgacggggatcatttgcagttggatggaatcagaaacttcatccgttcaaaattccctaacccagcttcgcgccatgccccttcgcatcttgtcatccggccagtctttacccattatgggttttatcgtgctgttaataggcctcggcccgatgtggaaatcgctcgagatgatttggtcagtctggagaatgtgcaagcgctgttgaacaaatttcgaagatacaacactccacgcgatgcaatcttgatactcgaagctttcgaccagtcctcttcccagcctcaggctgtactgcgtccggacactacgcaggaggaatgggagtggattcgaagaaacatgactgtgccggatttcattgtacgaatcggttacgatccaaagatcagtgcatggcgtcttccgactgactgcgtctggggtccacgatatgctgctaccaacggtgacgaatcctttggtactggatcatggcgaggctaccttgacggcgagattgagttcttagctcgtgccccattcgaggatttccccgataccatacaaaaggaggagaaaacgcagtcaggattgaatatcccaccaccagagatgcccaaaccggagagtctgcgaagagcatacactcagcgcgaaaaggaaatactagccgatcctattggcacattacatcctatcactggtacagcccggcctcctgtcgaaaacatcttgacgaagcccgataacacgagcagcaccgacaagacggcgacaacccagaaggttcctactcatgaacagcattctcgagagtctcacctgggcaccacccggggcccggacgctcagatgcctacccctggaccgaagccttcaagattgagttcactaggcaacagggcaaatccttcttcaacaacaatctttggcgccaatacgaagcccgatgacttacctgacacaacggccacacagtcagctcctacaatacaaatgaatggctcgagaggccagtccctatttggctccgcagtaggtgcaggttctggacgggcttctacgagaagacccgaggctccgaacccgttcagcggcccaggaccacgggagaagatgagacggctgatagaagaagacaagcagaaacaagcaaaagtcacggcacccgatgtgaatggaattgcgctgcaacgcgttttcaaagattcgaagaacgacatccttgaggctacgagaaaggaagtacttcgcgatcgtgcattctggacaagtgaatccatcttcaccaacccacagaagcccgtgatgcctctccatggtcctccgctggaatctatcattaaaactgggccttctatgcctggtgtatccatcgccatgatgacaccaacagagatggcgcgactgcagagggaagttcattcgctacgctgtcagcttcttgatcgaatccgaacatgcccgtatgttgactgcgaacgatatttcccgttctctgatggcgccggcctcgacaagcacgtgcgagaggatcacagcgtcatgcgttgcttcctttgtaacgaggaagagcacctcataccatactacaatgctgaccaaatcaagcagcatttccaaaacgtccacttgaatcagattgtggcttcttttggtggccgtgacggaaggatcaacaacttagaggatctcatcggtgactcatccggactgaaacattattgtgaccgatgtggccgtgaccaatttgctcttggtcaccctgccgatcgatcggctcataatgacaattgtttcactaggaaggcattcgatactcggaatgcggatattcagaaattctgtggtcattgtgccgaccctcttcagctgattggcaaactcaaggacggtagactccaattttccaacccttgccgcgcttgccatgggtttgccagcgaaaagccgcagaactattgccctacctgctcgatggaatttgataaagctatggatcaaaattaccggatgaagcacatgaagatgtgtcgacctgtttcgggacgtaattgggactattgctcttattgcggctccgaccttcgtagtctccgagaacctgatcgaaagagacatgttatcttctgtgaacacaagccaaagaacgaccgtgctaccgctcctgccaatggtgaaaatctttcccccggcgagaaaaaatgtagactattccgtatctgtggagcgattaccacacacatgagcttccatcagcttgtagcacatatggactgtcatagaagacatggggatctgggagacgaggagaacgaagaagaagcaaattcatacaacgtggcgtcagtggagagtgatgagggagaggcagagcctgcatccagccactcggaagaggaaaaacgtggagaggacttgatagcagccacgaaggactttgtgaacaatctcgacgtaatcataccgaggggtatgaggcagaacattgataaaattggattaggcgatccacagacggacaatattgtcatgcctggtggaaatgacctaaacgtctatcttgtcagagaccgctggggaaggatcagaagagccacaaaagattttttcacaagggacaagaaatctcaggacgataccccagcaaatcctgaatctcgcgatgaccccatgccagaggaatctggtttggcgaaagtaacagacgacaaagccttagcgaccgcatcggttacagagagtactgaaaagaacaagaaatctaagcagaagaaggatacccctaccacaaatacatccaaagccaaacaagcgacaccggccgataattctggccaccctgagaaaacatcatcactgtggacacaaaacacgaatctcacccctgatcccgcattgacaacaactactgccaagcctcagacattgaacccgcgcgcttctacgtttaccctgaagtctggagcgaaaagcacagcagcgagtggcacggtcaggaaattcccccttgtgccaagtgatggtgacgcctcatcctcaacggcgaagaaaccaagtcccaagaagaatgcaaagggtgcgtctgccagcccttccggaaggaagactaggtccagcaagtcatcttctagagtgggaactccggaggtcccattttccacgactccagaaggtacaccaccaccaacaaatacgaacaagatctcattcacaccagaaaagcagccgccagcagaatacgaagaagggcaatattacacctatcgtggtcccacactcttcacgctcccttcgacggaacaatcgggaacgagaactctcctgcccagtgatgagatcttcacggggcgctggcccgcggatcgtcaggttacgaccggggaagatgaaatggaagctcacatcgcctattatggcgctagagacttaaatatagatctcaaacagcccaaaccaggcggcagcagggcccaggctacatcccatcgccaagctcggaatttccacctaaatcggctgatcgagcaagcgaaggcaagtaaatctcaggcagatataagggaactcgtcaaagcgctagtcagggatgctacgcattcgcagcagccggatggcaccgcgctagcggctcaagtcttgagtctcacaggaaaacatattcacaagacgcaagctctcgaatacgccacttcagaacttgaagaattcacctcctcagagctcgcaacacccaacaatctctcagaagatcaactctccgagttagacctatcagactccacagcctcactctctactaccaattctatctcttcaaactcccacgcaagcagtgacgctacatacgatccgtctcgcccctttcccagcgtcacttctctttcatcgaagaggaagcgaaagcgccctgcagatatcgatccccaatacaggaaaaaatccatcgagccggataccgagtatgaattctcggaaaagagcgctgtccccgatcccgtgaagaacatcgcccttgacgcgccgcggagtcctaagaaacgggccacgaggaagaagaatgtcactactggttctggagagggaaaaggggacgaggtgaagggcgatatggggcccccgccactccctgccaaggccgtcaaagccaaggctgagaaagaaaagaagggaccgacggtgacaaggacaggaaggacagtgaagaagacgagggcggcgaaagaggcaaacggcgaagagacgacggaaccggagagtgaggtcgcgccggctaggggcaaggggcgagggaagaagtag

SEQ ID NO: 14518 - protein, 2094 aa, Muscodor strobelii
  misc_feature: SGI Peptide ID NO. 564785
  misc_feature (1098)..(1382): NCBI GI: 85092201 Blast Desc: NCU06930 [Neurospora crassa OR74A] gi|28920680|gb|EAA30041.1| [Neurospora crassa OR74A]
  misc_feature (1069)..(1215): NCBI GI: 145603574 Blast Desc: MGG_13247 [Magnaporthe grisea 70-15] gi|145011785|gb|EDJ96441.1| MGG_13247 [Magnaporthe grisea 70-15]
  misc_feature (1069)..(1215): NCBI GI: 145603576 Blast Desc: MGG_05947 [Magnaporthe grisea 70-15] gi|145011786|gb|EDJ96442.1| MGG_05947 [Magnaporthe grisea 70-15]
  misc_feature (1096)..(1372): NCBI GI: 261358564 Blast Desc: [Verticillium albo-atrum VaMs.102]
  misc_feature (1098)..(1171): NCBI GI: 116203933 Blast Desc: CHGG_09850 [Chaetomium globosum CBS 148.51] gi|88175978|gb|EAQ83446.1| CHGG_09850 [Chaetomium globosum CBS 148.51]
  misc_feature (1069)..(1230): NCBI GI: 46126341 Blast Desc: FG07548.1 [Gibberella zeae PH-1]
  misc_feature (1098)..(1214): NCBI GI: 256724672 Blast Desc: NECHADRAFT_47938 [Nectria haematococca mpVI 77-13-4]
  misc_feature (93)..(240): NCBI GI: 46126341 Blast Desc: FG07548.1 [Gibberella zeae PH-1]
  misc_feature (1074)..(1377): NCBI GI: 156057613 Blast Desc: [Sclerotinia sclerotiorum 1980] gi|154702323|gb|EDO02062.1| [Sclerotinia sclerotiorum 1980]
  misc_feature (1074)..(1377): NCBI GI: 154297910 Blast Desc: [Botryotinia fuckeliana B05.10] gi|150858370|gb|EDN33562.1| [Botryotinia fuckeliana B05.10]
MAAQTSQTSAKTTAAPKSTAKNTTKIFHATGGPQNRPAADVKSMPSTTTQATQTSPETANTNATKLFHATGGPQMDIDNDSISEDEDMLSEIDVELGPFRPMKPYETRANHFVSADSEAFQDVESYYKSLLNTPKLTIEDVLEGCFNDHEISLITPQTSPPALVRWQYHNSLRYRQNLKHRFQGRKSTNEFKMTCLYFGLPVEPIHMSSEPWEPSPALMVDEMAEPNIDPLKFLQEYDEKFNYPQPSDDGDSMYSGLFGLRGGGDSDVSMSDYDDDADSITSLGSEEDEFAAAPSPSKEEAVPKENKKLPGLRVHGESVLKAPPRRIAVYGYQGLLNMEYVRYDHFVRTVDRLLSNLDGQDQRICLEVWAAAGPETAVFRERTFGQTWHGNKNAPQEDPIWRLISKLPATGTTSFLYFVHLESEDHPTSIRPDASDAQDRSVIQLRNISREETAYMRIPLNLAALNCRPHQFSAEYSRAMRFLMLPGFMRDNRIIRMAVPDGPSVRNNHAEIVYENRLRTYSDLDPSSAVWELIASRQGADDDKQQPSVSFREDIVDGGHIVIYDVGDVNSKGGGLSSRTQRLPVLRRDAFFSASESRINDVVSATADRYMQNLNKAGNDVFAGVEIWGMGSEQEIKEGFDGVRQAFAASDHNPFKNMHSGPLLIPRDGDHLQLDGIRNFIRSKFPNPASRHAPSHLVIRPVFTHYGFYRAVNRPRPDVEIARDDLVSLENVQALLNKFRRYNTPRDAILILEAFDQSSSQPQAVLRPDTTQEEWEWIRRNMTVPDFIVRIGYDPKISAWRLPTDCVWGPRYAATNGDESFGTGSWRGYLDGEIEFLARAPFEDFPDTIQKEEKTQSGLNIPPPEMPKPESLRRAYTQREKEILADPIGTLHPITGTARPPVENILTKPDNTSSTDKTATTQKVPTHEQHSRESHLGTTRGPDAQMPTPGPKPSRLSSLGNRANPSSTTIFGANTKPDDLPDTTATQSAPTIQMNGSRGQSLFGSAVGAGSGRASTRRPEAPNPFSGPGPREKMRRLIEEDKQKQAKVTAPDVNGIALQRVFKDSKNDILEATRKEVLRDRAFWTSESIFTNPQKPVMPLHGPPLESIIKTGPSMPGVSIAMMTPTEMARLQREVHSLRCQLLDRIRTCPYVDCERYFPFSDGAGLDKHVREDHSVMRCFLCNEEEHLIPYYNADQIKQHFQNVHLNQIVASFGGRDGRINNLEDLIGDSSGLKHYCDRCGRDQFALGHPADRSAHNDNCFTRKAFDTRNADIQKFCGHCADPLQLIGKLKDGRLQFSNPCRACHGFASEKPQNYCPTCSMEFDKAMDQNYRMKHMKMCRPVSGRNWDYCSYCGSDLRSLREPDRKRHVIFCEHKPKNDRATAPANGENLSPGEKKCRLFRICGAITTHMSFHQLVAHMDCHRRHGDLGDEENEEEANSYNVASVESDEGEAEPASSHSEEEKRGEDLIAATKDFVNNLDVIIPRGMRQNIDKIGLGDPQTDNIVMPGGNDLNVYLVRDRWGRIRRATKDFFTRDKKSQDDTPANPESRDDPMPEESGLAKVTDDKALATASVTESTEKNKKSKQKKDTPTTNTSKAKQATPADNSGHPEKTSSLWTQNTNLTPDPALTTTTAKPQTLNPRASTFTLKSGAKSTAASGTVRKFPLVPSDGDASSSTAKKPSPKKNAKGASASPSGRKTRSSKSSSRVGTPEVPFSTTPEGTPPPTNTNKISFTPEKQPPAEYEEGQYYTYRGPTLFTLPSTEQSGTRTLLPSDEIFTGRWPADRQVTTGEDEMEAHIAYYGARDLNIDLKQPKPGGSRAQATSHRQARNFHLNRLIEQAKASKSQADIRELVKALVRDATHSQQPDGTALAAQVLSLTGKHIHKTQALEYATSELEEFTSSELATPNNLSEDQLSELDLSDSTASLSTTNSISSNSHASSDATYDPSRPFPSVTSLSSKRKRKRPADIDPQYRKKSIEPDTEYEFSEKSAVPDPVKNIALDAPRSPKKRATRKKNVTTGSGEGKGDEVKGDMGPPPLPAKAVKAKAEKEKKGPTVTRTGRTVKKTRAAKEANGEETTEPESEVAPARGKGRGKK

SEQ ID NO: 14519 - DNA, 3126 bp, Muscodor strobelii
  misc_feature: SGI EST ID NO. CUFF.34527.0
  misc_feature: Variant of the nucleotide sequence at SEQ ID NO 14517
cacaactcgcttcggtatcgccagaaccttaaacatcgattccaaggtcgcaagtctacaaatgagtttaaaatgacatgtctctactttggtcttcctgttgagccaatacacatgtcgtcagagccgtgggagcccagcccagcgctcatggtggacgaaatggcggagccaaacatcgaccccttaaaattcttgcaagaatacgacgaaaagttcaactacccgcagcctagtgatgatggagatagtatgtatagtggtttgttcggtctgcgtggcggcggcgatagcgatgtttcgatgtcggactacgatgacgatgccgatagcataactagccttggaagtgaagaagatgaatttgctgcggccccgagtcctagcaaggaggaagctgttccgaaagagaacaagaaacttcccggccttagagtgcatggagaatcagttctcaaagctcccccccgccgtatagctgtctatggctatcagggtttgctgaatatggaatacgtccgatacgaccatttcgtgaggactgtagacagacttctcagcaatctggatggtcaagatcaacgcatttgcttggaagtctgggcagcggctggtcctgaaactgcggttttccgcgagcgtacgtttggtcagacatggcacggaaacaagaatgcaccccaagaggaccctatttggcgcctgatctcgaaattgcccgctaccggaacaactagcttcctctattttgtccaccttgaatccgaagatcacccaaccagtatccggccggatgctagtgatgcgcaagaccggtccgtcattcaattaaggaacatttcgagagaagagacggcctatatgagaattccactcaatctcgccgcactcaactgcagaccacatcaatttagcgcagagtattcacgggccatgcgattcctgatgcttccagggtttatgcgggacaatcgcattatcagaatggctgtcccggacggtccttctgtgagaaacaaccatgccgaaattgtatatgagaatcgacttcgaacatactcggacctcgatccttcatccgcggtatgggaattaattgcatctcggcaaggggctgatgacgataaacagcaaccctcggtttcgtttcgtgaggatatcgtagacggcggccacattgtgatctacgacgtgggtgatgtaaactctaagggaggcggattatcatctagaacacaacggctaccagtgcttaggagagatgcatttttcagtgcgtccgagtcaagaataaatgacgtggtctctgcgactgcagatcgttatatgcaaaatctcaacaaagctggcaatgatgtttttgccggtgtagaaatctggggtatgggcagcgagcaagagatcaaggaggggttcgacggggttcgacaagcatttgctgcctccgatcacaatccgttcaagaacatgcactctggaccgttgttgatcccacgcgacggggatcatttgcagttggatggaatcagaaacttcatccgttcaaaattccctaacccagcttcgcgccatgccccttcgcatcttgtcatccggccagtctttacccattatgggttttatcgtgctgttaataggcctcggcccgatgtggaaatcgctcgagatgatttggtcagtctggagaatgtgcaagcgctgttgaacaaatttcgaagatacaacactccacgcgatgcaatcttgatactcgaagctttcgaccagtcctcttcccagcctcaggctgtactgcgtccggacactacgcaggaggaatgggagtggattcgaagaaacatgactgtgccggatttcattgtacgaatcggttacgatccaaagatcagtgcatggcgtcttccgactgactgcgtctggggtccacgatatgctgctaccaacggtgacgaatcctttggtactggatcatggcgaggctaccttgacggcgagattgagttcttagctcgtgccccattcgaggatttccccgataccatacaaaaggaggagaaaacgcagtcaggattgaatatcccaccaccagagatgcccaaaccggagagtctgcgaagagcatacactcagcgcgaaaaggaaatactagccgatcctattggcacattacatcctatcactggtacagcccggcctcctgtcgaaaacatcttgacgaagcccgataacacgagcagcaccgacaagacggcgacaacccagaaggttcctactcatgaacagcattctcgagagtctcacctgggcaccacccggggcccggacgctcagatgcctacccctggaccgaagccttcaagattgagttcactaggcaacagggcaaatccttcttcaacaacaatctttggcgccaatacgaagcccgatgacttacctgacacaacggccacacagtcagctcctacaatacaaatgaatggctcgagaggccagtccctatttggctccgcagtaggtgcaggttctggacgggcttctacgagaagacccgaggctccgaacccgttcagcggcccaggaccacgggagaagatgagacggctgatagaagaagacaagcagaaacaagcaaaagtcacggcacccgatgtgaatggaattgcgctgcaacgcgttttcaaagattcgaagaacgacatccttgaggctacgagaaaggaagtacttcgcgatcgtgcattctggacaagtgaatccatcttcaccaacccacagaagcccgtgatgcctctccatggtcctccgctggaatctatcattaaaactgggccttctatgcctggtgtatccatcgccatgatgacaccaacagagatggcgcgactgcagagggaagttcattcgctacgctgtcagcttcttgatcgaatccgaacatgcccgtatgttgactgcgaacgatatttcccgttctctgatggcgccggcctcgacaagcacgtgcgagaggatcacagcgtcatgcgttgcttcctttgtaacgaggaagagcacctcataccatactacaatgctgaccaaatcaagcagcatttccaaaacgtccacttgaatcagattgtg

SEQ ID NO: 14520 - DNA, 909 bp, Muscodor strobelii
  misc_feature: SGI cDNA ID NO. 564786
  misc_feature: Encodes the peptide sequence at SEQ ID NO 14521
atggaagctcacatcgcctattatggcgctagagacttaaatatagatctcaaacagcccaaaccaggcggcagcagggcccaggctacatcccatcgccaagctcggaatttccacctaaatcggctgatcgagcaagcgaaggcaagtaaatctcaggcagatataagggaactcgtcaaagcgctagtcagggatgctacgcattcgcagcagccggatggcaccgcgctagcggctcaagtcttgagtctcacaggaaaacatattcacaagacgcaagctctcgaatacgccacttcagaacttgaagaattcacctcctcagagctcgcaacacccaacaatctctcagaagatcaactctccgagttagacctatcagactccacagcctcactctctactaccaattctatctcttcaaactcccacgcaagcagtgacgctacatacgatccgtctcgcccctttcccagcgtcacttctctttcatcgaagaggaagcgaaagcgccctgcagatatcgatccccaatacaggaaaaaatccatcgagccggataccgagtatgaattctcggaaaagagcgctgtccccgatcccgtgaagaacatcgcccttgacgcgccgcggagtcctaagaaacgggccacgaggaagaagaatgtcactactggttctggagagggaaaaggggacgaggtgaagggcgatatggggcccccgccactccctgccaaggccgtcaaagccaaggctgagaaagaaaagaagggaccgacggtgacaaggacaggaaggacagtgaagaagacgagggcggcgaaagaggcaaacggcgaagagacgacggaaccggagagtgaggtcgcgccggctaggggcaaggggcgagggaagaagtag

SEQ ID NO: 14521 - protein, 302 aa, Muscodor strobelii
  misc_feature: SGI Peptide ID NO. 564786
MEAHIAYYGARDLNIDLKQPKPGGSRAQATSHRQARNFHLNRLIEQAKASKSQADIRELVKALVRDATHSQQPDGTALAAQVLSLTGKHIHKTQALEYATSELEEFTSSELATPNNLSEDQLSELDLSDSTASLSTTNSISSNSHASSDATYDPSRPFPSVTSLSSKRKRKRPADIDPQYRKKSIEPDTEYEFSEKSAVPDPVKNIALDAPRSPKKRATRKKNVTTGSGEGKGDEVKGDMGPPPLPAKAVKAKAEKEKKGPTVTRTGRTVKKTRAAKEANGEETTEPESEVAPARGKGRGKK

SEQ ID NO: 14522 - DNA, 2713 bp, Muscodor strobelii
  misc_feature: SGI EST ID NO. CUFF.34520.0
  misc_feature: Variant of the nucleotide sequence at SEQ ID NO 14520
accggatgaagcacatgaagatgtgtcgacctgtttcgggacgtaattgggactattgctcttattgcggctccgaccttcgtagtctccgagaacctgatcgaaagagacatgttatcttctgtgaacacaagccaaagaacgaccgtgctaccgctcctgccaatggtgaaaatctttcccccggcgagaaaaaatgtagactattccgtatctgtggagcgattaccacacacatgagcttccatcagcttgtagcacatatggactgtcatagaagacatggggatctgggagacgaggagaacgaagaagaagcaaattcatacaacgtggcgtcagtggagagtgatgagggagaggcagagcctgcatccagccactcggaagaggaaaaacgtggagaggacttgatagcagccacgaaggactttgtgaacaatctcgacgtaatcataccgaggggtatgaggcagaacattgataaaattggattaggcgatccacagacggacaatattgtcatgcctggtggaaatgacctaaacgtctatcttgtcagagaccgctggggaaggatcagaagagccacaaaagattttttcacaagggacaagaaatctcaggacgataccccagcaaatcctgaatctcgcgatgaccccatgccagaggaatctggtttggcgaaagtaacagacgacaaagccttagcgaccgcatcggttacagagagtactgaaaagaacaagaaatctaagcagaagaaggatacccctaccacaaatacatccaaagccaaacaagcgacaccggccgataattctggccaccctgagaaaacatcatcactgtggacacaaaacacgaatctcacccctgatcccgcattgacaacaactactgccaagcctcagacattgaacccgcgcgcttctacgtttaccctgaagtctggagcgaaaagcacagcagcgagtggcacggtcaggaaattcccccttgtgccaagtgatggtgacgcctcatcctcaacggcgaagaaaccaagtcccaagaagaatgcaaagggtgcgtctgccagcccttccggaaggaagactaggtccagcaagtcatcttctagagtgggaactccggaggtcccattttccacgactccagaaggtacaccaccaccaacaaatacgaacaagatctcattcacaccagaaaagcagccgccagcagaatacgaagaagggcaatattacacctatcgtggtcccacactcttcacgctcccttcgacggaacaatcgggaacgagaactctcctgcccagtgatgagatcttcacggggcgctggcccgcggatcgtcaggttacgaccggggaagatgaaatggaagctcacatcgcctattatggcgctagagacttaaatatagatctcaaacagcccaaaccaggcggcagcagggcccaggctacatcccatcgccaagctcggaatttccacctaaatcggctgatcgagcaagcgaaggcaagtaaatctcaggcagatataagggaactcgtcaaagcgctagtcagggatgctacgcattcgcagcagccggatggcaccgcgctagcggctcaagtcttgagtctcacaggaaaacatattcacaagacgcaagctctcgaatacgccacttcagaacttgaagaattcacctcctcagagctcgcaacacccaacaatctctcagaagatcaactctccgagttagacctatcagactccacagcctcactctctactaccaattctatctcttcaaactcccacgcaagcagtgacgctacatacgatccgtctcgcccctttcccagcgtcacttctctttcatcgaagaggaagcgaaagcgccctgcagatatcgatccccaatacaggaaaaaatccatcgagccggataccgagtatgaattctcggaaaagagcgctgtccccgatcccgtgaagaacatcgcccttgacgcgccgcggagtcctaagaaacgggccacgaggaagaagaatgtcactactggttctggagagggaaaaggggacgaggtgaagggcgatatggggcccccgccactccctgccaaggccgtcaaagccaaggctgagaaagaaaagaagggaccgacggtgacaaggacaggaaggacagtgaagaagacgagggcggcgaaagaggcaaacggcgaagagacgacggaaccggagagtgaggtcgcgccggctaggggcaaggggcgagggaagaagtagatggcggtgaactgaagaagaggccgattgaaggcttgtatgagggaggggtggaagcatgattggcgaatgagagcggtgttgacattgttgtgcggttcgtcataagtctttgcacaattctttccctttctctgccttagtttctagttattacggaagagatcaggccggaagatgtaagatggaggaaatggctggaaaggagatataccagtgtttgtactgtacgaaagctcgaccttgtgacaggaggaagaaaaggacagtagaggaagatatagatagatacatggacgatatgcatcgctcctccatagtcaattttcatttgtcccttgctctccatgattagtatgtcgtgactcgtgttgcttcttcgtgaaggcttagtagcggccgcaaagtgacgggccatc

SEQ ID NO: 14523 - DNA, 225 bp, Muscodor strobelii
  misc_feature: SGI cDNA ID NO. 564787
  misc_feature: Encodes the peptide sequence at SEQ ID NO 14524
atgagttcggacgcaacaaggtcacttttggacgtgctccgcgatagtagtgctgtagactgtgacactcttgatgtcgaagtggttaaggaattgggtcctttcatcgactgcacgtctaaccaagtaggttttcgcaagtttagagcgttgcaatcccggataacagctgctaataagagtcaaggcaattgcatatcacgagttgatccgccccgggtctga

SEQ ID NO: 14524 - protein, 74 aa, Muscodor strobelii
  misc_feature: SGI Peptide ID NO. 564787
  misc_feature (5)..(42): NCBI GI: 156055918 Blast Desc: SS1G_05311 [Sclerotinia sclerotiorum 1980] gi|154703095|gb|EDO02834.1| SS1G_05311 [Sclerotinia sclerotiorum 1980]
  misc_feature (5)..(42): NCBI GI: 255949144 Blast Desc: Pc22g14150 [Penicillium chrysogenum Wisconsin 54-1255] gi|211592356|emb|CAP98703.1| Pc22g14150 [Penicillium chrysogenum Wisconsin 54-1255]
  misc_feature (6)..(42): NCBI GI: 242792893 Blast Desc: transaldolase, [Talaromyces stipitatus ATCC 10500] gi|218718637|gb|EED18057.1| transaldolase, [Talaromyces stipitatus ATCC 10500]
  misc_feature (8)..(42): NCBI GI: 212535380 Blast Desc: transaldolase, [Penicillium marneffei ATCC 18224] gi|210070245|gb|EEA24335.1| transaldolase, [Penicillium marneffei ATCC 18224]
MSSDATRSLLDVLRDSSAVDCDTLDVEVVKELGPFIDCTSNQVGFRKFRALQSRITAANKSQGNCISRVDPPRV

SEQ ID NO: 14525 - DNA, 505 bp, Muscodor strobelii
  misc_feature: SGI EST ID NO. CUFF.34535.0
  misc_feature: Variant of the nucleotide sequence at SEQ ID NO 14523
ctgccattcaatttgtccagtcgtcataagtatacattattcattataacttacaaaattcgaaatccaatcgtaccgtctgttgcacgccattattttctgattttacaagatcctgtcagtgataaactccaatagtactacaggtctcgtacggccactctccatgatgagttcggacgcaacaaggtcacttttggacgtgctccgcgatagtagtgctgtagactgtgacactcttgatgtcgaagtggttaaggaattgggtcctttcatcgactgcacgtctaaccaagcaattgcatatcacgagttgatccgccccgggtctgatggaaatctagtgcatgatgaattgatcagagatgccgtttcctatgccatcacaaagtcatcggcgtatcctagtgtcgacactgccgagttggttgtagaggccatgatggtcaagcttgccctccgcatcgtgccgtacctcagtggttattcacatattcagacaaat

SEQ ID NO: 14526 - DNA, 1023 bp, Muscodor strobelii
  misc_feature: SGI cDNA ID NO. 564788
  misc_feature: Encodes the peptide sequence at SEQ ID NO 14527
atgagttcggacgcaacaaggtcacttttggacgtgctccgcgatagtagtgctgtagactgtgacactcttgatgtcgaagtggttaaggaattgggtcctttcatcgactgcacgtctaaccaagcaattgcatatcacgagttgatccgccccgggtctgatggaaatctagtgcatgatgaattgatcagagatgccgtttcctatgccatcacaaagtcatcggcgtatcctagtgtcgacactgccgagttggttgtagaggccatgatggtcaagcttgccctccgcatcgtgccgtacctcagtggttattcacatattcagacaaatcccaaaaattcgtatagtaaacagaaaacaatagacaatggaacgcgtattgtcgccattttcaaagatcttgatccgagctacgacaccaacagaatctgcataaagattcctgcgacatgggaaggcatgcaagcttgccgcgaattggagcaacagggtatcgccacgctcgctactacgatgttttgtctagaacaggctgcactcgcagcacatgttgattgtacatacattgcaccttatataaacgaactcagggtccatttcgatgaaacttatatcgatgagcataaagcctttgatttctgcggctctgcgcaacgttattacaaccatacgggtagcaagacccaagtacttccagccagtctgacaagtatccaggaagttatgaaactcgctggtgcacatcacatcactgtctctcctccattattgaaaaaacttgccggtaccccggctgatccatgggagggagaaggagatactggctcggttttcaagggcaatttcgaggatacgtttcccgatttcaacggcattgtgcaagatgaaagtagctggcgcctcgcatttactcgacgccagagtggtaacgcagagggtaaaatcattcaagcaataaatatcttcagcgagaaacaagacggcttagaggatcttgcccgtcgctatatcaaataa

SEQ ID NO: 14527 - protein, 340 aa, Muscodor strobelii
  misc_feature: SGI Peptide ID NO. 564788
  misc_feature (18)..(308): Pfam Id: PF00923 Pfam Desc: Transaldolase
  misc_feature (61)..(196): Pfam Id: PF00923 Pfam Desc: Transaldolase
  misc_feature (8)..(338): NCBI GI: 85095026 Blast Desc: NCU06142 [Neurospora crassa OR74A] gi|28921462|gb|EAA30768.1| [Neurospora crassa OR74A]
  misc_feature (28)..(339): NCBI GI: 238504948 Blast Desc: transaldolase, [Aspergillus flavus NRRL3357] gi|220689817|gb|EED46167.1| transaldolase, [Aspergillus flavus NRRL3357]
  misc_feature (6)..(336): NCBI GI: 242792893 Blast Desc: transaldolase, [Talaromyces stipitatus ATCC 10500] gi|218718637|gb|EED18057.1| transaldolase, [Talaromyces stipitatus ATCC 10500]
  misc_feature (8)..(336): NCBI GI: 212535380 Blast Desc: transaldolase, [Penicillium marneffei ATCC 18224] gi|210070245|gb|EEA24335.1| transaldolase, [Penicillium marneffei ATCC 18224]
  misc_feature (7)..(331): NCBI GI: 145237504 Blast Desc: An07g03160 [Aspergillus niger] gi|134075871|emb|CAL00250.1| protein product [Aspergillus niger]
  misc_feature (8)..(318): NCBI GI: 46126341 Blast Desc: FG07548.1 [Gibberella zeae PH-1]
  misc_feature (8)..(334): NCBI GI: 256724672 Blast Desc: NECHADRAFT_47938 [Nectria haematococca mpVI 77-13-4]
  misc_feature (5)..(339): NCBI GI: 169780848 Blast Desc: [Aspergillus oryzae RIB40] gi|83773628|dbj|BAE63755.1| protein product [Aspergillus oryzae]
  misc_feature (5)..(321): NCBI GI: 255949144 Blast Desc: Pc22g14150 [Penicillium chrysogenum Wisconsin 54-1255] gi|211592356|emb|CAP98703.1| Pc22g14150 [Penicillium chrysogenum Wisconsin 54-1255]
  misc_feature (73)..(336): NCBI GI: 212535382 Blast Desc: transaldolase, [Penicillium marneffei ATCC 18224] gi|210070246|gb|EEA24336.1| transaldolase, [Penicillium marneffei ATCC 18224]
  misc_feature (8)..(267): SWISSPROT Homolog: EC 2.2.1.2 Transaldolase
MSSDATRSLLDVLRDSSAVDCDTLDVEVVKELGPFIDCTSNQAIAYHELIRPGSDGNLVHDELIRDAVSYAITKSSAYPSVDTAELVVEAMMVKLALRIVPYLSGYSHIQTNPKNSYSKQKTIDNGTRIVAIFKDLDPSYDTNRICIKIPATWEGMQACRELEQQGIATLATTMFCLEQAALAAHVDCTYIAPYINELRVHFDETYIDEHKAFDFCGSAQRYYNHTGSKTQVLPASLTSIQEVMKLAGAHHITVSPPLLKKLAGTPADPWEGEGDTGSVFKGNFEDTFPDFNGIVQDESSWRLAFTRRQSGNAEGKIIQAINIFSEKQDGLEDLARRYIK

SEQ ID NO: 14528 - DNA, 966 bp, Muscodor strobelii
  misc_feature: SGI EST ID NO. CUFF.34538.0
  misc_feature: Variant of the nucleotide sequence at SEQ ID NO 14526
gtcgccattttcaaagatcttgatccgagctacgacaccaacagaatctgcataaagattcctgcgacatgggaaggcatgcaagcttgccgcgaattggagcaacagggtatcgccacgctcgctactacgatgttttgtctagaacaggctgcactcgcagcacatgttgattgtacatacattgcaccttatataaacgaactcagggtccatttcgatgaaacttatatcgatgagcataaagcctttgatttctgcggctctgcgcaacgttattacaaccatacgggtagcaagacccaagtacttccagccagtctgacaagtatccaggaagttatgaaactcgctggtgcacatcacatcactgtctctcctccattattgaaaaaacttgccggtaccccggctgatccatgggagggagaaggagatactggctcggttttcaagggcaatttcgaggatacgtttcccgatttcaacggcattgtgcaagatgaaagtagctggcgcctcgcatttactcgacgccagagtggtaacgcagagggtaaaatcattcaagcaataaatatcttcagcgagaaacaagacggcttagaggatcttgcccgtcgctatatcaaataatgccgacagcatcgcgctgttcaatctattacggtatcgtgctggatggcgtgtgtgcacttcgtatcattgccgccaatggtgccatcaacggagaaatttgatgcagtcattaatgccgaacgtcttccaaatcaacctttccacaactgtcttacttcatatctacaaaccatgccagaaataccagcctatgttttgtacagctcatttaaatattctcgtgctcttcaagtttcattttcttttcttcgctaatatcctggttgctgtcgctattgcccaagccgtggagcatagctgtgagcccaatctcgcggttgatctccg

SEQ ID NO: 14529 - DNA, 753 bp, Muscodor strobelii
  misc_feature: SGI cDNA ID NO. 564789
  misc_feature: Encodes the peptide sequence at SEQ ID NO 14530
atgatggtcaagcttgccctccgcatcgtgccgtacctcagtggttattcacatattcagacaaatcccaaaaattcgtatagtaaacagaaaacaatagacaatggaacgcgtattgtcgccattttcaaagatcttgatccgagctacgacaccaacagaatctgcataaagattcctgcgacatgggaaggcatgcaagcttgccgcgaattggagcaacagggtatcgccacgctcgctactacgatgttttgtctagaacaggctgcactcgcagcacatgttgattgtacatacattgcaccttatataaacgaactcagggtccatttcgatgaaacttatatcgatgagcataaagcctttgatttctgcggctctgcgcaacgttattacaaccatacgggtagcaagacccaagtacttccagccagtctgacaagtatccaggaagttatgaaactcgctggtgcacatcacatcactgtctctcctccattattgaaaaaacttgccggtaccccggctgatccatgggagggagaaggagatactggctcggttttcaagggcaatttcgaggatacgtttcccgatttcaacggcattgtgcaagatgaaagtagctggcgcctcgcatttactcgacgccagagtggtaacgcagagggtaaaatcattcaagcaataaatatcttcagcgagaaacaagacggcttagaggatcttgcccgtcgctatatcaaataa

SEQ ID NO: 14530 - protein, 250 aa, Muscodor strobelii
  misc_feature: SGI Peptide ID NO. 564789
  misc_feature (1)..(218): Pfam Id: PF00923 Pfam Desc: Transaldolase
  misc_feature (26)..(106): Pfam Id: PF00923 Pfam Desc: Transaldolase
  misc_feature (1)..(248): NCBI GI: 85095026 Blast Desc: NCU06142 [Neurospora crassa OR74A] gi|28921462|gb|EAA30768.1| [Neurospora crassa OR74A]
  misc_feature (19)..(244): NCBI GI: 256724672 Blast Desc: NECHADRAFT_47938 [Nectria haematococca mpVI 77-13-4]
  misc_feature (2)..(249): NCBI GI: 238504948 Blast Desc: transaldolase, [Aspergillus flavus NRRL3357] gi|220689817|gb|EED46167.1| transaldolase, [Aspergillus flavus NRRL3357]
  misc_feature (18)..(228): NCBI GI: 46126341 Blast Desc: FG07548.1 [Gibberella zeae PH-1]
  misc_feature (2)..(241): NCBI GI: 145237504 Blast Desc: An07g03160 [Aspergillus niger] gi|134075871|emb|CAL00250.1| protein product [Aspergillus niger]
  misc_feature (3)..(246): NCBI GI: 212535380 Blast Desc: transaldolase, [Penicillium marneffei ATCC 18224] gi|210070245|gb|EEA24335.1| transaldolase, [Penicillium marneffei ATCC 18224]
  misc_feature (3)..(246): NCBI GI: 212535382 Blast Desc: transaldolase, [Penicillium marneffei ATCC 18224] gi|210070246|gb|EEA24336.1| transaldolase, [Penicillium marneffei ATCC 18224]
  misc_feature (3)..(246): NCBI GI: 242792893 Blast Desc: transaldolase, [Talaromyces stipitatus ATCC 10500] gi|218718637|gb|EED18057.1| transaldolase, [Talaromyces stipitatus ATCC 10500]
  misc_feature (2)..(249): NCBI GI: 169780848 Blast Desc: [Aspergillus oryzae RIB40] gi|83773628|dbj|BAE63755.1| protein product [Aspergillus oryzae]
  misc_feature (2)..(231): NCBI GI: 255949144 Blast Desc: Pc22g14150 [Penicillium chrysogenum Wisconsin 54-1255] gi|211592356|emb|CAP98703.1| Pc22g14150 [Penicillium chrysogenum Wisconsin 54-1255]
  misc_feature (1)..(175): SWISSPROT Homolog: EC 2.2.1.2 Transaldolase
MMVKLALRIVPYLSGYSHIQTNPKNSYSKQKTIDNGTRIVAIFKDLDPSYDTNRICIKIPATWEGMQACRELEQQGIATLATTMFCLEQAALAAHVDCTYIAPYINELRVHFDETYIDEHKAFDFCGSAQRYYNHTGSKTQVLPASLTSIQEVMKLAGAHHITVSPPLLKKLAGTPADPWEGEGDTGSVFKGNFEDTFPDFNGIVQDESSWRLAFTRRQSGNAEGKIIQAINIFSEKQDGLEDLARRYIK

SEQ ID NO: 14531 - DNA, 966 bp, Muscodor strobelii; identical to SEQ ID NO: 14528
  misc_feature: SGI EST ID NO. CUFF.34538.0
  misc_feature: Variant of the nucleotide sequence at SEQ ID NO 14529

SEQ ID NO: 14532 - DNA, 1668 bp, Muscodor strobelii
  misc_feature: SGI cDNA ID NO. 564790
  misc_feature: Encodes the peptide sequence at SEQ ID NO 14533
atgggagctgcaccggactctggtgctgccatctatgatgcagccttgaagcggcgccaggccatgatgggcgcttcaggccccatggctctggtgaagaactttaaggttttccgaatcgcgctctttgcttgcataggtggcatcctgtacggctacaaccaaggaatgttctcaggtctcctatcgatgccggcattcaagtctcacatgggggactatgatccattcgacgatacagctgaccagacgaaaaagggctggttgacagctattcttgaactaggcgcatggattggaacactcatgtctggcttcgtggcagagactatctctcgtaaatacggtattctcgtcgctgttccgtttttgcggttcgtcactggtatgggcgtcggtgcactcgctgctatcgtacccatctataattccgaggttgcaccacctgaggtccgaggtgcattggtggctttgcagcagcttgccattacgttcggtattctgatcagtttttggatcgactatggaacgaattacattggcggaacaactctcggaacgcagaaagacgctgcctggcttgtccctatttgtctgcagctgttcccagcggtgatcctgttcgtgggcatgatattcatgccattctcaccaagatggctcatccatcacgatcgcgaaagcgaagcgcgtatcatactggcaaatcttcggggattatcagtcgaacatgagctcgttgagcttgaattcctcgagatcaaagctcagtctcaattcgaaaagagaacagtggcggagcacttcccacatcttcgacagccgacgacatggaatacatttaaattgcaatttgttgctatcaagtcgctattccaaaccaaagcgatgtttaagcgcgtgatagttgcgacggtcaccatgttcttccagcagtggactggtatcaacgcaatattgtattatgccccgatcattttcaacaaacttggcttgagcagcaatacaactagtctccttgcgacaggtgttgtgggcatcgtcatgttcctcttcacgataccggctgttctctggattgaccgtgtgggccggaagccagtcctcacgattggcgctattggcatggcgacctgccacatcattatcgccgtgatcgtcgcgaagaactcgacgcaatgggaacatcagcgtgccgcgggttgggctgctgtcgcacttgtctggctttttgtcattcacttcggatactcgtggggcccttgcgcatggatcatcatcgctgagatctggccgctgagctcccgcccttacggtgtaacgctcggggcatcgagtaattggatgaataattttatcgttggacaagttacaccggacatgctgaacaatattggatatgggacctatatcttgttcggcctgcttacctttcttggcgccggctttgtttggttctttgtgccagaaaccaagcgtctcactcttgaggaaatggatgtcatcttcggctctgaagggacagcacaagctgatttcgagagaatggcggagatcaaccgcgagattgggctcacagctatgctccacggcttgggcaatagcgacagcaaccaggatattagcgaagaaaagaaaatgaaacttgaagagcacgagaatatttaa

SEQ ID NO: 14533 - protein, 555 aa, Muscodor strobelii
  misc_feature: SGI Peptide ID NO. 564790
  misc_feature (44)..(455): Pfam Id: PF07690 Pfam Desc: Major Facilitator Superfamily
  misc_feature (40)..(503): Pfam Id: PF00083 Pfam Desc: Sugar (and other) transporter
  misc_feature (301)..(493): Pfam Id: PF07690 Pfam Desc: Major Facilitator Superfamily
  misc_feature (282)..(503): Pfam Id: PF00083 Pfam Desc: Sugar (and other) transporter
  misc_feature (125)..(256): Pfam Id: PF00083 Pfam Desc: Sugar (and other) transporter
  misc_feature (40)..(121): Pfam Id: PF00083 Pfam Desc: Sugar (and other) transporter
  misc_feature (12)..(552): NCBI GI: 85095010 Blast Desc: NCU06138 [Neurospora crassa OR74A] gi|28921458|gb|EAA30764.1| NCU06138 [Neurospora crassa OR74A]
  misc_feature (12)..(555): NCBI GI: 171681555 Blast Desc: protein product [Podospora anserina] gi|170940736|emb|CAP65964.1| protein product [Podospora anserina]
  misc_feature (3)..(548): NCBI GI: 39976255 Blast Desc: MGG_05946 [Magnaporthe grisea 70-15] gi|145011787|gb|EDJ96443.1| MGG_05946 [Magnaporthe grisea 70-15]
  misc_feature (12)..(551): NCBI GI: 116203923 Blast Desc: CHGG_09845 [Chaetomium globosum CBS 148.51] gi|88175973|gb|EAQ83441.1| CHGG_09845 [Chaetomium globosum CBS 148.51]
  misc_feature (12)..(545): NCBI GI: 256720786 Blast Desc: [Nectria haematococca mpVI 77-13-4]
  misc_feature (1)..(547): NCBI GI: 157674375 Blast Desc: sugar transporter [Gibberella moniliformis]
  misc_feature (1)..(546): NCBI GI: 46133825 Blast Desc: FG09052.1 [Gibberella zeae PH-1]
  misc_feature (4)..(555): NCBI GI: 156051450 Blast Desc: SS1G_07132 [Sclerotinia sclerotiorum 1980] gi|154704910|gb|EDO04649.1| SS1G_07132 [Sclerotinia sclerotiorum 1980]
  misc_feature (3)..(543): NCBI GI: 189210669 Blast Desc: quinate permease [Pyrenophora tritici-repentis Pt-1C-BFP] gi|187977759|gb|EDU44385.1| quinate permease [Pyrenophora tritici-repentis Pt-1C-BFP]
  misc_feature (8)..(555): NCBI GI: 261357973 Blast Desc: quinate permease [Verticillium albo-atrum VaMs.102]
MGAAPDSGAAIYDAALKRRQAMMGASGPMALVKNFKVFRIALFACIGGILYGYNQGMFSGLLSMPAFKSHMGDYDPFDDTADQTKKGWLTAILELGAWIGTLMSGFVAETISRKYGILVAVPFLRFVTGMGVGALAAIVPIYNSEVAPPEVRGALVALQQLAITFGILISFWIDYGTNYIGGTTLGTQKDAAWLVPICLQLFPAVILFVGMIFMPFSPRWLIHHDRESEARIILANLRGLSVEHELVELEFLEIKAQSQFEKRTVAEHFPHLRQPTTWNTFKLQFVAIKSLFQTKAMFKRVIVATVTMFFQQWTGINAILYYAPIIFNKLGLSSNTTSLLATGVVGIVMFLFTIPAVLWIDRVGRKPVLTIGAIGMATCHIIIAVIVAKNSTQWEHQRAAGWAAVALVWLFVIHFGYSWGPCAWIIIAEIWPLSSRPYGVTLGASSNWMNNFIVGQVTPDMLNNIGYGTYILFGLLTFLGAGFVWFFVPETKRLTLEEMDVIFGSEGTAQADFERMAEINREIGLTAMLHGLGNSDSNQDISEEKKMKLEEHENI

SEQ ID NO: 14534 - DNA, 1312 bp, Muscodor strobelii
  misc_feature: SGI EST ID NO. CUFF.34539.1
  misc_feature: Variant of the nucleotide sequence at SEQ ID NO 14532
tttcaacaaacttggcttgagcagcaatacaactagtctccttgcgacaggtgttgtgggcatcgtcatgttcctcttcacgataccggctgttctctggattgaccgtgtgggccggaagccagtcctcacgattggcgctattggcatggcgacctgccacatcattatcgccgtgatcgtcgcgaagaactcgacgcaatgggaacatcagcgtgccgcgggttgggctgctgtcgcacttgtctggctttttgtcattcacttcggatactcgtggggcccttgcgcatggatcatcatcgctgagatctggccgctgagctcccgcccttacggtgtaacgctcggggcatcgagtaattggatgaataattttatcgttggacaagttacaccggacatgctgaacaatattggatatgggacctatatcttgttcggcctgcttacctttcttggcgccggctttgtttggttctttgtgccagaaaccaagcgtctcactcttgaggaaatggatgtcatcttcggctctgaagggacagcacaagctgatttcgagagaatggcggagatcaaccgcgagattgggctcacagctatgctccacggcttgggcaatagcgacagcaaccaggatattagcgaagaaaagaaaatgaaacttgaagagcacgagaatatttaaatgagctgtacaaaacataggctggtatttctggcatggtttgtagatatgaagtaagacagttgtggaaaggttgatttggaagacgttcggcattaatgactgcatcaaatttctccgttgatggcaccattggcggcaatgatacgaagtgcacacacgccatccagcacgataccgtaatagattgaacagcgcgatgctgtcggcattatttgatatagcgacgggcaagatcctctaagccgtcttgtttctcgctgaagatatttattgcttgaatgattttaccctctgcgttaccactctggcgtcgagtaaatgcgaggcgccagctactttcatcttgcacaatgccgttgaaatcgggaaacgtatcctcgaaattgcccttgaaaaccgagccagtatctccttctccctcccatggatcagccggggtaccggcaagttttttcaataatggaggagagacagtgatgtgatgtgcaccagcgagtttcataacttcctggatacttgtcagactggctggaagtacttgggtcttgctacccgtatggttgtaataacgttgcgcagagccgcagaaatcaaaggctttatgctcatcgatataac

SEQ ID NO: 14535 - DNA, 1011 bp, Muscodor strobelii
  misc_feature: SGI cDNA ID NO. 564791
  misc_feature: Encodes the peptide sequence at SEQ ID NO 14536
atgccgaagcagcagcacacgcgctcttcgagttcgagccataaccggtactcgaacccgaaccccatgcccggcgtgtcggtgaccctggcaccctcggcgatgcccatcacttattcggcacggccggtcctgcccctgaacaccacgaacttgacgtctgcaaatttgagcactgccacctactacaacaccatgccatcctcggcttcggtctccatgtcggcccaccagtatgatccttacccgcagcaggccgctacaatggctccgcagcccgtgccgagcatctcctcgcaccggccttcctcgggcgcttggacaccgcaggacgatcagaatctgatcacggcgcggcagcagggtctcaactggagccagatccaaacgcagtacttcccgaacaagtcgccgaacgcgtgccgcaagcgccatgaaaggctaatggagcggaaaggcgccgacgactttgacaccaagaaactggagcgtctcgcggaggagtacatgagtatgcgcaaggagatctggcagggactggcggcgcggacgggagagaaatggagcactgttgagaccaagtgcatgagcaacggtctcaagaacttgcaggcagcagcgcggtcggcaggacggcgcaagcgccaggagggatcgtcgtcctccggctaccaccacgggtacgcagacgacgacagcggtatctcgggcatcggtctgactccagtagatgaccagttcgacggctcgtacagcagccccgagacgtcctcgtcacactcgcacgcgggcagcacctacgccatgcagcatcaccagtctatgcagatcccctacagcaacgggtacgcctcttcttactcttcttcttcgagcacgcatggctacggcatgcatggacatcattctcaggacagctcgccttatatcacacagcgtctgccgagcgtcgatatgggcatcgaggctatcatcaaccagcctggacgcggccatcatcacggccattag

SEQ ID NO: 14536 - protein, 336 aa, Muscodor strobelii
  misc_feature: SGI Peptide ID NO. 564791
  misc_feature (1)..(331): NCBI GI: 46126337 Blast Desc: FG07546.1 [Gibberella zeae PH-1]
  misc_feature (1)..(328): NCBI GI: 256724671 Blast Desc: NECHADRAFT_84468 [Nectria haematococca mpVI 77-13-4]
  misc_feature (60)..(327): NCBI GI: 85095018 Blast Desc: NCU06140 [Neurospora crassa OR74A] gi|28921460|gb|EAA30766.1| [Neurospora crassa OR74A]
  misc_feature (92)..(328): NCBI GI: 156056753 Blast Desc: SS1G_04107 [Sclerotinia sclerotiorum 1980] gi|154701893|gb|EDO01632.1| SS1G_04107 [Sclerotinia sclerotiorum 1980]
  misc_feature (92)..(328): NCBI GI: 154323774 Blast Desc: BC1G_00286 [Botryotinia fuckeliana B05.10] gi|150842515|gb|EDN17708.1| BC1G_00286 [Botryotinia fuckeliana B05.10]
  misc_feature (57)..(285): NCBI GI: 261358566 Blast Desc: conserved [Verticillium albo-atrum VaMs.102]
  misc_feature (62)..(327): NCBI GI: 116203927 Blast Desc: CHGG_09847 [Chaetomium globosum CBS 148.51] gi|88175975|gb|EAQ83443.1| CHGG_09847 [Chaetomium globosum CBS 148.51]
  misc_feature (62)..(327): NCBI GI: 171681553 Blast Desc: protein product [Podospora anserina] gi|170940735|emb|CAP65963.1| protein product [Podospora anserina]
  misc_feature (58)..(216): NCBI GI: 145603578 Blast Desc: MGG_05945 [Magnaporthe grisea 70-15] gi|145011788|gb|EDJ96444.1| MGG_05945 [Magnaporthe grisea 70-15]
  misc_feature (107)..(250): NCBI GI: 189202892 Blast Desc: conserved [Pyrenophora tritici-repentis Pt-1C-BFP] gi|187984881|gb|EDU50369.1| conserved [Pyrenophora tritici-repentis Pt-1C-BFP]
MPKQQHTRSSSSSHNRYSNPNPMPGVSVTLAPSAMPITYSARPVLPLNTTNLTSANLSTATYYNTMPSSASVSMSAHQYDPYPQQAATMAPQPVPSISSHRPSSGAWTPQDDQNLITARQQGLNWSQIQTQYFPNKSPNACRKRHERLMERKGADDFDTKKLERLAEEYMSMRKEIWQGLAARTGEKWSTVETKCMSNGLKNLQAAARSAGRRKRQEGSSSSGYHHGYADDDSGISGIGLTPVDDQFDGSYSSPETSSSHSHAGSTYAMQHHQSMQIPYSNGYASSYSSSSSTHGYGMHGHHSQDSSPYITQRLPSVDMGIEAIINQPGRGHHHGH

SEQ ID NO: 14537 - DNA, 4920 bp, Muscodor strobelii
  misc_feature: SGI EST ID NO. CUFF.34582.0
  misc_feature: Variant of the nucleotide sequence at SEQ ID NO 14535
gcccccaatgcctccccttctcctttcaggttatacccagtcgggttggaacgtgggtaggtagggcaattcagcgttaaccgcccttcaattcccccctagaccacttttctattctatcctagccgcccgactccagacagacgcctcttccggatgggcgccagccaatatccgcaccccgtcgagcgtctcttcgctctttcagatacacaacctgggtttcatgatcgccggcttgcatctccccacgtcgtcagtcgccctggatcttcacccacccgctacagacatgggcttggtttcagatcctcacccgtcttggatgctcgtcgaaccaacacgttctcgtgtgggacgacgtcctcgacgatggccgcccagagacgtgttttataagtagaggcgcccatatcgtgacctggcctgccttgttccttcccttcccggaccctctcgctacaccttcaagctctccgtttcctatcgtcttcgtttcctacgtctggcctggtttctgtttccttgtcgccccgttcgtttcatcgtcctcatcgttcgtttgatacgagtcagatctttgttaccaaccatctattcaccttctcactatacactgtctatctcggcgactcctcaggagaagcaagcaggcatacaacaagcataccagcatacacgatacgtcgcatagccacagtagagtcacctatcgctaattctaatcgtctctgtttcgaagcggatgcccacctgtgtatccacatcttctattctcttcgcagtagctatttctctttgctagtgtaccaactatcaccatgccgaagcagcagcacacgcgctcttcgagttcgagccataaccggtactcgaacccgaaccccatgcccggcgtgtcggtgaccctggcaccctcggcgatgcccatcacttattcggcacggccggtcctgcccctgaacaccacgaacttgacgtctgcaaatttgagcactgccacctactacaacaccatgccatcctcggcttcggtctccatgtcggcccaccagtatgatccttacccgcagcaggccgctacaatggctccgcagcccgtgccgagcatctcctcgcaccggccttcctcgggcgcttggacaccgcaggacgatcagaatctgatcacggcgcggcagcagggtctcaactggagccagatccaaacgcagtacttcccgaacaagtcgccgaacgcgtgccgcaagcgccatgaaaggctaatggagcggaaaggcgccgacgactttgacaccaagaaactggagcgtctcgcggaggagtacatgagtatgcgcaaggagatctggcagggactggcggcgcggacgggagagaaatggagcactgttgagaccaagtgcatgagcaacggtctcaagaacttgcaggcagcagcgcggtcggcaggacggcgcaagcgccaggagggatcgtcgtcctccggctaccaccacgggtacgcagacgacgacagcggtatctcgggcatcggtctgactccagtagatgaccagttcgacggctcgtacagcagccccgagacgtcctcgtcacactcgcacgcgggcagcacctacgccatgcagcatcaccagtctatgcagatcccctacagcaacgggtacgcctcttcttactcttcttcttcgagcacgcatggctacggcatgcatggacatcattctcaggacagctcgccttatatcacacagcgtctgccgagcgtcgatatgggcatcgaggctatcatcaaccagcctggacgcggccatcatcacggccattagtcactcggcaacctacctttttctttatcttctctttcttctcttcgatgacgttacgaacgtttttacttctctagtctctccttaattcaggcctcgtcaactctcgtcgagctaataccatcgtccttccactgtatcccattccttcactattcagtcagtcaatcatttctcggccatacgatgggtattcggtaattgcatgcatgtcagggtgttttgtgtatttcatggatgggagttccggtcgtctttttcttctctatcctcttcattctttctctctcttctaccttgcacatggcagttcgaagcgttgggcaatggaaagggcgtatcgggtttcatttttggggtatccgagattcaacgatggctccgtcgtatctattcttcgtcttctcggtgtcttggcctattttcggccgctcaattctctatcgtcatttgcattccacatatcttccttttgtccatcaacgatgagatgacgaatttctattaatccatctgtctgactactgcactggggcacgggacgaacggagtgtgtcaaaagagagaaagaaaagtgcttttagggtaattacaatgcccacctactttcttgggatgattcagatacctattttccttccttcatcgggttacttagagagaggcaaggcaaaggcaaaggcaaggccaacatagcatgagcacgcaatgcatggcgtggagcataatcaagggtcttatctatcttatacctaatagcagcagcaagaagcattgcattttcccgaattcgccactgcctacacatgtactactacatcatctagcatcgtcggcatttgtcacggccaggtatcgacatctaacctaaatacctaatctaggcttaaatgagatgaccaacaaacagcaagtctgatcttgggaatgatcttgggaatgatcttgccgcacaaacctagagtctcccttctataaatatactcccaagtcaagaataaaagtcaggcttagtgccggaatatacagtgtagtggatagtagtatgacaatgctttactcatacaagctcctccatagagcagccgatgcactctaagcccaggaccattcgatgcattctccatgttccgtactatacaatgccccttatttctccttatgatatactctcgacacagctcagctcagctcagctcttgttagcaacaacaggaatgggcacgacattctcctcccactcgtcatcctcccaatcttcctcgtcttcctcttcatccctactgccgacgacagccctccaaacgcgctcccacatgcctttcttctgcaccagcgcgagcaccatgacggcgggtagaagccagacgctggcccagaacaggcccctcgcgctgcccttggacccctcgtgcctccagaatctcaccgcttctctgaccaaccagatattcacgggcaagctggtcacggcaaagctccactcggtcacaccggcgtagctaagcccgacgcagatgggaatgaaggccaggctgtagcgcagggcgacgcgggcgttcctggcggggttgatccagcagagcatctggtggccggcgaccttgtactcctcgcggatggaccaggacagggccatgaagtggggaaactgccaggcgaaaagcagggcagcaaacaaccagccgccgagggcttcgggcactaacagaagtgcgcggaagccgtcctcggtggcgtattcaccggcagctgcagcccagcccatgagtggcgggataccgccgacgacggctccgacccaggtgttgagccaagagacgcgtttcaggggagtgtagacgccggcgtagaggaggatgttggcgaacccgaggaatgcgacggtggggttcacgccatagtagagaccggccacgccggccacaccggcgaggagggcgaaggcgagggcgcgtgggcgtgacagcagaccgcggacgaggggccggttgcgggtgcgggacatgagggcgtcgtaggcgggctcgtagagcatgttgagggtgttggcgctggcgatgcagagggcggtgccggtggtgaggaaggcgagggtgaggggcgacagcgagggcgtgtcgaggccgatggtgggggcgaggaagtcggggacggggtagagggcgtagggggccatggcggtgagggtgacgaggacggtgaggcggggcttggagagcgagaggtagagcgacagctggcggcgcagggagctcgtggacttctcggacgccgtcgtcagggtcgaggaggcgttgtcggggaggatctgctcggtcgaggaggcggatgatgttgatgatgttgatggcaatgtcgatgtcgatgtcgatgtcgtagtgacagcagcctcgtgaggactgttcttttctgcattctgccgccgctgtctccgccgatgtggcaggttggatgtgtctgtgggcacagctgccgccgagctgttcgacggtcgtgacgatgtgtgattatggtcattggatatgaagtagcccgcattgagacgggctggggtcgacttgaagagcgctctcggggctgccgtgtgagagaagcatctcagcgaccttgaggatcttgctgtcactggcgacaaggtggcaggcagccttctcgagggtccctgcagctccagctcacgactgcagcatcgccagcagacggaaacaatactactgctgctgcggcccagcgagccgaagacgtgggcggccggccggaagctcatcgtgacgccctgcgcatgtcgctcgtcgctcgtgatccgggtcctctcaattctctcagaccgtctgtaccagtttcaggccgtgcgttcctgctcgacaatgatcctaaattggagcgattagcgatggcgcattgcgaatggcgaattgcgaatggacatgacatcaacctggacagtgcctgatcgccggtgacgcgtgtaggaaaattcatgacatgttgcgcccccccgattgacgcatgtcttctagctcggacatgcttgtatccagacaatcacctcgctagaaacatcccccatcacccccgagtgccc

SEQ ID NO: 14538 - DNA, 1578 bp, Muscodor strobelii
  misc_feature: SGI cDNA ID NO. 564792
  misc_feature: Reduced expression when VOC is produced
  misc_feature: Encodes the peptide sequence at SEQ ID NO 14539
atgagcttccggccggccgcccacgtcttcggctcgctgggccgcagcagcagtagtattgtttccgtctgctggcgatgctgcagtcgtgagctggagctgcagggaccctcgagaaggctgcctgccaccttgtcgccagtgacagcaagatcctcaaggtcgctgagatgcttctctcacacggcagccccgagagcgctcttcaagtcgaccccagcccgtctcaatgcgggctacttcatatccaatgaccataatcacacatcgtcacgaccgtcgaacagctcggcggcagctgtgcccacagacacatccaacctgccacatcggcggagacagcggcggcagaatgcagaaaagaacagtcctcacgaggctgctgtcactacgacatcgacatcgacatcgacattgccatcaacatcatcaacatcatccgcctcctcgaccgagcagatcctccccgacaacgcctcctcgaccctgacgacggcgtccgagaagtccacgagctccctgcgccgccagctgtcgctctacctctcgctctccaagccccgcctcaccgtcctcgtcaccctcaccgccatggccccctacgccctctaccccgtccccgacttcctcgcccccaccatcggcctcgacacgccctcgctgtcgcccctcaccctcgccttcctcaccaccggcaccgccctctgcatcgccagcgccaacaccctcaacatgctctacgagcccgcctacgacgccctcatgtcccgcacccgcaaccggcccctcgtccgcggtctgctgtcacgcccacgcgccctcgccttcgccctcctcgccggtgtggccggcgtggccggtctctactatggcgtgaaccccaccgtcgcattcctcgggttcgccaacatcctcctctacgccggcgtctacactcccctgaaacgcgtctcttggctcaacacctgggtcggagccgtcgtcggcggtatcccgccactcatgggctgggctgcagctgccggtgaatacgccaccgaggacggcttccgcgcacttctgttagtgcccgaagccctcggcggctggttgtttgctgccctgcttttcgcctggcagtttccccacttcatggccctgtcctggtccatccgcgaggagtacaaggtcgccggccaccagatgctctgctggatcaaccccgccaggaacgcccgcgtcgccctgcgctacagcctggccttcattcccatctgcgtcgggcttagctacgccggtgtgaccgagtggagctttgccgtgaccagcttgcccgtgaatatctggttggtcagagaagcggtgagattctggaggcacgaggggtccaagggcagcgcgaggggcctgttctgggccagcgtctggcttctacccgccgtcatggtgctcgcgctggtgcagaagaaaggcatgtgggagcgcgtttggagggctgtcgtcggcagtagggatgaagaggaagacgaggaagattgggaggatgacgagtgggaggagaatgtcgtgcccattcctgttgttgctaacaagagctga

SEQ ID NO: 14539 - protein, 525 aa, Muscodor strobelii
  misc_feature: SGI Peptide ID NO. 564792
  misc_feature (202)..(482): Pfam Id: PF01040 Pfam Desc: UbiA prenyltransferase family
  misc_feature (218)..(482): Pfam Id: PF01040 Pfam Desc: UbiA prenyltransferase family
  misc_feature (83)..(493): NCBI GI: 46126339 Blast Desc: FG07547.1 [Gibberella zeae PH-1] gi|85540941|sp|Q4I5G1.1|COX10_GIBZE RecName: Full=Protoheme IX farnesyltransferase, mitochondrial; AltName: Full=Heme O Flags:
  misc_feature (16)..(513): NCBI GI: 39976259 Blast Desc: MGG_05944 [Magnaporthe grisea 70-15] gi|88909599|sp|P0C150.1|COX10_MAGGR RecName: Full=Protoheme IX farnesyltransferase, mitochondrial; AltName: Full=Heme O Flags:
  misc_feature (155)..(495): NCBI GI: 256724803 Blast Desc: [Nectria haematococca mpVI 77-13-4]
  misc_feature (54)..(525): NCBI GI: 156056749 Blast Desc: SS1G_04105 [Sclerotinia sclerotiorum 1980] gi|154701891|gb|EDO01630.1| SS1G_04105 [Sclerotinia sclerotiorum 1980]
  misc_feature (101)..(496): NCBI GI: 116203929 Blast Desc: CHGG_09848 [Chaetomium globosum CBS 148.51] gi|88175976|gb|EAQ83444.1| CHGG_09848 [Chaetomium globosum CBS 148.51]
  misc_feature (15)..(495): NCBI GI: 171681551 Blast Desc: protein product [Podospora anserina] gi|170940734|emb|CAP65962.1| protein product [Podospora anserina]
  misc_feature (109)..(513): NCBI GI: 154323790 Blast Desc: BC1G_00294 [Botryotinia fuckeliana B05.10] gi|150842523|gb|EDN17716.1| BC1G_00294 [Botryotinia fuckeliana B05.10]
  misc_feature (100)..(514): NCBI GI: 189202960 Blast Desc: protoheme IX farnesyltransferase, mitochondrial precursor [Pyrenophora tritici-repentis Pt-1C-BFP] gi|187984915|gb|EDU50403.1| protoheme IX farnesyltransferase,
  misc_feature (27)..(493): NCBI GI: 85095022 Blast Desc: NCU06141 [Neurospora crassa OR74A] gi|74615850|sp|Q7S5E7.1|COX10_NEUCR RecName: Full=Protoheme IX farnesyltransferase, mitochondrial; AltName: Full=Heme O Flags:
  misc_feature (89)..(510): NCBI GI: 115397897 Blast Desc: conserved [Aspergillus terreus NIH2624] gi|114192731|gb|EAU34431.1| conserved [Aspergillus terreus NIH2624]
  misc_feature: Useful for introducing or modulating the production of volatile compounds
MSFRPAAHVFGSLGRSSSSIVSVCWRCCSRELELQGPSRRLPATLSPVTARSSRSLRCFSHTAAPRALFKSTPARLNAGYFISNDHNHTSSRPSNSSAAAVPTDTSNLPHRRRQRRQNAEKNSPHEAAVTTTSTSTSTLPSTSSTSSASSTEQILPDNASSTLTTASEKSTSSLRRQLSLYLSLSKPRLTVLVTLTAMAPYALYPVPDFLAPTIGLDTPSLSPLTLAFLTTGTALCIASANTLNMLYEPAYDALMSRTRNRPLVRGLLSRPRALAFALLAGVAGVAGLYYGVNPTVAFLGFANILLYAGVYTPLKRVSWLNTWVGAVVGGIPPLMGWAAAAGEYATEDGFRALLLVPEALGGWLFAALLFAWQFPHFMALSWSIREEYKVAGHQMLCWINPARNARVALRYSLAFIPICVGLSYAGVTEWSFAVTSLPVNIWLVREAVRFWRHEGSKGSARGLFWASVWLLPAVMVLALVQKKGMWERVWRAVVGSRDEEEDEEDWEDDEWEENVVPIPVVANKS

SEQ ID NO: 14540 - DNA, 3678 bp, Muscodor strobelii
  misc_feature: SGI cDNA ID NO. 564793
  misc_feature: Encodes the peptide sequence at SEQ ID NO 14541
atgggggagacgcgcactccggccaagacgccctcgctgtcgaggaaggccagctcagcggcatcagctgcgtctgcttcgtcgacgggacacaagcagcagagcatcctcggcttcttctccaagccctcgaccaccccgacacccaagaacaacaacaacactgcatcctcgtcttcgtgcctgcgcgagtccaccaaggccaactcgctgcagctctccaagacggccaagaagcccgtccacgtcacccccgtcgccaccctcaagggcaccgcccccaagacagccatgcccgtcgccggcagcagtccctcgcgaaaggccaagaagacggtcagctatgccgagtcctccgatgacgacgacgaggacatcttcgccgctatggaggcctctcgatcgcgacgccgcggccgccaacgagccaaggcgccggccgacgatgacgatgaggacgactaccaggaggctgccgacaatgcagcagctgaggacgaggacgatgagatggccgacttcgtagtctccgacgagtccgacgcccccctgaaaaagagaaagcgacagagcaagcccctcacttctcggaaacgatcgcacaactcgccccccaaggtcaagcccgaagaggacgacgatgaagagcaggaggacaaagaggcagatgcagatgcagatgcagccgaggacagagacaacgccgacatcgacgacatcttgagcaacgtcccctcgaccgcacagcagtggcgctacgaccccgattcggtcgaccccgtcaaggtccagacccaggcccaggccaagtccaagtccaaggcggcgtcggccaagcccaaagcacacacgcgcctgcccgaggagcgctacccgtggctcgccaacatgcgggacatcaaccgcaacgcgccgggccaccccgactacgaccccgacacggtctacgtgccgcccaaggcctggagcgagttctcgcccttcgagcggcagtactgggagatcaagcagaagctgtggaacacggtcgtcttcttcaagaagggcaagttctacgagctgtacgagaacgacgcgaccatcggccaccagctgttcgacctcaagctgaccgaccgcgtcaacatgcgcatggtcggcgtccccgagagctcgctggtcatgtggaccaaccagttcatcgccaagggcttcaaggtcgcccgcgtcgaccagatggagacggccctcggcaaggagatgcgcgagcgcgacggcggcagcggcagcggcagcggcagcgtcaagcccaaggccccgagcggcaaggacaagatcatccgccgcgagctcgcctgcatcctcaccggcggcaccctcgtcgacggcagcatgctgcaggacgactcggccacctactgcgtcgccatcaaggagtccctcgtcgacggcctcccggccttcggtgtcgctttcgtcgacgccgccacggggcagttcttcctctccgagttcgaggacgacgtcgacctgaccaagttcgagacgctcgtcgcacagcttggcccacgcgaacttctgctggaaaagtcccacatctcgaccaaggctcttcggatcctgaagaacaacactacgcccaccaccatctggaactatttcaagcccgggacggagttctgggaggccgaactcaccgtccgcgaactgggctgcaacggctacttcgcacagggaagcgatgcggaggaggaagaagaggtgtggcccaaggtcctgtcagaggccaaggacaagcacctactgatgtctgcgctcggggctctcgtgcagtacctgcgagtgttgaagatcgagcgcgacctcctgtcgcaaggcaatttcacctggtacaatcctattcataaggatggcacgctcattctagatggccagactctcatcaacctcgagatctttgccaacacggtgaatggcggtaccgatggcactctgttctcacttctgaaccgctgtgtcactcctttcggcaagcgccttttccgccaatgggtatgccaccctctttgcaacattcaaaagatcaacgagcgtctagacgcggttgacctgctcaacgcggatcctacggtgcgcgagcagttttcgtctcaacttgtaaagatgccggatctcgagcgtctcctatcccgcatccatgcgggtgcttgccggccggaagactttgtcaaggttctcgatggcttcgagcaaatcgacttcaccatgagcctgttgggcgcgtttggtggcggtaatgggctagtgaaccggctcatctcggctatgcccgatctcaacgaacccctatctttttggaaggctgccttcgaccgtacaaaggcgcgtgaagagaaaattctcatccctgagcgaggcatagaagaagatttcgataacagctttgacgccattgtagagatcaaggacgatctgcacgccttgctcaaaaagacgaagcaagatttgggcaccaaagacatcaaatatgctgggattggcaaggaagtctaccagatggaagtgcccaagaaggtcacggtacccaaaacatggcagcagatgtcggcgaccaatagcgtcaaacgctattacttcaaagagttgacggcgctagtgaggaaattgcaggaggccgaggagacgcattcgcagctacttcgcgaggtgacactgcggttattaaagcggttcgatgtcgactacgaaacgtggttgcaagccatccgcatcgtctctcaactcgactgtcttgtcagtctcgccaaagcctcctcttctctgggtcagcccagctgccgccctgtcttcgtggatgaggagcgcagcgtggtcgaattcgaagagctacggcacccttgcatgctcaacacggtcgatgacttcattcccaacgacatcgtgctcggcggagactcggccaagatcaatctactgacaggtgccaacgcggccggaaagtccacggttctgcgcatgtcctgcaccgctgtcatcatggctcagattggttgctacgtgcccgccacctcggcgcagctgacaccatgcgatcgcatcatgtcacgattgggtgccaatgacaacatcttcgcggcgcaatcgaccttcttcgtcgagctttcagagacgaagaagatcctgtccgaagccacgcctcggtccctcgtcatcctcgacgaattgggccggggcacatcgagctacgacggtgttgccgttgcccaggccgtgctgcaccacgtcgcaacgcacattggctgtatcgggttcttcgctacgcattaccactcgctcgcgaccgagttcgagtcgcacccggagatcagggccaagcgcatgcagatccacgtcgatgataagaaccggagagtgacgttcttgtacaagctggaagatggcgtggcggagggcagcttcggcatgcattgcgcagccatgtgcggcatctcggaccgtgtcatcgagagggcggagacggctgcgagagaatgggagcatactagtcgactgaaggagagcttagacaaggccaagcagggctgttacattccgctggggattttgagtgatgttgcggcgctgctagatcatgagaagcagggcgatgtggagaagggtggtctagatgtcttgatgcgggctatcgaggcattgtga

SEQ ID NO: 14541 - protein, 1225 aa, Muscodor strobelii
  misc_feature: SGI Peptide ID NO. 564793
  misc_feature (326)..(457): Pfam Id: PF01624 Pfam Desc: MutS domain I
  misc_feature (465)..(620): Pfam Id: PF05188 Pfam Desc: MutS domain II
  misc_feature (630)..(933): Pfam Id: PF05192 Pfam Desc: MutS domain III
  misc_feature (799)..(888): Pfam Id: PF05190 Pfam Desc: MutS family domain IV
  misc_feature (939)..(1174): Pfam Id: PF00488 Pfam Desc: MutS domain V
  misc_feature (630)..(745): Pfam Id: PF05192 Pfam Desc: MutS domain III
  misc_feature (289)..(1175): NCBI GI: 19075844 Blast Desc: MutS protein homolog [Schizosaccharomyces pombe] gi|39931686|sp|O74502.1|MSH6_SCHPO RecName: Full=DNA mismatch repair protein msh6 gi|6644186|gb|AAF20943.1|AF207839_1 mismatch
  misc_feature (220)..(1202): NCBI GI: 156837100 Blast Desc: Kpol_1075p4 [Vanderwaltozyma polyspora DSM 70294] gi|156113131|gb|EDO14726.1| Kpol_1075p4 [Vanderwaltozyma polyspora DSM 70294]
  misc_feature (14)..(1201): NCBI GI: 255718761 Blast Desc: KLTH0G14476p [Lachancea thermotolerans] gi|238937045|emb|CAR25224.1| KLTH0G14476p [Lachancea thermotolerans]
  misc_feature (9)..(1207): NCBI GI: 50422829 Blast Desc: DEHA0E16566g [Debaryomyces hansenii CBS767]
  misc_feature (17)..(1201): NCBI GI: 254578938 Blast Desc: ZYRO0B11792p [Zygosaccharomyces rouxii] gi|238938345|emb|CAR26522.1| ZYRO0B11792p [Zygosaccharomyces rouxii]
  misc_feature (263)..(1225): NCBI GI: 260943291 Blast Desc: CLUG_04826 [Clavispora lusitaniae ATCC 42720] gi|238851234|gb|EEQ40698.1| CLUG_04826 [Clavispora lusitaniae ATCC 42720]
  misc_feature (10)..(1201): NCBI GI: 256269843 Blast Desc: Msh6p [Saccharomyces cerevisiae JAY291]
  misc_feature (10)..(1201): NCBI GI: 6320302 Blast Desc: Msh6p [Saccharomyces cerevisiae] gi|3024187|sp|Q03834.1|MSH6_YEAST RecName: Full=DNA mismatch repair protein MSH6; AltName: Full=MutS protein homolog 6; 3 DNA
  misc_feature (288)..(1180): NCBI GI: 149246718 Blast Desc: LELG_00304 [Lodderomyces elongisporus NRRL YB-4239] gi|146447738|gb|EDK42126.1| LELG_00304 [Lodderomyces elongisporus NRRL YB-4239]
  misc_feature (10)..(1201): NCBI GI: 151942085 Blast Desc: MutS-like protein [Saccharomyces cerevisiae YJM789]
MGETRTPAKTPSLSRKASSAASAASASSTGHKQQSILGFFSKPSTTPTPKNNNNTASSSSCLRESTKANSLQLSKTAKKPVHVTPVATLKGTAPKTAMPVAGSSPSRKAKKTVSYAESSDDDDEDIFAAMEASRSRRRGRQRAKAPADDDDEDDYQEAADNAAAEDEDDEMADFVVSDESDAPLKKRKRQSKPLTSRKRSHNSPPKVKPEEDDDEEQEDKEADADADAAEDRDNADIDDILSNVPSTAQQWRYDPDSVDPVKVQTQAQAKSKSKAASAKPKAHTRLPEERYPWLANMRDINRNAPGHPDYDPDTVYVPPKAWSEFSPFERQYWEIKQKLWNTVVFFKKGKFYELYENDATIGHQLFDLKLTDRVNMRMVGVPESSLVMWTNQFIAKGFKVARVDQMETALGKEMRERDGGSGSGSGSVKPKAPSGKDKIIRRELACILTGGTLVDGSMLQDDSATYCVAIKESLVDGLPAFGVAFVDAATGQFFLSEFEDDVDLTKFETLVAQLGPRELLLEKSHISTKALRILKNNTTPTTIWNYFKPGTEFWEAELTVRELGCNGYFAQGSDAEEEEEVWPKVLSEAKDKHLLMSALGALVQYLRVLKIERDLLSQGNFTWYNPIHKDGTLILDGQTLINLEIFANTVNGGTDGTLFSLLNRCVTPFGKRLFRQWVCHPLCNIQKINERLDAVDLLNADPTVREQFSSQLVKMPDLERLLSRIHAGACRPEDFVKVLDGFEQIDFTMSLLGAFGGGNGLVNRLISAMPDLNEPLSFWKAAFDRTKAREEKILIPERGIEEDFDNSFDAIVEIKDDLHALLKKTKQDLGTKDIKYAGIGKEVYQMEVPKKVTVPKTWQQMSATNSVKRYYFKELTALVRKLQEAEETHSQLLREVTLRLLKRFDVDYETWLQAIRIVSQLDCLVSLAKASSSLGQPSCRPVFVDEERSVVEFEELRHPCMLNTVDDFIPNDIVLGGDSAKINLLTGANAAGKSTVLRMSCTAVIMAQIGCYVPATSAQLTPCDRIMSRLGANDNIFAAQSTFFVELSETKKILSEATPRSLVILDELGRGTSSYDGVAVAQAVLHHVATHIGCIGFFATHYHSLATEFESHPEIRAKRMQIHVDDKNRRVTFLYKLEDGVAEGSFGMHCAAMCGISDRVIERAETAAREWEHTSRLKESLDKAKQGCYIPLGILSDVAALLDHEKQGDVEKGGLDVLMRAIEAL

SEQ ID NO: 14542 - DNA, 4533 bp, Muscodor strobelii
  misc_feature: SGI EST ID NO. CUFF.34756.0
  misc_feature: Variant of the nucleotide sequence at SEQ ID NO 14540
gggcaagcgcgacagagctagcaggggcatcaattgctaattgaatagaattgaccccgaattgataatgataaggtgccgtcgaatatgggagtaattaggtatagtaggagacaggcgagacaggcatgtcattaacgcgtctttcctcgccaacaaccgcgtcgtcagtcaagtcccgagctatgggcgtcttcgtagtctacatgttgcacaactcttcctcacctgacttcaactcgcgtacctactccatcgtagagcctctaactcgtcgtttcgcttcattgctcttgcctcaaccccagcacacgtaggcccgataccgtaaggtgacccatcagttgatctcgttgccactgctgtcgtcactgcggttggcgtgaggggctttgcagccaggccggtgcaagcctctgtctgtagagtagagcaagatattacaaaaaagaggaaatagtagagcacgacacagagaacgagcagccatgggggagacgcgcactccggccaagacgccctcgctgtcgaggaaggccagctcagcggcatcagctgcgtctgcttcgtcgacgggacacaagcagcagagcatcctcggcttcttctccaagccctcgaccaccccgacacccaagaacaacaacaacactgcatcctcgtcttcgtgcctgcgcgagtccaccaaggccaactcgctgcagctctccaagacggccaagaagcccgtccacgtcaccccgtccccagcagcgacgccctcgagcccagcagctcccaggagaaccacgagtctgccagcgtcgccaccctcaagggcaccgcccccaagacagccatgcccgtcgccggcagcagtccctcgcgaaaggccaagaagacggtcagctatgccgagtcctccgatgacgacgacgaggacatcttcgccgctatggaggcctctcgatcgcgacgccgcggccgccaacgagccaaggcgccggccgacgatgacgatgaggacgactaccaggaggctgccgacaatgcagcagctgaggacgaggacgatgagatggccgacttcgtagtctccgacgagtccgacgcccccctgaaaaagagaaagcgacagagcaagcccctcacttctcggaaacgatcgcacaactcgccccccaaggtcaagcccgaagaggacgacgatgaagagcaggaggacaaagaggcagatgcagatgcagatgcagccgaggacagagacaacgccgacatcgacgacatcttgagcaacgtcccctcgaccgcacagcagtggcgctacgaccccgattcggtcgaccccgtcaaggtccagacccaggcccaggccaagtccaagtccaaggcggcgtcggccaagcccaaagcacacacgcgcctgcccgaggagcgctacccgtggctcgccaacatgcgggacatcaaccgcaacgcgccgggccaccccgactacgaccccgacacggtctacgtgccgcccaaggcctggagcgagttctcgcccttcgagcggcagtactgggagatcaagcagaagctgtggaacacggtcgtcttcttcaagaagggcaagttctacgagctgtacgagaacgacgcgaccatcggccaccagctgttcgacctcaagctgaccgaccgcgtcaacatgcgcatggtcggcgtccccgagagctcgctggtcatgtggaccaaccagttcatcgccaagggcttcaaggtcgcccgcgtcgaccagatggagacggccctcggcaaggagatgcgcgagcgcgacggcggcagcggcagcggcagcggcagcgtcaagcccaaggccccgagcggcaaggacaagatcatccgccgcgagctcgcctgcatcctcaccggcggcaccctcgtcgacggcagcatgctgcaggacgactcggccacctactgcgtcgccatcaaggagtccctcgtcgacggcctcccggccttcggtgtcgctttcgtcgacgccgccacggggcagttcttcctctccgagttcgaggacgacgtcgacctgaccaagttcgagacgctcgtcgcacagcttggcccacgcgaacttctgctggaaaagtcccacatctcgaccaaggctcttcggatcctgaagaacaacactacgcccaccaccatctggaactatttcaagcccgggacggagttctgggaggccgaactcaccgtccgcgaactgggctgcaacggctacttcgcacagggaagcgatgcggaggaggaagaagaggtgtggcccaaggtcctgtcagaggccaaggacaagcacctactgatgtctgcgctcggggctctcgtgcagtacctgcgagtgttgaagatcgagcgcgacctcctgtcgcaaggcaatttcacctggtacaatcctattcataaggatggcacgctcattctagatggccagactctcatcaacctcgagatctttgccaacacggtgaatggcggtaccgatggcactctgttctcacttctgaaccgctgtgtcactcctttcggcaagcgccttttccgccaatgggtatgccaccctctttgcaacattcaaaagatcaacgagcgtctagacgcggttgacctgctcaacgcggatcctacggtgcgcgagcagttttcgtctcaacttgtaaagatgccggatctcgagcgtctcctatcccgcatccatgcgggtgcttgccggccggaagactttgtcaaggttctcgatggcttcgagcaaatcgacttcaccatgagcctgttgggcgcgtttggtggcggtaatgggctagtgaaccggctcatctcggctatgcccgatctcaacgaacccctatctttttggaaggctgccttcgaccgtacaaaggcgcgtgaagagaaaattctcatccctgagcgaggcatagaagaagatttcgataacagctttgacgccattgtagagatcaaggacgatctgcacgccttgctcaaaaagacgaagcaagatttgggcaccaaagacatcaaatatgctgggattggcaaggaagtctaccagatggaagtgcccaagaaggtcacggtacccaaaacatggcagcagatgtcggcgaccaatagcgtcaaacgctattacttcaaagagttgacggcgctagtgaggaaattgcaggaggccgaggagacgcattcgcagctacttcgcgaggtgacactgcggttattaaagcggttcgatgtcgactacgaaacgtggttgcaagccatccgcatcgtctctcaactcgactgtcttgtcagtctcgccaaagcctcctcttctctgggtcagcccagctgccgccctgtcttcgtggatgaggagcgcagcgtggtcgaattcgaagagctacggcacccttgcatgctcaacacggtcgatgacttcattcccaacgacatcgtgctcggcggagactcggccaagatcaatctactgacaggtgccaacgcggccggaaagtccacggttctgcgcatgtcctgcaccgctgtcatcatggctcagattggttgctacgtgcccgccacctcggcgcagctgacaccatgcgatcgcatcatgtcacgattgggtgccaatgacaacatcttcgcggcgcaatcgaccttcttcgtcgagctttcagagacgaagaagatcctgtccgaagccacgcctcggtccctcgtcatcctcgacgaattgggccggggcacatcgagctacgacggtgttgccgttgcccaggccgtgctgcaccacgtcgcaacgcacattggctgtatcgggttcttcgctacgcattaccactcgctcgcgaccgagttcgagtcgcacccggagatcagggccaagcgcatgcagatccacgtcgatgataagaaccggagagtgacgttcttgtacaagctggaagatggcgtggcggagggcagcttcggcatgcattgcgcagccatgtgcggcatctcggaccgtgtcatcgagagggcggagacggctgcgagagaatgggagcatactagtcgactgaaggagagcttagacaaggccaagcagggctgttacattccgctggggattttgagtgatgttgcggcgctgctagatcatgagaagcagggcgatgtggagaagggtggtctagatgtcttgatgcgggctatcgaggcattgtgagagcattgtgagacaggctgtgtttgaagaagggaataggaggcgagggggcggaaggtgttgaaagattaaagtgtgtacatggactacctgctgtttgcttatttacttgcctgggatcgcaggctggggcggaggattatttgctgtaaggcgttggggacattttacaattgggcgtgttgagatgaagtgtgcaccgacacccgcgaactcgggatgcggatggagttaattaatagaatatggctcgagaagtcatcattgtgaatgcctagcattccctagcatttgtcgtgcggttcttt

SEQ ID NO: 14543 - DNA, 1839 bp, Muscodor strobelii
  misc_feature: SGI cDNA ID NO. 564794
  misc_feature: Encodes the peptide sequence at SEQ ID NO 14544
atggccgctgggaacgtgtccaactcaccaccgggtggcggggacgagagtcacgctcgggatccaggcacacgcagcaaggcttcatctccggaaaagggatcacctcagatacccaacccaactggaacctacgcaatgaactaccctacctcatcagaaggggaacaacaaagccatgaaggtcaggacgataaagacgtggatagtatacacagcgaacaggggcaagatggacctgaacacgccgcaaatccacccgaaccaccaaaaaggcccaggaaccagaacatgactgatggtagcactcagacggcctcaacgccttcagacacccatcgcaaccgcccacagcccccgggccccggtcccaggccagagcctccagagcccggccggcgtacaaaatctacgccgcgtagaaataacaacggcactcaccatcaaaatcacgacgacgatcacgatcacgatcctccccgtcgtagtcctccgggtgatcccgactcgatgccctccgggtcttcctcctctaagaagcggccgtttcccgatgatgagtatactctccgcatgtcacacgcttggactgtaggcgacggcacatggaatcccattcccgtcaacaagcggactaaggcagatgtgccgcgacccacccatattcaacacacacaccgcgctgccaacggtctcacaaacctacagcttgcccacgatgcccctattactcactctgcaatggacatcgctaccgagcacgtctggaatatgctaccccctaccctgcgcagcttcgtgctggtattgccgcctaacggaccagcgctttggagcactgaccaggaccacctagcttggatgaaagagagaatgaatcaagacgtttaccaagtcgatgataccatgggaaacaggaaggtcgtgtcacacgcagacttcaagaaacgcccgtgggtcatctggccaatttgggtcgaggatgaattcggtagtgactggatcacgatcttttggtactcggtaccttcgaagtcgacgaaggagggcaagaggcccgtgctcgacgacatctctatgtacagtattattgatcctcggcgagagacctatgccgacggcaacgggaggcatcggcccattcaagcgcgtaaggaacgcatcgcgcagcacctgcacgacttcctcacgcctggcggtttcagcatggagcatgcggaatataaagagattttgtgtccgcccatgccgcagaccgaggctacgtccggagagcgttgctaccacgtgaccaaggacatcacgcgccaattgctggagcgttggctcatagccggtgggagtcagcctcaataccacgacaacacgatccaacatatagtaaaatgggtgaatccatttgcagagagaatcgaaatgacgggcatcaacgcctgggcgcttatggcctcgtttgactataatgctcgtatcgcggtcgaggctatatcttccaatcataggctcaatattgtggctgatggaaagaggaaatatctatacaatatgagtcttgcgggcccgttcgcggagccactcatagccgactacgactacgcgctacccatcgaaggtaatcccgacgggccaccgacgccggaggatcggcagcagccaaagccaaaaccgcaaccgaaaccaaaaccgcagccaaggcggcaggcaaagccacagccgcctgacaatgagaagaagaccgagaagaagaagaaaaccgaggaaaagactgaggagaagaccgagacaaagaccgagacgaagtccaagaggggctggaatccgttcgctgcatctgcatag

SEQ ID NO: 14544 - protein, 612 aa, Muscodor strobelii
  misc_feature: SGI Peptide ID NO. 564794
MAAGNVSNSPPGGGDESHARDPGTRSKASSPEKGSPQIPNPTGTYAMNYPTSSEGEQQSHEGQDDKDVDSIHSEQGQDGPEHAANPPEPPKRPRNQNMTDGSTQTASTPSDTHRNRPQPPGPGPRPEPPEPGRRTKSTPRRNNNGTHHQNHDDDHDHDPPRRSPPGDPDSMPSGSSSSKKRPFPDDEYTLRMSHAWTVGDGTWNPIPVNKRTKADVPRPTHIQHTHRAANGLTNLQLAHDAPITHSAMDIATEHVWNMLPPTLRSFVLVLPPNGPALWSTDQDHLAWMKERMNQDVYQVDDTMGNRKVVSHADFKKRPWVIWPIWVEDEFGSDWITIFWYSVPSKSTKEGKRPVLDDISMYSIIDPRRETYADGNGRHRPIQARKERIAQHLHDFLTPGGFSMEHAEYKEILCPPMPQTEATSGERCYHVTKDITRQLLERWLIAGGSQPQYHDNTIQHIVKWVNPFAERIEMTGINAWALMASFDYNARIAVEAISSNHRLNIVADGKRKYLYNMSLAGPFAEPLIADYDYALPIEGNPDGPPTPEDRQQPKPKPQPKPKPQPRRQAKPQPPDNEKKTEKKKKTEEKTEEKTETKTETKSKRGWNPFAASA

SEQ ID NO: 14545 - DNA, 3140 bp, Muscodor strobelii
  misc_feature: SGI EST ID NO. CUFF.34585.0
  misc_feature: Variant of the nucleotide sequence at SEQ ID NO 14543
caatttggaggtaaatctaacatggacagcaagattttcgaagcggttctagaccacatcggcttctctgaacttgatggtgattccctaggtatcataaaccagcgttgctaatgaaatacttgaatctgccaaccgacgcgagtaggtgaggagccaagtgagcatggcacgtcacctgagtctacatcctctgcctcatatcctgagcatgatagcccctttccaggaagtgaacgtgaactgaaagggttgagaagcccactgcgcattcgattgaattttcgtcaagatccaagctggtttaaatcaacatgcttccccatgacttacaatactgcttagctctggctcccaatcccgccaagcccaattcgcatctgagacaaagcattcgggctgcatgcggcgcacgacctggatgagcactcatcttcaagtgtactcttctcatcgaagcgactcgcacctcctagcttctgtgctttgctcgaaaacagcgccttcgacaaagaaaaccctctttgcacaaagagatggcctctgaaaccagtcgcgggacatggccccctcccctaatgccttcgggcatcatgtctcattgcatctctcgttatggcccgttttaaagcctttgacctctccgacaccgtgccagcgactgctgcggatgtttgctactggcctgatctgacttcgactacttcaatttccctcttgcatctaggccgtcgcctagtctagccaagtcagcatggccgctgggaacgtgtccaactcaccaccgggtggcggggacgagagtcacgctcgggatccaggcacacgcagcaaggcttcatctccggaaaagggatcacctcagatacccaacccaactggaacctacgcaatgaactaccctacctcatcagaaggggaacaacaaagccatgaaggtcaggacgataaagacgtggatagtatacacagcgaacaggggcaagatggacctgaacacgccgcaaatccacccgaaccaccaaaaaggcccaggaaccagaacatgactgatggtagcactcagacggcctcaacgccttcagacacccatcgcaaccgcccacagcccccgggccccggtcccaggccagagcctccagagcccggccggcgtacaaaatctacgccgcgtagaaataacaacggcactcaccatcaaaatcacgacgacgatcacgatcacgatcctccccgtcgtagtcctccgggtgatcccgactcgatgccctccgggtcttcctcctctaagaagcggccgtttcccgatgatgagtatactctccgcatgtcacacgcttggactgtaggcgacggcacatggaatcccattcccgtcaacaagcggactaaggcagatgtgccgcgacccacccatattcaacacacacaccgcgctgccaacggtctcacaaacctacagcttgcccacgatgcccctattactcactctgcaatggacatcgctaccgagcacgtctggaatatgctaccccctaccctgcgcagcttcgtgctggtattgccgcctaacggaccagcgctttggagcactgaccaggaccacctagcttggatgaaagagagaatgaatcaagacgtttaccaagtcgatgataccatgggaaacaggaaggtcgtgtcacacgcagacttcaagaaacgcccgtgggtcatctggccaatttgggtcgaggatgaattcggtagtgactggatcacgatcttttggtactcggtaccttcgaagtcgacgaaggagggcaagaggcccgtgctcgacgacatctctatgtacagtattattgatcctcggcgagagacctatgccgacggcaacgggaggcatcggcccattcaagcgcgtaaggaacgcatcgcgcagcacctgcacgacttcctcacgcctggcggtttcagcatggagcatgcggaatataaagagattttgtgtccgcccatgccgcagaccgaggctacgtccggagagcgttgctaccacgtgaccaaggacatcacgcgccaattgctggagcgttggctcatagccggtgggagtcagcctcaataccacgacaacacgatccaacatatagtaaaatgggtgaatccatttgcagagagaatcgaaatgacgggcatcaacgcctgggcgcttatggcctcgtttgactataatgctcgtatcgcggtcgaggctatatcttccaatcataggctcaatattgtggctgatggaaagaggaaatatctatacaatatgagtcttgcgggcccgttcgcggagccactcatagccgactacgactacgcgctacccatcgaaggtaatcccgacgggccaccgacgccggaggatcggcagcagccaaagccaaaaccgcaaccgaaaccaaaaccgcagccaaggcggcaggcaaagccacagccgcctgacaatgagaagaagaccgagaagaagaagaaaaccgaggaaaagactgaggagaagaccgagacaaagaccgagacgaagtccaagaggggctggaatccgttcgctgcatctgcatagatgagaagggaaagatgtgatgagagttagtgttgtatttatgtaccaatcctgtgtaagcttgccagggcggatcgcaaagggtgcaagagcgctattttatgtagagaacgatcatcctttttcttccttgtcggagacaattatagcggttgcatctcgagggcttgattataatcgacttgaattgaggtagactagtcgagtctgtgtaaagatatagagggttgttgagagtgactaccgtgctggggtgctatttttagctgttgagtggaaaatggcattttgttagatttccttcttgcgagtagtggctacgtgaagacgtcgaaagatattattcaggttaatacccaatcgtcacgatagaaggtgtatttgacgcgtgaaaatctggctgatatgatcatgaaactgtgcatctatcattagcaatggatcccatatcgcgtacaatcctaggtattgacaacgtgattggaaagttcggcactgtttgccaagcacccacctttcggcgaaaacttcgagtctaacatgttag

SEQ ID NO: 14546 - DNA, 435 bp, Muscodor strobelii
  misc_feature: SGI cDNA ID NO. 564795
  misc_feature: Encodes the peptide sequence at SEQ ID NO 14547
atgggagccaacgcgcacgttcgaaggcaccgcctgcccgcctctctatacatcagcatgtcagaatggtacaagcgaggcggtgacatgttgcccagactttcgctgtgtatcgcaatggggaaacgaggacaacatcttcgtgacgaagacgagcataaccggcggcggcgcaccaactacacaaaccagggcgagaagaacagatcagcatttatttgggctcgcgttgatgtacacaacgccgacaggaatatcaatgagttcaacagacccaacttcaacatcatctacgacttcatccacatcatctccctcccctaccacatccgcaacagcgtcaactcatctgtccccgggagcatatgccggcattggagtcggcgcggcggcggcggttttcctaatcgggatcttgctatggttcctatatag

SEQ ID NO: 14547 - protein, 144 aa, Muscodor strobelii
  misc_feature: SGI Peptide ID NO. 564795
MGANAHVRRHRLPASLYISMSEWYKRGGDMLPRLSLCIAMGKRGQHLRDEDEHNRRRRTNYTNQGEKNRSAFIWARVDVHNADRNINEFNRPNFNIIYDFIHIISLPYHIRNSVNSSVPGSICRHWSRRGGGGFPNRDLAMVPI

SEQ ID NO: 14548 - DNA, 2418 bp, Muscodor strobelii
  misc_feature: SGI EST ID NO. CUFF.34673.1
  misc_feature: Variant of the nucleotide sequence at SEQ ID NO 14546
cgagtatgttggcaagtagactttcgattcgaaagtcaacatccctcgagcacggttaagcggcatatatgattactagcgatatgtcggggtaaataaagagtcaatgaccgatgttgggggccgaagtttcatcgtttatagccagtccatgcagattatacagaattccaaggaaaaggattcgcctttcaggtgacacaagcaaaagaaacgtcatccttgtgtagagccgagagcttctgtctacggagactatcctatcacggcgcgtactccattacattgcggcgggtttcttaggtaggctgtggaggtgcccatacgccgtatgcaacagtgtcgatcccctcctcggagcaggctgcatcatgggttttcaaagtcaggcgctatttgcgactatttacctctctcttcttttcttgccaggttcgtagagggaaaagtgttggtcaatatcaagtttgggtctcgcgatgacgactacttctgcgccgactcttgacgcgaactggtctccgaatgctgctggttgtctccagaccactaattactggatatgggactatggaaataataaggatgcgaggacagtgttgcgtggtccgtcacagacaacagattgcttcgagtcagcatgggagccaacgcgcacgttcgaaggcaccgcctgcccgcctctctatacatcagcatgtcagaatggtacaagcgaggcggtgacatgttgcccagaggctgcctcttttagttgtcaattggaattccctacaggcgtccatgctgatagctttcgctgtgtatcgcaatggggaaacgaggacaacatcttcgtgacgaagacgagcataaccggcggcggcgcaccaactacacaaaccagggcgagaagaacagatcagcatttatttgggctcgcgttgatgtacacaacgccgacaggaatatcaatgagttcaacagacccaacttcaacatcatctacgacttcatccacatcatctccctcccctaccacatccgcaacagcgtcaactcatctgtccccgggagcatatgccggcattggagtcggcgcggcggcggcggttttcctaatcgggatcttgctatggttcctatatagacgaaggagaaaggcagcagagccatccgaattgagcacgacgccaatgagcccaggcccaactgtgccgatggcatacgccagtccaacagagagtcatagcggtgtgtcgccgcagcactttagggatatgtcacaatccctgatgtcacaatcgcaaatctcgagcgaatcacgaagtccgaatatgtttataggggccggcggaatgcagaaggaagtgccgatagatgctatgtcgccgaaggagatgccggcgagttctgcgcctctctatgagttaccagttgatggcagtcggacgccacactcaccgtggcagggacggtgataacgatttcggggatgcaaggaggcaaatgggcacgaagtgaaagagttctcatgcaacagttgggatccaattctgatggaatatatcagtttcttcggagttcatgttattcccgtgcagagagtggctccaagtactcgaatccgttcgcaggtcaagagggacggcaatttgtagagtgagagtcgtaacgataccaaatagtgtaggcttgaatactgaataatgataatcgttgatcaacctgaggaagtcaatgtgtgagtcaaggctagttgtacgaatctgaacacgtctaatccccgcagcttaatggagaatgagatagacctttctaactagtgttgatggggcatggctagaggcgcttcgggtcacgatttttagagattgcgtggtgcccgtgtaggaaaacctgtcttaaggcagctgacaacgcggatagtttgttgtgacaaggcatatatacatcacaagtattgcagactacctcggaggcatgatgaagctaactacctaattgtactagacgggccgcctgtgctacgcaactaccgagtaagaagtttataaaagctctaggtatatgtctattgagaaacactcgaaaaaaagcttgagcggaagaatcaactgtcgcggcgcttaacatcattaaggcggggttattggtgttcgaataagctttgttgacgtttcagtgttgtgaaggatcaggttgccgtaccttattgcgagcgcgggagagcccgacatggaactaaataacaggataaacctggattgcagcttttactagaggaaacagactgtgtgactcctaccgtgctcaagactcgatggcgttgcacaatcttccgcgacatgcagatgcaacgtcgtatgatgcctgatcactgtggaagactccgtatgactgactgcttgctggcacagcaggtgtatcctagaaatc

SEQ ID NO: 14549 - DNA, 1290 bp, Muscodor strobelii
  misc_feature: SGI cDNA ID NO. 564796
  misc_feature: Reduced expression when VOC is produced
  misc_feature: Encodes the peptide sequence at SEQ ID NO 14550
atgaagctctccgttgctctgtatgcgtccgccgtgtcggcggcgacgctccccgagggtcttccgctgtccgccttcggttcggtcatctcggtctctcccgaggaagccgcatccggtgccgacataggcttcaaactttctgaacgggctatggaaggattgcctttgtcagtttttggcgaagttcaccatgtcacgcctgacgaggctagaaaccacaaagacttgggaggcaacaactttacggatcttcctgtttttggacctggacatcacaaagatttgcaaggatggttagattggaaggccaaccatgctggtcacgctactggccatggcttcggacacctcaatgatgatgctgaagatatcattgacgatttcctcgaacccagagatgctggcgattgtgcgaaccctgctgttcgctttgaatgggatgactactcggcatccgataagacggcatttgtcaatgccatccagtgcttgatcaacaagcccccttcaggtcgtatcagcccatcgagaaaccgatacgaagatctcgtccgtctgcatcaagcctatgcgcccaacattcacagcaagagcacaactgctcaaactcataagttcctgctgtggcaccgatattacctctgggccttcgagcaaatcctcagagatgagtgtggtttcaacagagccatgccctggtgggacgagaagaaatgggcaggcagatttgcccagtctactctcttccagccagcgtatttcggttcgctacctggcccaaccaacggccgcggtacctgtattcccaacggaaagttctcaggtctgcagtccagcttgggccctggttccacaaccaacaacccccattgcgttcagcgtgctgtaaatgaaggtgttacagcacagactggccagagctcgtacgacatctgccagcaacgtacttcataccctgacttccactcttgtgttgagttcacttaccatgctcaaggacacaacggtgtcggtgctactatggcagatgccatcgcctctcccggcgacccagccttcttcatgcaccactcctatgtagactacacattccgaaaatggcagttgggcgcactctcacgccgcaacaccatcagtggctgcgcctcgagcaatggctgcccggccttgactctggacacagtaatatacatgggcaacatctgtggcgcgaaatgccccgacttgccagtacggcaattactacggaccctgcagggtcatttctgttacaagtacaactactaa

SEQ ID NO: 14550 - protein, 429 aa, Muscodor strobelii
  misc_feature: SGI Peptide ID NO. 564796
  misc_feature (143)..(429): NCBI GI: 225680996 Blast Desc: conserved [Paracoccidioides brasiliensis Pb03] gi|226292709|gb|EEH48129.1| conserved [Paracoccidioides brasiliensis Pb18]
  misc_feature (143)..(429): NCBI GI: 226283985 Blast Desc: conserved [Paracoccidioides brasiliensis Pb01]
  misc_feature (55)..(429): NCBI GI: 240281068 Blast Desc: tyrosinase [Ajellomyces capsulatus H143]
  misc_feature (55)..(429): NCBI GI: 225562498 Blast Desc: conserved [Ajellomyces capsulatus G186AR]
  misc_feature (55)..(429): NCBI GI: 154279366 Blast Desc: [Ajellomyces capsulatus NAm1] gi|150412439|gb|EDN07826.1| [Ajellomyces capsulatus NAm1]
  misc_feature (55)..(429): NCBI GI: 261205108 Blast Desc: tyrosinase [Ajellomyces dermatitidis SLH14081] gi|239592350|gb|EEQ74931.1| tyrosinase [Ajellomyces dermatitidis SLH14081] gi|239611493|gb|EEQ88480.1| tyrosinase [Ajellomyces
  misc_feature (138)..(429): NCBI GI: 169622300 Blast Desc: SNOG_14370 [Phaeosphaeria nodorum SN15] gi|111057121|gb|EAT78241.1| SNOG_14370 [Phaeosphaeria nodorum SN15]
  misc_feature (138)..(429): NCBI GI: 169596702 Blast Desc: SNOG_01119 [Phaeosphaeria nodorum SN15] gi|160701375|gb|EAT92614.2| SNOG_01119 [Phaeosphaeria nodorum SN15]
  misc_feature (135)..(429): NCBI GI: 189191358 Blast Desc: conserved [Pyrenophora tritici-repentis Pt-1C-BFP] gi|187973624|gb|EDU41123.1| conserved [Pyrenophora tritici-repentis Pt-1C-BFP]
  misc_feature (136)..(429): NCBI GI: 145603725 Blast Desc: MGG_05862 [Magnaporthe grisea 70-15] gi|145011893|gb|EDJ96549.1| MGG_05862 [Magnaporthe grisea 70-15]
  misc_feature (151)..(389): SWISSPROT Homolog: EC 1.14.18.1 Monophenol monooxygenase
  misc_feature: Useful for introducing or modulating the production of volatile compounds
MKLSVALYASAVSAATLPEGLPLSAFGSVISVSPEEAASGADIGFKLSERAMEGLPLSVFGEVHHVTPDEARNHKDLGGNNFTDLPVFGPGHHKDLQGWLDWKANHAGHATGHGFGHLNDDAEDIIDDFLEPRDAGDCANPAVRFEWDDYSASDKTAFVNAIQCLINKPPSGRISPSRNRYEDLVRLHQAYAPNIHSKSTTAQTHKFLLWHRYYLWAFEQILRDECGFNRAMPWWDEKKWAGRFAQSTLFQPAYFGSLPGPTNGRGTCIPNGKFSGLQSSLGPGSTTNNPHCVQRAVNEGVTAQTGQSSYDICQQRTSYPDFHSCVEFTYHAQGHNGVGATMADAIASPGDPAFFMHHSYVDYTFRKWQLGALSRRNTISGCASSNGCPALTLDTVIYMGNICGAKCPDLPVRQLLRTLQGHFCYKYNY

SEQ ID NO: 14551 - DNA, 1842 bp, Muscodor strobelii
  misc_feature: SGI EST ID NO. CUFF.34631.0
  misc_feature: Variant of the nucleotide sequence at SEQ ID NO 14549
cggcctcgtaaaggccccagctcaacacgggttccactgcgccgtcgagtccatgtggtccgtctatctgactagatctcagctcagagaaatgtggaaagtgcctcgagtgccaagtctcgcattcagagctctggctgacgagccggacgaggatgctaattataatggtgccatgcacgccaagtaggcttttcggtggcccctttgacggagaattgggcacaatatatatctagcatcggctgctcagagtattgtgatcgtccctgtcagtttcttcatccgtcactcacaacctatcagggaattcagagcagtactcatcgacgatcatgaagctctccgttgctctgtatgcgtccgccgtgtcggcggcgacgctccccgagggtcttccgctgtccgccttcggttcggtcatctcggtctctcccgaggaagccgcatccggtgccgacataggcttcaaactttctgaacgggctatggaaggattgcctttgtcagtttttggcgaagttcaccatgtcacgcctgacgaggctagaaaccacaaagacttgggaggcaacaactttacggatcttcctgtttttggacctggacatcacaaagatttgcaaggatggttagattggaaggccaaccatgctggtcacgctactggccatggcttcggacacctcaatgatgatgctgaagatatcattgacgatttcctcgaacccagagatgctggcgattgtgcgaaccctgctgttcgctttgaatgggatgactactcggcatccgataagacggcatttgtcaatgccatccagtgcttgatcaacaagcccccttcaggtcgtatcagcccatcgagaaaccgatacgaagatctcgtccgtctgcatcaagcctatgcgcccaacattcacagcaagagcacaactgctcaaactcataagttcctgctgtggcaccgatattacctctgggccttcgagcaaatcctcagagatgagtgtggtttcaacagagccatgccctggtgggacgagaagaaatgggcaggcagatttgcccagtctactctcttccagccagcgtatttcggttcgctacctggcccaaccaacggccgcggtacctgtattcccaacggaaagttctcaggtctgcagtccagcttgggccctggttccacaaccaacaacccccattgcgttcagcgtgctgtaaatgaaggtgttacagcacagactggccagagctcgtacgacatctgccagcaacgtacttcataccctgacttccactcttgtgttgagttcacttaccatgctcaaggacacaacggtgtcggtgctactatggcagatgccatcgcctctcccggcgacccagccttcttcatgcaccactcctatgtagactacacattccgaaaatggcagttgggcgcactctcacgccgcaacaccatcagtggctgcgcctcgagcaatggctgcccggccttgactctggacacagtaatatacatgggcaacatctgtggcgcgaaatgccccgacttgccagtacggcaattactacggaccctgcagggtcatttctgttacaagtacaactactaaagcggagtactcgccggcagcgcgataacgattttcgacatagacttggagatagatcagatatacccacggctccttagatactgacttacgtctaattttctaatacataattcctaatgataccacttcaacattatttattttcatgttcagcgtgccaattaaatagggatgtccatttgaatgaaactctgcttctttgattgctatcgca

SEQ ID NO: 14552 - DNA, 1194 bp, Muscodor strobelii
  misc_feature: SGI cDNA ID NO. 564797
  misc_feature: Encodes the peptide sequence at SEQ ID NO 14553
atgtttcacagcttaaccatcgctgtccttctgggctcaacggcctgggctctgccagcgccatctccggcggagatctacgaacgacagaacacaacttgcacgattgcctcgagctatcccgccgtcagtcttgcttctctgccagacccattcaccttccagaatggccaaaaagttgctactaaggccgactggacatgccgcgcgcaagaaatcagcaagcttatgcaacaatatgagcttggagactacccgccgcctcccgataaggtcgtcgcaacactatcaggcagcacgatgtcgactgttgtgacggtcggatcaaaatctgtgacaatcagcaccgccattaagaaggctagcactagccccggccctgctatcatcactattggaggttcctctttgcccatcccaggcacgatcggaaccatttccttcggaaatgatgcttttgcttcccaagcctctggcagctcgcgtggtcagggtgccttctacacgctattcggcaatacgcactccgctggtgcattgacagcctgggcctggggcgttgaccgtgttatcgacggcctcgtacaattgggcgctgacaagaccggaatcgaccccgcacgtctgggaaccaccggctgctcgcgaaatggcaagggtgctttcatcgtcggtgccctggcgaaccgcatcgccttgaccctgccacaagaatccggctccggcggtgcggcctgctggcgtatctctgactccgtccacaatgcaggtggaaacattcagaccgccggcgagattattggcgagaatgtgtggttcagcaagaacctggatgcgtacgcgaccaaaaccaacacaatgcccgaggatcatcacatgttggctgctctcgtcgcacctcgtggtctcttcgtcattgagaacgacatcgactggctcggacccgtcagcacgactggctgcatgaaggctggccgcctcatctacaagggtgtcggcgtaccaaacaacatgggtttctccctcgtgggcggccacagccattgtgcgtttccatcctctcaacaagctgatctcacgacctacatgaacgccttcctgctgaatggtgctgcccctggtgcggtggagaagagtagctcaactgtggacatgtcacaatgggctccctggaccgtaccaacgctcacttag

SEQ ID NO: 14553 - protein, 397 aa, Muscodor strobelii
  misc_feature: SGI Peptide ID NO. 564797
  misc_feature (24)..(385): NCBI GI: 116203879 Blast Desc: CHGG_09823 [Chaetomium globosum CBS 148.51] gi|88175951|gb|EAQ83419.1| CHGG_09823 [Chaetomium globosum CBS 148.51]
  misc_feature (25)..(397): NCBI GI: 171681567 Blast Desc: protein product [Podospora anserina] gi|170940742|emb|CAP65970.1| protein product [Podospora anserina]
  misc_feature (25)..(397): NCBI GI: 85090812 Blast Desc: NCU09445 [Neurospora crassa OR74A] gi|28919971|gb|EAA29361.1| NCU09445 [Neurospora crassa OR74A]
  misc_feature (10)..(397): NCBI GI: 169612369 Blast Desc: SNOG_09306 [Phaeosphaeria nodorum SN15] gi|111062378|gb|EAT83498.1| SNOG_09306 [Phaeosphaeria nodorum SN15]
  misc_feature (1)..(397): NCBI GI: 189190264 Blast Desc: Cip2 [Pyrenophora tritici-repentis Pt-1C-BFP] gi|187973077|gb|EDU40576.1| Cip2 [Pyrenophora tritici-repentis Pt-1C-BFP]
  misc_feature (26)..(388): NCBI GI: 145608418 Blast Desc: MGG_03128 [Magnaporthe grisea 70-15] gi|145015898|gb|EDK00388.1| MGG_03128 [Magnaporthe grisea 70-15]
  misc_feature (33)..(397): NCBI GI: 169856114 Blast Desc: CC1G_05856 [Coprinopsis cinerea okayama7#130] gi|116504272|gb|EAU87167.1| CC1G_05856 [Coprinopsis cinerea okayama7#130]
  misc_feature (48)..(397): NCBI GI: 171676366 Blast Desc: protein product [Podospora anserina] gi|170936249|emb|CAP60908.1| protein product [Podospora anserina]
  misc_feature (39)..(397): NCBI GI: 169856116 Blast Desc: CC1G_05857 [Coprinopsis cinerea okayama7#130] gi|116504273|gb|EAU87168.1| CC1G_05857 [Coprinopsis cinerea okayama7#130]
  misc_feature (32)..(397): NCBI GI: 116200458 Blast Desc: CHGG_10774 [Chaetomium globosum CBS 148.51] gi|88175488|gb|EAQ82956.1| CHGG_10774 [Chaetomium globosum CBS 148.51]
MFHSLTIAVLLGSTAWALPAPSPAEIYERQNTTCTIASSYPAVSLASLPDPFTFQNGQKVATKADWTCRAQEISKLMQQYELGDYPPPPDKVVATLSGSTMSTVVTVGSKSVTISTAIKKASTSPGPAIITIGGSSLPIPGTIGTISFGNDAFASQASGSSRGQGAFYTLFGNTHSAGALTAWAWGVDRVIDGLVQLGADKTGIDPARLGTTGCSRNGKGAFIVGALANRIALTLPQESGSGGAACWRISDSVHNAGGNIQTAGEIIGENVWFSKNLDAYATKTNTMPEDHHMLAALVAPRGLFVIENDIDWLGPVSTTGCMKAGRLIYKGVGVPNNMGFSLVGGHSHCAFPSSQQADLTTYMNAFLLNGAAPGAVEKSSSTVDMSQWAPWTVPTLT

SEQ ID NO: 14554 - DNA, 427 bp, Muscodor strobelii
  misc_feature: SGI EST ID NO. CUFF.34601.0
  misc_feature: Variant of the nucleotide sequence at SEQ ID NO 14552
cgatggtctaaaagcgttaagtaaatgcacacttatatcaagcgagcagcggactcgagtctcatttagaacgtccctttgcttcgttctgtcaaggattcagatcgcgttcttggtaacacacgacaataaggtataggattcaaaatgtttcacagcttaaccatcgctgtccttctgggctcaacggcctgggctctgccagcgccatctccggcggagatctacgaacgacagaacacaacttgcacgattgcctcgagctatcccgccgtcagtcttgcttctctgccagacccattcaccttccagaatggccaaaaagttgctactaaggccgactggacatgccgcgcgcaagaaatcagcaagcttatgcaacaatatgagcttggagactacccgccgcctcccgataaggtcgtcg

SEQ ID NO: 14555 - DNA, 780 bp, Muscodor strobelii
  misc_feature: SGI cDNA ID NO. 564798
  misc_feature: Encodes the peptide sequence at SEQ ID NO 14556
atgagagttcccctatttccaatactgctccttcacatcgccgatgtcgccgtagcccatggcgggctagcgaactacacggtcggcgatacttggtacagaggatacgatcccgacgagcctttatcatcgcaagaaggccagtcatggatggtccagagaatatgggcgagcatcgatcctatattcttcgtcaacgacacggggctagcttgtaacgttcccgctacagcacctccgtcgtacattcccatagctgctggcgagaatttgacagcggtctactggtactggcttcacccggtcggaccaatgagcgtctggctcgcggaatgtggcgagacttgcgaggacgttgatgtaaatcagctggatttcttcaagatctgggaggcgggattgttagagggaaatgtgccagaaggaatttggtatcagaaacagttccaaaactgggatgggagtcctgatctgtggcccgtgactattccggctacgattagacccggcctttatgttgtgaggcatgagattttgagtatacatattgccgacaaacctcaattctatcccgagtgtgcgcatcttaatatcaccggttccggagcggctgtacctcctggcagtctccgggtcagattccccggggcgtatgccgaagatgacccatcgattaagatcgatatctatacagacgcaatgaaaaatacaacgaactacacgatcgcgggaccgccggtgtgggacgggtttgtgaacaagtattgtcaggactgctga

SEQ ID NO: 14556 - protein, 259 aa, Muscodor strobelii
  misc_feature: SGI Peptide ID NO. 564798
  misc_feature (1)..(242): Pfam Id: PF03443 Pfam Desc: Glycosyl hydrolase family 61
  misc_feature (77)..(242): Pfam Id: PF03443 Pfam Desc: Glycosyl hydrolase family 61
  misc_feature (17)..(221): NCBI GI: 171681569 Blast Desc: protein product [Podospora anserina] gi|170940743|emb|CAP65971.1| protein product [Podospora anserina]
  misc_feature (14)..(227): NCBI GI: 169616752 Blast Desc: SNOG_11551 [Phaeosphaeria nodorum SN15] gi|160703254|gb|EAT81259.2| SNOG_11551 [Phaeosphaeria nodorum SN15]
  misc_feature (10)..(250): NCBI GI: 238579793 Blast Desc: MPER_11753 [Moniliophthora perniciosa FA553] gi|215451124|gb|EEB90089.1| MPER_11753 [Moniliophthora perniciosa FA553]
  misc_feature (1)..(250): NCBI GI: 169863978 Blast Desc: CC1G_11664 [Coprinopsis cinerea okayama7#130] gi|116500308|gb|EAU83203.1| CC1G_11664 [Coprinopsis cinerea okayama7#130]
  misc_feature (10)..(248): NCBI GI: 169598063 Blast Desc: SNOG_01830 [Phaeosphaeria nodorum SN15] gi|111070359|gb|EAT91479.1| SNOG_01830 [Phaeosphaeria nodorum SN15]
  misc_feature (6)..(248): NCBI GI: 2494341 Blast Desc: CEL1_AGABI RecName: Full=Cellulose-growth-specific protein; Flags: Precursor gi|166327|gb|AAA53434.1| cellulose-growth-specific protein [Agaricus bisporus]
  misc_feature (1)..(249): NCBI GI: 189194025 Blast Desc: cel1 protein precursor [Pyrenophora tritici-repentis Pt-1C-BFP] gi|187978915|gb|EDU45541.1| cel1 protein precursor [Pyrenophora tritici-repentis Pt-1C-BFP]
  misc_feature (1)..(251): NCBI GI: 164427556 Blast Desc: NCU03000 [Neurospora crassa OR74A] gi|157071792|gb|EAA36150.2| conserved [Neurospora crassa OR74A]
  misc_feature (20)..(250): NCBI GI: 189199872 Blast Desc: cel1 protein precursor [Pyrenophora tritici-repentis Pt-1C-BFP] gi|187983372|gb|EDU48860.1| cel1 protein precursor [Pyrenophora tritici-repentis Pt-1C-BFP]
  misc_feature (1)..(254): NCBI GI: 171693123 Blast Desc: protein product [Podospora anserina] gi|170946510|emb|CAP73311.1| protein product [Podospora anserina]
  misc_feature (8)..(257): SWISSPROT Homolog: EC 3.2.1.4 Cellulase
MRVPLFPILLLHIADVAVAHGGLANYTVGDTWYRGYDPDEPLSSQEGQSWMVQRIWASIDPIFFVNDTGLACNVPATAPPSYIPIAAGENLTAVYWYWLHPVGPMSVWLAECGETCEDVDVNQLDFFKIWEAGLLEGNVPEGIWYQKQFQNWDGSPDLWPVTIPATIRPGLYVVRHEILSIHIADKPQFYPECAHLNITGSGAAVPPGSLRVRFPGAYAEDDPSIKIDIYTDAMKNTTNYTIAGPPVWDGFVNKYCQDC

SEQ ID NO: 14557 - DNA, 4512 bp, Muscodor strobelii
  misc_feature: SGI cDNA ID NO. 564799
  misc_feature: Encodes the peptide sequence at SEQ ID NO 14558
atggcaggaaacaaggcatctgaacctgcgccgtcagcgcctcccacgtggagagatctgtttgctttcacgacatggcggcacgccgcgttgctggccaccgggctctcggccgcagtgctagctggcgccctcaagaccaccatgtccattctgctcgggaaaatattcggagtcatcgcgcagtacggcgctggcgacctagcagggccggagactctcgccgaggtctcatcttggtgttcgctgctcaccttgattggcggcgcaggctggctcatcaactttgccgttctcttctcctgggtcacttttggtgagctacaagcgcggagtgttcgatccattcttttccacgggcttgtcgagaaggaaatggcatggtttgactctcaatccgacggtgttgccagtttacttgtcagggtccaaacacaaacacgcgagctccaaatcgcaacttccattgccctcggtaatctgattgttgaggttgctaccgcggtcgcgaacctcatcgtggccctatacatggcgtggaagttgacattagttctgcttgcgtcactacctctctccatcctcatacttagtctcctcacgcgtcagctcaaacccgcaatatttgcccagcgacaagagctttccagagcttcactatacgccaatgcagctatttccgccatcgatcttgttaaggtgttcaacggcatagaccacgagacttggcaatatctatcaaccatccgacgatccatgcggcaatacctcattcaagcgcgttccaatgcctaccagttttgctatgtcaagttttggatcgagagtttgttcgtcgttggcttctactacggtgccgtgctcgtggaccaaggtctcagtcccgccaatattttgacagcattctacgctgctctcaatgcacttcaggccctagaagcatttgttcctatgtatttagtcctagccaaaggcatggcggccggccagtttctctgctccatttcaaagcatatcaaacatggacattcggttcaccccatgatgggtggttcggtccctggaagatgcattggtgatatcgaactccaaaatgtcacgtttgcctatccttccaacccgtcgaaaattgtgttgaaaaactcatcctttcattttcgccatggcggtctctacttcatcatcggtcgaagtggctctggcaaaagtacgatgggcaatctgctcctaagtttctatgagccactcagcggcaatatattcatagatggcaacgtaatcaaaactttagatctcaaatggttgcggagaaacatcactttggtccagcagtccagcgtgctcttcaatgagagcttcttcatgaacgtcgcctttggtcaccccaaccctagttgcgtctccacaatgcgtgtaaaagccgcctgtgagatggcattactgcagtcgaccatctctagcctaccatctggtttacagacatacatcggcactgctggccacagcctcagcggtggggagaagcaacgacttgcgctcgcaagagcgaagctcagagacaccccggtacttatcctcgacgaaatcactagtggtcttgacccagtgagtcgggtacttatcatggaggccattagacgatggcggaaagggaaaacgactatcatcatcacacacgatatagcacaacttgaacaaaatgatttcgtgtatgtcatggacaatggcttcgttgtccaagaaggccttttctgcgacgtccagaaacaaacagatggtctattggcccaattaatggcatccgcgaccacgataccgtcgttagacgatcatgaaatcgttgatggtatgagtcgcaggcgaacaaggcaaacagtcgtcaacttttcgcggctgttaagtgacgcgtcacagaacaatgcattgttgcctggttccccctccccaggcgagggtctaagaggcgcacagtggtcctcggacgatggtttcatcacttccagcgcctttccaccgttgagaacatttggcagtgtgaggcactatcgcacagatgccacaaatatgcttcaaaggctagcgatgccggaagagtctccaaaaagaggccgcatcagtcgcgccatggcatgcttcagccagcagttcacatcggcgcaagccccgtcagaccaacaagtttctgcttgggacacgggagacaagtcaccatctcagccctgtcccatcaagacaaaaagtataatgttattacaagatctaggaaagaagacacaggtcaatagacgtgctggtgagcacgatcagacactccgtctgtctcaaacggagaccagcgatggcagtaaacgaaggcaacctgctctagtcaaatctactacgaatttcgctgcgtatgacgataagtatggtgcaagagactccatgtccctgattgccatctatggaacagtttggccgtgtctcagtctgaaagaacggctcttcatcgtcatcggacttatgatgaatctcatagttgcgggttccgtgccggcattctccattgtatttgctaatcttctatccactctctacaaccaagaagataggctgagaaatggtcaaaaatgggcgttggttcttctgatcatcgcgatgtccggcgccgtggctacttttcttggccactaccttctagagtgggcgggacaagcatgggttaatgctctacgaacacaagcctttcatagagttctccgccaaccgaaagcatggttcgacaacccagaacactcagcaagtcgtatcaatgactgcatggaccgtagcgcagaggagatgaggaatctagtcggtcgcttcgcgcctttgctcctggttgtcgtcgtcatgatcctggcctccgtgatctgggccgtagtgatctcttggaagctcacactcatcagtcttgcaagcgggcccttcttaattgctgctactaaaggttactcgactgtgtccaaccgatgggaatctcgatgcaacaaggccagcgacgagattggttcaaacgtgaccgaagcactcaccaacatccgtgtagtccgcgccttgactctggagcgcttcttcacaacaaagcacgagacatccacccaaagagtgttccggcttggtatcaagaaagcagcatatacagctgtcatgtatgcatgttggcaatccatgttttggttcctgatggctctcatattctggtatgcgactgtactcttggctatcaaccaggagattactgtccatgccattttacaagttgtcaatcttctcattctcggcctaagtacagcgtccaacatcttgaactcaatacccggtatatccgcgtcgcagataacggcagcccgtcttctgtactttgccaacctgcccttgcaatcatcctatgagatcaagggaaccaagaaggcaatgcgcttgcttcctgtcgacatgaataagctctcattcacatacccttcgaagcatagtcgacctgtactgcgaaatatttcactctcattcacagcagggtctttaattgctattgtaggatcatcaggatgcggcaagagcactatggcctccctgattctgggtctatataccccagaccctccctctcgttcaacgccaagtgaagtcttcattcatcctctcacattttcttcaatctctatccaacagctcgacacgcacagcctcagaaatcatatcggctacgtaccacaaacaccatttctgtttcctgcctccatcgccgcaaacatcacatatggtctcccagaggaatctccgctccgctctcatgccaatgttgaacaagcagcgcgggaagccggcatccacgacttcattcacagtttgcctgatggttatgacaccttggtaggggatggggggcaagcgctaagtggtggtcaagcacagcgtgtatgcattgcaagagctctagccaagaaaccaacgatactggtacttgacgagcccacaagcgctcttgatcccgaaagcgcggaaggtatccggaagacgatcgagcaattgctctacgagtccgagcaacgccatagtcacaaaggtcaggaggaattatgcgtaatcataattacgcacagcaaagaaatgatgaggattgcagacaagatcgtcgtcatcgacgagggtcacgtcgccgaaacgggttcatacgcagagctcatcagtaagcgggggaggttctatgagctgatcagcggtgggacacggatgggcaccagtagagatacaacgcccaggaaacaaaatcatagaactggtgtcgagtttcagaccccaaggaatgatgatccacctctacgacgagacagcatacaggagtttcctgggcggcgccagtgggtgggcgcacgtgaggtcgatttgacgccaaacacaggtccctctacagcgatccagagcccgtatcttgcactcagtccattgagtatgccaaagaagagaaaagagcataaatcttatggtgaatga

SEQ ID NO: 14558 - protein, 1503 aa, Muscodor strobelii
  misc_feature: SGI Peptide ID NO. 564799
  misc_feature (829)..(1105): Pfam Id: PF00664 Pfam Desc: ABC transporter transmembrane region
  misc_feature (32)..(312): Pfam Id: PF00664 Pfam Desc: ABC transporter transmembrane region
  misc_feature (1179)..(1390): Pfam Id: PF00005 Pfam Desc: ABC transporter
  misc_feature (389)..(576): Pfam Id: PF00005 Pfam Desc: ABC transporter
  misc_feature (13)..(1415): NCBI GI: 46126277 Blast Desc: FG07516.1 [Gibberella zeae PH-1]
  misc_feature (12)..(1432): NCBI GI: 256724819 Blast Desc: NECHADRAFT_96021 [Nectria haematococca mpVI 77-13-4]
  misc_feature (8)..(1423): NCBI GI: 261355436 Blast Desc: multidrug resistance protein [Verticillium albo-atrum VaMs.102]
  misc_feature (16)..(1460): NCBI GI: 156056943 Blast Desc: SS1G_04202 [Sclerotinia sclerotiorum 1980] gi|154701988|gb|EDO01727.1| SS1G_04202 [Sclerotinia sclerotiorum 1980]
  misc_feature (9)..(1381): NCBI GI: 171681571 Blast Desc: protein product [Podospora anserina] gi|170940744|emb|CAP65972.1| protein product [Podospora anserina]
  misc_feature (4)..(1406): NCBI GI: 261204165 Blast Desc: ABC a-pheromone efflux pump AtrD [Ajellomyces dermatitidis SLH14081] gi|239587081|gb|EEQ69724.1| ABC a-pheromone efflux pump AtrD [Ajellomyces dermatitidis SLH14081]
  misc_feature (17)..(1419): NCBI GI: 169595990 Blast Desc: SNOG_00742 [Phaeosphaeria nodorum SN15] gi|111071117|gb|EAT92237.1| SNOG_00742 [Phaeosphaeria nodorum SN15]
  misc_feature (16)..(602): NCBI GI: 85090808 Blast Desc: NCU09443 [Neurospora crassa OR74A] gi|28919969|gb|EAA29359.1| [Neurospora crassa OR74A]
  misc_feature (810)..(1412): NCBI GI: 154323690 Blast Desc: BC1G_00244 [Botryotinia fuckeliana B05.10] gi|150842473|gb|EDN17666.1| BC1G_00244 [Botryotinia fuckeliana B05.10]
  misc_feature (1)..(582): NCBI GI: 119179041 Blast Desc: CIMG_08312 [Coccidioides immitis RS]
MAGNKASEPAPSAPPTWRDLFAFTTWRHAALLATGLSAAVLAGALKTTMSILLGKIFGVIAQYGAGDLAGPETLAEVSSWCSLLTLIGGAGWLINFAVLFSWVTFGELQARSVRSILFHGLVEKEMAWFDSQSDGVASLLVRVQTQTRELQIATSIALGNLIVEVATAVANLIVALYMAWKLTLVLLASLPLSILILSLLTRQLKPAIFAQRQELSRASLYANAAISAIDLVKVFNGIDHETWQYLSTIRRSMRQYLIQARSNAYQFCYVKFWIESLFVVGFYYGAVLVDQGLSPANILTAFYAALNALQALEAFVPMYLVLAKGMAAGQFLCSISKHIKHGHSVHPMMGGSVPGRCIGDIELQNVTFAYPSNPSKIVLKNSSFHFRHGGLYFIIGRSGSGKSTMGNLLLSFYEPLSGNIFIDGNVIKTLDLKWLRRNITLVQQSSVLFNESFFMNVAFGHPNPSCVSTMRVKAACEMALLQSTISSLPSGLQTYIGTAGHSLSGGEKQRLALARAKLRDTPVLILDEITSGLDPVSRVLIMEAIRRWRKGKTTIIITHDIAQLEQNDFVYVMDNGFVVQEGLFCDVQKQTDGLLAQLMASATTIPSLDDHEIVDGMSRRRTRQTVVNFSRLLSDASQNNALLPGSPSPGEGLRGAQWSSDDGFITSSAFPPLRTFGSVRHYRTDATNMLQRLAMPEESPKRGRISRAMACFSQQFTSAQAPSDQQVSAWDTGDKSPSQPCPIKTKSIMLLQDLGKKTQVNRRAGEHDQTLRLSQTETSDGSKRRQPALVKSTTNFAAYDDKYGARDSMSLIAIYGTVWPCLSLKERLFIVIGLMMNLIVAGSVPAFSIVFANLLSTLYNQEDRLRNGQKWALVLLIIAMSGAVATFLGHYLLEWAGQAWVNALRTQAFHRVLRQPKAWFDNPEHSASRINDCMDRSAEEMRNLVGRFAPLLLVVVVMILASVIWAVVISWKLTLISLASGPFLIAATKGYSTVSNRWESRCNKASDEIGSNVTEALTNIRVVRALTLERFFTTKHETSTQRVFRLGIKKAAYTAVMYACWQSMFWFLMALIFWYATVLLAINQEITVHAILQVVNLLILGLSTASNILNSIPGISASQITAARLLYFANLPLQSSYEIKGTKKAMRLLPVDMNKLSFTYPSKHSRPVLRNISLSFTAGSLIAIVGSSGCGKSTMASLILGLYTPDPPSRSTPSEVFIHPLTFSSISIQQLDTHSLRNHIGYVPQTPFLFPASIAANITYGLPEESPLRSHANVEQAAREAGIHDFIHSLPDGYDTLVGDGGQALSGGQAQRVCIARALAKKPTILVLDEPTSALDPESAEGIRKTIEQLLYESEQRHSHKGQEELCVIIITHSKEMMRIADKIVVIDEGHVAETGSYAELISKRGRFYELISGGTRMGTSRDTTPRKQNHRTGVEFQTPRNDDPPLRRDSIQEFPGRRQWVGAREVDLTPNTGPSTAIQSPYLALSPLSMPKKRKEHKSYGE

SEQ ID NO: 14559 - DNA, 501 bp, Muscodor strobelii
  misc_feature: SGI cDNA ID NO. 564800
  misc_feature: Encodes the peptide sequence at SEQ ID NO 14560
atggatgacgacctgctgcagatgtcgtcgtcgcagccggtgccaaaggacttcgacgccgagaacgccgacaacctcgaggatatcgagaagcagttcgcggtcaaggcggtgcagcacctcgagacgtactgggccatcctcggcaaggtcaagggctcgtcgctgcgcctgaccaagatggacgacgacatctacctgcacctgcagaccgccttccccgacttcgaccccgccgccaccatcgacgaggacgagctgaagagcaaggccggcaaggagcgctggcgccagttcctcatggcctacgacaagaagatcgacgactacagcttcggcaccatcctgcgcacctcccccgccgtcgagtacgaccaggacaccaccatcttcgtgccccgcatgcagttctacgccgtcgagatcgcccgcaaccgctcggggctcaacgactgggtctacgagcgcgcgcaggccgacaagaacaagtccagcaaataa

SEQ ID NO: 14560 - protein, 166 aa, Muscodor strobelii
  misc_feature: SGI Peptide ID NO. 564800
  misc_feature (15)..(153): Pfam Id: PF05516 Pfam Desc: Domain of Function (DUF757)
  misc_feature (13)..(165): NCBI GI: 171681573 Blast Desc: protein product [Podospora anserina] gi|170940745|emb|CAP65973.1| protein product [Podospora anserina]
  misc_feature (3)..(164): NCBI GI: 256724692 Blast Desc: [Nectria haematococca mpVI 77-13-4]
  misc_feature (1)..(165): NCBI GI: 261355437 Blast Desc: DUF757 domain-containing protein [Verticillium albo-atrum VaMs.102]
  misc_feature (4)..(164): NCBI GI: 46126275 Blast Desc: FG07515.1 [Gibberella zeae PH-1]
  misc_feature (8)..(164): NCBI GI: 85090806 Blast Desc: NCU09442 [Neurospora crassa OR74A] gi|28919968|gb|EAA29358.1| NCU09442 [Neurospora crassa OR74A]
  misc_feature (11)..(165): NCBI GI: 116203875 Blast Desc: CHGG_09821 [Chaetomium globosum CBS 148.51] gi|88175949|gb|EAQ83417.1| CHGG_09821 [Chaetomium globosum CBS 148.51]
  misc_feature (15)..(163): NCBI GI: 156061031 Blast Desc: SS1G_02658 [Sclerotinia sclerotiorum 1980] gi|154700062|gb|EDN99800.1| SS1G_02658 [Sclerotinia sclerotiorum 1980]
  misc_feature (15)..(165): NCBI GI: 154321902 Blast Desc: BC1G_01098 [Botryotinia fuckeliana B05.10] gi|150850345|gb|EDN25538.1| BC1G_01098 [Botryotinia fuckeliana B05.10]
  misc_feature (16)..(165): NCBI GI: 119500766 Blast Desc: NFIA_107350 [Neosartorya fischeri NRRL 181] gi|119415305|gb|EAW25243.1| conserved [Neosartorya fischeri NRRL 181]
  misc_feature (14)..(165): NCBI GI: 261204151 Blast Desc: DUF757 domain-containing protein [Ajellomyces dermatitidis SLH14081] gi|239587074|gb|EEQ69717.1| DUF757 domain-containing protein [Ajellomyces dermatitidis SLH14081]
MDDDLLQMSSSQPVPKDFDAENADNLEDIEKQFAVKAVQHLETYWAILGKVKGSSLRLTKMDDDIYLHLQTAFPDFDPAATIDEDELKSKAGKERWRQFLMAYDKKIDDYSFGTILRTSPAVEYDQDTTIFVPRMQFYAVEIARNRSGLNDWVYERAQADKNKSSK

SEQ ID NO: 14561 - DNA, 4570 bp, Muscodor strobelii
  misc_feature: SGI EST ID NO. CUFF.34683.0
  misc_feature: Variant of the nucleotide sequence at SEQ ID NO 14559
caggatcaagcgggtctacggtctccatacgcacgctaggcttgttcgtcatccactctgttctacttgtacattttgagcaaatcacataccatcgcacggagcagtgagttcgctattaacgtagtgccgagaagttaaaatcttcaatacctacctattaactaatctctaagtctcttgaaaacaacagtattttttacgataattcattatgtcgaacactttagagttcgagtaattgatttcatggcttcaagagatagcacaccgacagacacggagtgccgtgacccgatcctcgcatacaaaaatgtcaaaaatggagccggtcaatgtcggcccgcactcgctgccaccggctctttgtcgccatgacccaggaaacttaaattgcggattcatgacagatgaggaaatcatcgtgccgcctactccctacaaatcctcaagctcatcgagggcgtaccaacacgatcaaagaatcacagacgacggaaaggtcatctcatcaactgcagacagactctacaagagggtatcagagcataattccgaactagtagccaatgagaagatcaccacaaacttccacaggcagtccacgagttgcgccattccacttccattctgcgggaagggacacaatgaagatgcagggaatatagcagatgataaaataagtttgccacgattttccatgagttccaaggagtcgaggatagactcgctaccgctggatcgcaacagtgagatacgccatgtttatctcacttttgacacggcgctaccagcgcccaatatcccggcagcccccgtctacaatgtggcgacgctacccgatcccccggatctgtcgctgtacgtgaatccaacgtgttggccacgggctcgcaagaacatgatggtcgccgtgtcttgcgtcgcgaccgccatcactgcctacacggcgggtgcatactcggcacccgccgacctcatcgctgccgagttcggaaccacgcacgagctggcgttgctcggcgtgaccactttctgcctcgggtttgcgttcgcccccatgatccttgcgcctttctccgagattaacggacgttacccggtgtttgccatcgccggtgtggtgttcactgtatttcaggccgtgtgtggcgtcgtcaccaacctcgcaggcatgctcttagcgcgatttttcaagggagtgggcggcagtgtgttttccacgatggtaggtggcgtcatctctgatctgtacgaaaaagagaaccgcaatacacccatggcattgttcagtggtgccgtgttgattggtaccggattgggacccctgatatcctccttaatcgtgcaaaagttaggatcagagggccagcagtggaaatgggtattttggcaccaggtaatcatagatggtttgttgtctttggcggtaattggtttgttcaaagagagccggggctctgtcgtcctgacgaggaaggccagggccctgaaccaatggtatgaagaactagagcagaatggcgtttttggtgtctggatccagggtgaaggatcctccacagctggctttctgggcgacattgagaagttggacgagaaaccagcatcgcccctgaatacgcccggcattggagggctaagtctacagcgcattcgttgggtggtgaagtcggacgaggagcggggatcaatctatgagatgatcacgacgtctcttgttcggccatttcacctgctgttcacggaacccatcgtattcttcttctcgctgtgggtatcctttgcctgggccgttctctacttgacatttggatcggtgccgctggtattcaagcagcagtacagcttcacgactgaacaggctggatatgtgtttgttgccatgattgtcgggtccatcttggctacggtcatcggcatctatcaagaagacttgctcaatcacccaagttggcgggctaagtcgacgggctccggtagcgatgaggaggcagagactggggcagagcacagagttgagatgacgggtgtatgggggttcctgcagcgacggttccccgccgagtcgccagaatcgcgactgtacttcacgtgcttcacagccgtgctgctgccgatcgggctgttcctattcggcttctcggcacgtccgtcggtacactggatcgtgccggcgatagggattgcgctggcgtcggcgggtatctactacgtgtacctggcgacgttcaactacctagcagacatctaccacgcgtacgcgtcgtcggcgctggcggcgcagtcgttctgccgcaacatcctcgggggcgcgttcccgctggtgacgggataccttttcacgaacttgggagatgcagcagctggtgggctcctgggtgggatcgcggtggcactgacactggtgccgtgggctctggtgctgtttggagaacgaatccggagccgaagcaagtttgcagtggcattggaagcccagacttagcgcacacgtataacatttacttaggtactcacatgtattggaagtcagtgaagcgtttcgaatcaccgagggtaccttctatacattgatagataatcctaattggatatgggatgtggagcgatactcatgtcaatgtgtgctgacttcaatacctaatatcctgcttttgatgtgacgatgagagaatgcatgtgatgtgtggccagcgcgggatgtaatgttgttggatgggacacgacatgatgccgtggcacacgcgatgcagatgcccataaaacagtacatgtacatgtaggtagcaatctactgatcataacgataacgaatcgtattcgtcaagcgggaactaccccgcacttcatgttcaatcaatcagtgtctgtctggcccctccatcaagtgctccaggccgtccggcgtatgacgcagcactaaaaaaaagttgcagcctcaacttgacattcttgtccgcgtcttcaccttcatcttcatcctcatctccgtcaatcaaagaagccatcacgactacggtctcttcgcctcttcccgcccacgcactacgactagaagaacacgggcgcgtaacgctgcacgttcgcaatggatgacgacctgctgcagatgtcgtcgtcgcagccggtgccaaaggacttcgacgccgagaacgccgacaacctcgaggatatcgagaagcagttcgcggtcaaggcggtgcagcacctcgagacgtactgggccatcctcggcaaggtcaagggctcgtcgctgcgcctgaccaagatggacgacgacatctacctgcacctgcagaccgccttccccgacttcgaccccgccgccaccatcgacgaggacgagctgaagagcaaggccggcaaggagcgctggcgccagttcctcatggcctacgacaagaagatcgacgactacagcttcggcaccatcctgcgcacctcccccgccgtcgagtacgaccaggacaccaccatcttcgtgccccgcatgcagttctacgccgtcgagatcgcccgcaaccgctcggggctcaacgactgggtctacgagcgcgcgcaggccgacaagaacaagtccagcaaataaacacgtaaatccaactcgatactcagcgaaataactgcatgctggatacatatacacatatagagagagacacacgtgatgctcggttccagtgcacgatgatcgtgaatgatcggtcgatgcacagatgtcctgcacaggatctaggtatgctgggttggcaggcagcaaattcccagctccaccgtttcgaatgatgcggtcgtcagcgccgagccgcagatgtgcagaccctacaagcgccggggagagagaacgatgggattcggaacgtgggggcgcagtggagatggttgatgggtttggattgctttctgcgatatgtattctgcattctgcactttgtgcggcgactcaaccacataggcatcgaggaggcaccgaggaggctgtcgtcgacaagttgtaggggcgtggcacatggtatgtatgtttttctgatgtacgcctctacttcgagtcgaagtcgagtcagataccctatggaactcagaaagatcaagtcaaatactccttccctggtaagacggaattgtcgccagcaaagccctccgaattcgccccgtgcccgttctccataattgagaaggcttcgtagttgatgagaaaggaaacgagaagtcaagtggcaacaagatatccatcttacgccctacttctagcgtagctatcggcccagctgtcgagcgcgattgtctaatctcttgagaggccaaccccagtatagtcatgctcaatttctgcgaacagtgtgcgaaagcccaaacccattagactgtcggaatgtgaattacaacatgctcttcaagagtgccgcaacgacatactctctatcggttccttcatctttatggtactgctgtctctctgtttcggtgtaaggtgcggcctcccagctcaacgcggcgccaccttcaacaaagacactctccaaactaggtacaggccaatctcaaatttgtcgttttctgatcttgc

SEQ ID NO: 14562 - DNA, 2175 bp, Muscodor strobelii
  misc_feature: SGI cDNA ID NO. 564801
  misc_feature: Encodes the peptide sequence at SEQ ID NO 14563
atgtcaaaaatggagccggtcaatgtcggcccgcactcgctgccaccggctctttgtcgccatgacccaggaaacttaaattgcggattcatgacagatgaggaaatcatcgtgccgcctactccctacaaatcctcaagctcatcgagggcgtaccaacacgatcaaagaatcacagacgacggaaaggtcatctcatcaactgcagacagactctacaagagggtatcagagcataattccgaactagtagccaatgagaagatcaccacaaacttccacaggcagtccacgagttgcgccattccacttccattctgcgggaagggacacaatgaagatgcagggaatatagcagatgataaaataagtttgccacgattttccatgagttccaaggagtcgaggatagactcgctaccgctggatcgcaacagtgagatacgccatgtttatctcacttttgacacggcgctaccagcgcccaatatcccggcagcccccgtctacaatgtggcgacgctacccgatcccccggatctgtcgctgtacgtgaatccaacgtgttggccacgggctcgcaagaacatgatggtcgccgtgtcttgcgtcgcgaccgccatcactgcctacacggcgggtgcatactcggcacccgccgacctcatcgctgccgagttcggaaccacgcacgagctggcgttgctcggcgtgaccactttctgcctcgggtttgcgttcgcccccatgatccttgcgcctttctccgagattaacggacgttacccggtgtttgccatcgccggtgtggtgttcactgtatttcaggccgtgtgtggcgtcgtcaccaacctcgcaggcatgctcttagcgcgatttttcaagggagtgggcggcagtgtgttttccacgatggtaggtggcgtcatctctgatctgtacgaaaaagagaaccgcaatacacccatggcattgttcagtggtgccgtgttgattggtaccggattgggacccctgatatcctccttaatcgtgcaaaagttaggatcagagggccagcagtggaaatgggtattttggcaccaggtaatcatagatggtttgttgtctttggcggtaattggtttgttcaaagagagccggggctctgtcgtcctgacgaggaaggccagggccctgaaccaatggtatgaagaactagagcagaatggcgtttttggtgtctggatccagggtgaaggatcctccacagctggctttctgggcgacattgagaagttggacgagaaaccagcatcgcccctgaatacgcccggcattggagggctaagtctacagcgcattcgttgggtggtgaagtcggacgaggagcggggatcaatctatgagatgatcacgacgtctcttgttcggccatttcacctgctgttcacggaacccatcgtattcttcttctcgctgtgggtatcctttgcctgggccgttctctacttgacatttggatcggtgccgctggtattcaagcagcagtacagcttcacgactgaacaggctggatatgtgtttgttgccatgattgtcgggtccatcttggctacggtcatcggcatctatcaagaagacttgctcaatcacccaagttggcgggctaagtcgacgggctccggtagcgatgaggaggcagagactggggcagagcacagagttgagatgacgggtgtatgggggttcctgcagcgacggttccccgccgagtcgccagaatcgcgactgtacttcacgtgcttcacagccgtgctgctgccgatcgggctgttcctattcggcttctcggcacgtccgtcggtacactggatcgtgccggcgatagggattgcgctggcgtcggcgggtatctactacgtgtacctggcgacgttcaactacctagcagacatctaccacgcgtacgcgtcgtcggcgctggcggcgcagtcgttctgccgcaacatcctcgggggcgcgttcccgctggtgacgggataccttttcacgaacttgggagatgcagcagctggtgggctcctgggtgggatcgcggtggcactgacactggtgccgtgggctctggtgctgtttggagaacgaatccggagccgaagcaagtttgcagtggcattggaagcccagacttag

SEQ ID NO: 14563 - protein, 724 aa, Muscodor strobelii
  misc_feature: SGI Peptide ID NO. 564801
  misc_feature (202)..(670): Pfam Id: PF07690 Pfam Desc: Major Facilitator Superfamily
  misc_feature (202)..(536): Pfam Id: PF07690 Pfam Desc: Major Facilitator Superfamily
  misc_feature (111)..(720): NCBI GI: 116203881 Blast Desc: CHGG_09824 [Chaetomium globosum CBS 148.51] gi|88175952|gb|EAQ83420.1| CHGG_09824 [Chaetomium globosum CBS 148.51]
  misc_feature (142)..(721): NCBI GI: 85090810 Blast Desc: NCU09444 [Neurospora crassa OR74A] gi|28919970|gb|EAA29360.1| conserved [Neurospora crassa OR74A]
  misc_feature (143)..(721): NCBI GI: 39940686 Blast Desc: MGG_04897 [Magnaporthe grisea 70-15] gi|145010870|gb|EDJ95526.1| MGG_04897 [Magnaporthe grisea 70-15]
  misc_feature (132)..(717): NCBI GI: 171681565 Blast Desc: protein product [Podospora anserina] gi|170940741|emb|CAP65969.1| protein product [Podospora anserina]
  misc_feature (142)..(723): NCBI GI: 46126263 Blast Desc: FG07509.1 [Gibberella zeae PH-1]
  misc_feature (135)..(718): NCBI GI: 256724697 Blast Desc: NECHADRAFT_48304 [Nectria haematococca mpVI 77-13-4]
  misc_feature (130)..(718): NCBI GI: 261355434 Blast Desc: drug transporter [Verticillium albo-atrum VaMs.102]
  misc_feature (144)..(717): NCBI GI: 119473965 Blast Desc: MFS transporter, [Neosartorya fischeri NRRL 181] gi|119407011|gb|EAW16961.1| MFS transporter, [Neosartorya fischeri NRRL 181]
  misc_feature (144)..(720): NCBI GI: 146323185 Blast Desc: MFS multidrug transporter [Aspergillus fumigatus Af293] gi|129556507|gb|EAL86487.2| MFS multidrug transporter, [Aspergillus fumigatus Af293]
  misc_feature (136)..(720): NCBI GI: 238497772 Blast Desc: MFS multidrug transporter, [Aspergillus flavus NRRL3357] gi|220693395|gb|EED49740.1| MFS multidrug transporter, [Aspergillus flavus NRRL3357]
MSKMEPVNVGPHSLPPALCRHDPGNLNCGFMTDEEIIVPPTPYKSSSSSRAYQHDQRITDDGKVISSTADRLYKRVSEHNSELVANEKITTNFHRQSTSCAIPLPFCGKGHNEDAGNIADDKISLPRFSMSSKESRIDSLPLDRNSEIRHVYLTFDTALPAPNIPAAPVYNVATLPDPPDLSLYVNPTCWPRARKNMMVAVSCVATAITAYTAGAYSAPADLIAAEFGTTHELALLGVTTFCLGFAFAPMILAPFSEINGRYPVFAIAGVVFTVFQAVCGVVTNLAGMLLARFFKGVGGSVFSTMVGGVISDLYEKENRNTPMALFSGAVLIGTGLGPLISSLIVQKLGSEGQQWKWVFWHQVIIDGLLSLAVIGLFKESRGSVVLTRKARALNQWYEELEQNGVFGVWIQGEGSSTAGFLGDIEKLDEKPASPLNTPGIGGLSLQRIRWVVKSDEERGSIYEMITTSLVRPFHLLFTEPIVFFFSLWVSFAWAVLYLTFGSVPLVFKQQYSFTTEQAGYVFVAMIVGSILATVIGIYQEDLLNHPSWRAKSTGSGSDEEAETGAEHRVEMTGVWGFLQRRFPAESPESRLYFTCFTAVLLPIGLFLFGFSARPSVHWIVPAIGIALASAGIYYVYLATFNYLADIYHAYASSALAAQSFCRNILGGAFPLVTGYLFTNLGDAAAGGLLGGIAVALTLVPWALVLFGERIRSRSKFAVALEAQT

SEQ ID NO: 14564 - DNA, 4570 bp, Muscodor strobelii; identical to SEQ ID NO: 14561
  misc_feature: SGI EST ID NO. CUFF.34683.0
  misc_feature: Variant of the nucleotide sequence at SEQ ID NO 14562

SEQ ID NO: 14565 - DNA, 2181 bp, Muscodor strobelii
  misc_feature: SGI cDNA ID NO. 564802
  misc_feature: Encodes the peptide sequence at SEQ ID NO 14566
atggagcccttcccatccgcggagcccgacgagggctactccgagcatcccctcaactctactgctctcgccctgcacgacaatctagccttgtctctgcgctcctcggccgacatccccgcctggctgtcttcccagatgcccaagttgtccttacaggagaagaaaaatcttgctatgctgatactaaacgagctgcccactactgccgtcgccgacatcgtcgtgaaccatctgaaccctcgtctgtatatcaacttcgtgaaccacctaccgcccgagatatgcttgaaagtgctgggctatctggatgctacctcgctgatccacgttgctctgtgctgccgaggatggcacgagctggccgcagaccacaagctgtgggagaagctgtactatctcgagggctggagggccataactcctgaaataaaggccgccgagaggaggatgaacgagaacccacctccccctcaggcacatactcgtaaactgcaatctatagacgatggtcacgtggccaaaaaacgggcgatacgcagcccttcgccgcagaataatctccaagatgacgacgactacgagatcattgacgctgatgtgaacacgaaccaagagacccctgatgttgtcatgtcgggtaccagtctctttggtggaggccctgaagtcggcggaagtggctcctctttccagagcaacaccagcgtagtccgcaaaatgactgacctagtaatgaggtcaccaagtccattgcccgaagtaaacagccatagacagtctaggaggggcaaagggaaagaaattgcggtagccgagacaccggtggccgtatcaaccctgaatgatatagacatgggtggctcaacactgcccaagtcaacactgtggaactatgatacgagaaatcgcaggtacaggatgaattggaagtatctgtactcgatgcgacgcaggctggaagggaattgggaacgcggtcgcttcatcaattttcaactaccccacccagaccacccggacgaaggtcacgaggagtgcatctacagcctgcagtataattctgaacatctggtgagcggcagtagggacaagacccttcggatatggaatcttcgaacacgacgcttggcccggcccccactcacgggacataacggttctgtcttgtgtcttcagttcgattcggacccagacgaagacttaatcgtttctgggagtagcgattccgacgtgattctgtggagattttccaccggcgagatactacagcgtctcgtaagggcccatcgagagtctgtcttgaatgtcaagttcgacaaaaggatattggtgacttgttccaaggacaaaagtatcaagattttcaaccgtcgtgagctccggcccggagatatgggctatagcgagcaccgcgctgtccggccagtgcccgtgaccttgcggaactatggatacgatgattcgcccctagaccagcttgccttcacccccgcctatacccaaatcgcctgtctagaaggtcacggtgctgctgtgaatgctgtccaaatttgcgataggcagattgtgtccgccagcggtgacagaactatcaaactttgggactggccaaatcaggtcataaagcgcgtatttcttggtcacagcaaggggatcgcgtgtgtacaatacgacgggcgtcgtatcgttagcggcagcagcgataacgaggtcaaagtattcgactctgagactggggtagaagtcgccagtttgcgtgcgcatggtaatctggtacggacggtacaggcaggcttcggtgacctgccgtacagtcgcgaggaagatcaactgaaagccaaggcagtggaccaggcttacttccaggctttgaatgatgggcatctggactctacgcaaccaggcaaacgacgggcggccaacgcaggcagcagccgcccagaaaatatcacggcttttggagcaaaactacctccgggcggaggaggcggcccgtatggaaggatcgtctccggatcttatgaccagagcatcatcatctggcgtcgggaccgcgaaggggaatggagacaggcacatacccttcgacaggaagagggtgctgtcgccgcctatcggcagaattcgcgagcagccccttctacttcccccccgccgtcccactccctcggcggctga

SEQ ID NO: 14566 - protein, 726 aa, Muscodor strobelii
  misc_feature: SGI Peptide ID NO. 564802
  misc_feature (86)..(133): Pfam Id: PF00646 Pfam Desc: F-box domain
  misc_feature (500)..(536): Pfam Id: PF00400 Pfam Desc: WD domain, G-beta repeat
  misc_feature (335)..(371): Pfam Id: PF00400 Pfam Desc: WD domain, G-beta repeat
  misc_feature (540)..(576): Pfam Id: PF00400 Pfam Desc: WD domain, G-beta repeat
  misc_feature (376)..(416): Pfam Id: PF00400 Pfam Desc: WD domain, G-beta repeat
  misc_feature (420)..(457): Pfam Id: PF00400 Pfam Desc: WD domain, G-beta repeat
  misc_feature (1)..(700): NCBI GI: 256735634 Blast Desc: NECHADRAFT_31774 [Nectria haematococca mpVI 77-13-4]
  misc_feature (8)..(709): NCBI GI: 51039030 Blast Desc: F-box/WD-40 repeat-containing protein [Neurospora crassa]
  misc_feature (8)..(709): NCBI GI: 116204523 Blast Desc: CHGG_10145 [Chaetomium globosum CBS 148.51] gi|88176273|gb|EAQ83741.1| CHGG_10145 [Chaetomium globosum CBS 148.51]
  misc_feature (75)..(697): NCBI GI: 261354325 Blast Desc: F-box/WD repeat-containing protein 1A [Verticillium albo-atrum VaMs.102]
  misc_feature (10)..(726): NCBI GI: 39963039 Blast Desc: MGG_09696 [Magnaporthe grisea 70-15] gi|145015524|gb|EDK00061.1| MGG_09696 [Magnaporthe grisea 70-15]
  misc_feature (6)..(724): NCBI GI: 171679777 Blast Desc: protein product [Podospora anserina] gi|170939514|emb|CAP64742.1| protein product [Podospora anserina]
  misc_feature (60)..(709): NCBI GI: 164425726 Blast Desc: NCU04540 [Neurospora crassa OR74A] gi|157071039|gb|EAA26744.2| conserved [Neurospora crassa OR74A]
  misc_feature (9)..(712): NCBI GI: 156053746 Blast Desc: SS1G_05720 [Sclerotinia sclerotiorum 1980] gi|154703501|gb|EDO03240.1| SS1G_05720 [Sclerotinia sclerotiorum 1980]
  misc_feature (10)..(718): NCBI GI: 154303287 Blast Desc: BC1G_09392 [Botryotinia fuckeliana B05.10] gi|150854955|gb|EDN30147.1| BC1G_09392 [Botryotinia fuckeliana B05.10]
  misc_feature (10)..(705): NCBI GI: 189190988 Blast Desc: F-box/WD repeat containing protein 7 [Pyrenophora tritici-repentis Pt-1C-BFP] gi|187973439|gb|EDU40938.1| F-box/WD repeat containing protein 7 [Pyrenophora tritici-repentis
MEPFPSAEPDEGYSEHPLNSTALALHDNLALSLRSSADIPAWLSSQMPKLSLQEKKNLAMLILNELPTTAVADIVVNHLNPRLYINFVNHLPPEICLKVLGYLDATSLIHVALCCRGWHELAADHKLWEKLYYLEGWRAITPEIKAAERRMNENPPPPQAHTRKLQSIDDGHVAKKRAIRSPSPQNNLQDDDDYEIIDADVNTNQETPDVVMSGTSLFGGGPEVGGSGSSFQSNTSVVRKMTDLVMRSPSPLPEVNSHRQSRRGKGKEIAVAETPVAVSTLNDIDMGGSTLPKSTLWNYDTRNRRYRMNWKYLYSMRRRLEGNWERGRFINFQLPHPDHPDEGHEECIYSLQYNSEHLVSGSRDKTLRIWNLRTRRLARPPLTGHNGSVLCLQFDSDPDEDLIVSGSSDSDVILWRFSTGEILQRLVRAHRESVLNVKFDKRILVTCSKDKSIKIFNRRELRPGDMGYSEHRAVRPVPVTLRNYGYDDSPLDQLAFTPAYTQIACLEGHGAAVNAVQICDRQIVSASGDRTIKLWDWPNQVIKRVFLGHSKGIACVQYDGRRIVSGSSDNEVKVFDSETGVEVASLRAHGNLVRTVQAGFGDLPYSREEDQLKAKAVDQAYFQALNDGHLDSTQPGKRRAANAGSSRPENITAFGAKLPPGGGGGPYGRIVSGSYDQSIIIWRRDREGEWRQAHTLRQEEGAVAAYRQNSRAAPSTSPPPSHSLGG

SEQ ID NO: 14567 - DNA, 4963 bp, Muscodor strobelii
  misc_feature: SGI EST ID NO. CUFF.34691.0
  misc_feature: Variant of the nucleotide sequence at SEQ ID NO 14565
cgggtgtcagccttgactggagccagcaaacaacgagcaacaacttcaacttcaataacaacaacaacaacgaaccgacgagcattgttctcctcgccgtgacatagcaagcgaaattgctgcattttgccattcgacgacgcctggaagccgtgtagatttctctaagctccggcgctatattgactgggcactgtcgcggtcgccgtcaccgtcaccgtcaccgtcgccccgcatctgctcgacagcctcgacaacttggccaatcgactttgccacgtcggaacccgatgtatcaccgcgtcaactcctccagaatcctgctgggccaatagcccgtccccgaccacggcatcccagccttatcgttgccgccctgttgccctgccgctcctgtggcatccgtacctgccgccggcgcctgcactcgactcgactcctctctataataccctgcaaatcctagtctagacttgaatcttcggacggaaccattgcggtacacagttataacgcaagtatggagcccttcccatccgcggagcccgacgagggctactccgagcatcccctcaactctactgctctcgccctgcacgacaatctagccttgtctctgcgctcctcggccgacatccccgcctggctgtcttcccagatgcccaagttgtccttacaggagaagaaaaatcttgctatgctgatactaaacgagctgcccactactgccgtcgccgacatcgtcgtgaaccatctgaaccctcgtctgtatatcaacttcgtgaaccacctaccgcccgagatatgcttgaaagtgctgggctatctggatgctacctcgctgatccacgttgctctgtgctgccgaggatggcacgagctggccgcagaccacaagctgtgggagaagctgtactatctcgagggctggagggccataactcctgaaataaaggccgccgagaggaggatgaacgagaacccacctccccctcaggcacatactcgtaaactgcaatctatagacgatggtcacgtggccaaaaaacgggcgatacgcagcccttcgccgcagaataatctccaagatgacgacgactacgagatcattgacgctgatgtgaacacgaaccaagagacccctgatgttgtcatgtcgggtaccagtctctttggtggaggccctgaagtcggcggaagtggctcctctttccagagcaacaccagcgtagtccgcaaaatgactgacctagtaatgaggtcaccaagtccattgcccgaagtaaacagccatagacagtctaggaggggcaaagggaaagaaattgcggtagccgagacaccggtggccgtatcaaccctgaatgatatagacatgggtggctcaacactgcccaagtcaacactgtggaactatgatacgagaaatcgcaggtacaggatgaattggaagtatctgtactcgatgcgacgcaggctggaagggaattgggaacgcggtcgcttcatcaattttcaactaccccacccagaccacccggacgaaggtcacgaggagtgcatctacagcctgcagtataattctgaacatctggtgagcggcagtagggacaagacccttcggatatggaatcttcgaacacgacgcttggcccggcccccactcacgggacataacggttctgtcttgtgtcttcagttcgattcggacccagacgaagacttaatcgtttctgggagtagcgattccgacgtgattctgtggagattttccaccggcgagatactacagcgtctcgtaagggcccatcgagagtctgtcttgaatgtcaagttcgacaaaaggatattggtgacttgttccaaggacaaaagtatcaagattttcaaccgtcgtgagctccggcccggagatatgggctatagcgagcaccgcgctgtccggccagtgcccgtgaccttgcggaactatggatacgatgattcgcccctagaccagcttgccttcacccccgcctatacccaaatcgcctgtctagaaggtcacggtgctgctgtgaatgctgtccaaatttgcgataggcagattgtgtccgccagcggtgacagaactatcaaactttgggactggccaaatcaggtcataaagcgcgtatttcttggtcacagcaaggggatcgcgtgtgtacaatacgacgggcgtcgtatcgttagcggcagcagcgataacgaggtcaaagtattcgactctgagactggggtagaagtcgccagtttgcgtgcgcatggtaatctggtacggacggtacaggcaggcttcggtgacctgccgtacagtcgcgaggaagatcaactgaaagccaaggcagtggaccaggcttacttccaggctttgaatgatgggcatctggactctacgcaaccaggcaaacgacgggcggccaacgcaggcagcagccgcccagaaaatatcacggcttttggagcaaaactacctccgggcggaggaggcggcccgtatggaaggatcgtctccggatcttatgaccagagcatcatcatctggcgtcgggaccgcgaaggggaatggagacaggcacatacccttcgacaggaagagggtgctgtcgccgcctatcggcagaattcgcgagcagccccttctacttcccccccgccgtcccactccctcggcggctgaggccgttgagaccgctgacaaccaaaatgatcaatctatgggaaatccgccgcccccgccgcagccggccagcgcacctccggctctacaacgacctccgccccctcaacctaccgatgaacatcattccaccccttccgcgacggctccgcatacacttcatgctacacctggctacaccagactcattgaccaaaccgtccctcaaggacctagtgcactctttgctgcattacaagcctatcctaggttgattgcctttaattcccagatacagctcgccatcgaccgggaacctgatgcgatgaggcgctctcagctccgtcagatagtcagtaccgcgttggtcagagcccagattgcgcaaagacgtaatctggctgcaccgattactactgctgctccagcggtacaagcctcgtcttcacagacgccacagcacagccaacaaggaactacctcgaggccgagccagatgatgagtttagcgcagatgttgaacagcgacgcagcaccttcacaaccagctgccacacccacagcccacggcggcccgcctcctatcgtggcgcacggcactaccttccctcccattctaccacagccacaagcgggtcagtctcaagcgcagcctggacactcgcagaccaccccagtcgtgcgcctgcccccgacacatagccaggaccaagagcacggcctaacgcaaatgcaaatgcaaatgcaagcacccgccgggccaccgtcccatcctatcgccatgacggacacgagcccggcgaggatcttcaagctgcaattcgacgcacggcagatcatctgctgcagccaggtcagcaccataatagggtgggacttctgcaacggtgaccccgagctggaagaagcctcgcggttctttggtaccatagagtagacatgtcacatgcagtgggaatggtcatgcggaaccaaggtgagaagagctcgtgggaacgatgatgttgagcattgtacatagattagcagtaaataccaagtgaatgatccacgcttcttgatgatgagagaacgattcttctcgagtcgttgtgctaccctggccatatccacgactgaacaccgacaacgccagaaacgccaaagccatgtattcctttgccaacccggcccgacgccccctctgtcctgccgtaaccacccaccgcgccgcggtcgtgatcacctcgccgcctcctggaccttggagctcgactccgggggctcgtcgataaagtcgggcacctcatctttcatgaaatccggaacaccaccagcatccatggcacttgcgccttcgaactccatctcggcgccgagcatttcgagctcggcatcgagctcggcctcgtcgacgtcgtcggggacctcgtagccacggctcagcgtctcctggatctcgttgccgacatcgagcagatcggccatctcatcctgcatgcgctcgatcttgtccaggtcgaccttgccgtactgtttcttgagctccttctgcgtcgtcttcatggcgtcgacggtggtcataacaccggagaggttgtcctgcatggtctgggcctgctccatgttccagacctggctctgaagctggtcgcgctgggactcgtactgcttgcgccgctggaggaccttgagggccttttgcttcagcgccgtcttgcccgggccgtcgcgcattttggagattttggtctggtaggtttggagctcggcgtttatggaggcgatcttgacgtcgacggtggagatgcgcgtgtcgatgttggagatggcgctgttgagcgtcggcttgggccccgtgggcttgctgccgaagaggcggttcatggttgcgacggggccgcggtgggctgcgatgggctgcgatgggctacgatgtatttagggtcgaggatgaaacgagacgagacgctagatcgggatccaaagtaggtaggcaacgggcgcgattcaaggcggactcgtacgtgttcgtcttggaactggagcgcaaagatgcaagtaataggcagctagttttacgtggttgggttaagttggagcttgaggcttgacgatggttggagctgttggaggggcagtctcggtgttgcggtaggctccagccatggaagccgaatgcccatgacgttactgggaaaagccgacacagctgtctgtcggttgctcgacggatgggccgcttcaccacccaagtgcttcaacaccaagacggctctttgctcttaaaatacgtgaatggag

SEQ ID NO: 14568 - DNA, 879 bp, Muscodor strobelii
  misc_feature: SGI cDNA ID NO. 564803
  misc_feature: Encodes the peptide sequence at SEQ ID NO 14569
atgggaaatccgccgcccccgccgcagccggccagcgcacctccggctctacaacgacctccgccccctcaacctaccgatgaacatcattccaccccttccgcgacggctccgcatacacttcatgctacacctggctacaccagactcattgaccaaaccgtccctcaaggacctagtgcactctttgctgcattacaagcctatcctaggttgattgcctttaattcccagatacagctcgccatcgaccgggaacctgatgcgatgaggcgctctcagctccgtcagatagtcagtaccgcgttggtcagagcccagattgcgcaaagacgtaatctggctgcaccgattactactgctgctccagcggtacaagcctcgtcttcacagacgccacagcacagccaacaaggaactacctcgaggccgagccagatgatgagtttagcgcagatgttgaacagcgacgcagcaccttcacaaccagctgccacacccacagcccacggcggcccgcctcctatcgtggcgcacggcactaccttccctcccattctaccacagccacaagcgggtcagtctcaagcgcagcctggacactcgcagaccaccccagtcgtgcgcctgcccccgacacatagccaggaccaagagcacggcctaacgcaaatgcaaatgcaaatgcaagcacccgccgggccaccgtcccatcctatcgccatgacggacacgagcccggcgaggatcttcaagctgcaattcgacgcacggcagatcatctgctgcagccaggtcagcaccataatagggtgggacttctgcaacggtgaccccgagctggaagaagcctcgcggttctttggtaccatagagtag

SEQ ID NO: 14569 - protein, 292 aa, Muscodor strobelii
  misc_feature: SGI Peptide ID NO. 564803
  misc_feature (50)..(292): NCBI GI: 39963039 Blast Desc: MGG_09696 [Magnaporthe grisea 70-15] gi|145015524|gb|EDK00061.1| MGG_09696 [Magnaporthe grisea 70-15]
  misc_feature (2)..(292): NCBI GI: 256735634 Blast Desc: NECHADRAFT_31774 [Nectria haematococca mpVI 77-13-4]
  misc_feature (50)..(292): NCBI GI: 116204523 Blast Desc: CHGG_10145 [Chaetomium globosum CBS 148.51] gi|88176273|gb|EAQ83741.1| CHGG_10145 [Chaetomium globosum CBS 148.51]
  misc_feature (236)..(292): NCBI GI: 261354325 Blast Desc: F-box/WD repeat-containing protein 1A [Verticillium albo-atrum VaMs.102]
  misc_feature (239)..(292): NCBI GI: 164425726 Blast Desc: NCU04540 [Neurospora crassa OR74A] gi|157071039|gb|EAA26744.2| conserved [Neurospora crassa OR74A]
  misc_feature (246)..(292): NCBI GI: 171679777 Blast Desc: protein product [Podospora anserina] gi|170939514|emb|CAP64742.1| protein product [Podospora anserina]
  misc_feature (239)..(292): NCBI GI: 51039030 Blast Desc: F-box/WD-40 repeat-containing protein [Neurospora crassa]
  misc_feature (233)..(292): NCBI GI: 154303287 Blast Desc: BC1G_09392 [Botryotinia fuckeliana B05.10] gi|150854955|gb|EDN30147.1| BC1G_09392 [Botryotinia fuckeliana B05.10]
  misc_feature (248)..(292): NCBI GI: 156053746 Blast Desc: SS1G_05720 [Sclerotinia sclerotiorum 1980] gi|154703501|gb|EDO03240.1| SS1G_05720 [Sclerotinia sclerotiorum 1980]
  misc_feature (248)..(288): NCBI GI: 226290100 Blast Desc: WD repeat-containing protein [Paracoccidioides brasiliensis Pb18]
MGNPPPPPQPASAPPALQRPPPPQPTDEHHSTPSATAPHTLHATPGYTRLIDQTVPQGPSALFAALQAYPRLIAFNSQIQLAIDREPDAMRRSQLRQIVSTALVRAQIAQRRNLAAPITTAAPAVQASSSQTPQHSQQGTTSRPSQMMSLAQMLNSDAAPSQPAATPTAHGGPPPIVAHGTTFPPILPQPQAGQSQAQPGHSQTTPVVRLPPTHSQDQEHGLTQMQMQMQAPAGPPSHPIAMTDTSPARIFKLQFDARQIICCSQVSTIIGWDFCNGDPELEEASRFFGTIE

SEQ ID NO: 14570 - DNA, 4963 bp, Muscodor strobelii; identical to SEQ ID NO: 14567
  misc_feature: SGI EST ID NO. CUFF.34691.0
  misc_feature: Variant of the nucleotide sequence at SEQ ID NO 14568

SEQ ID NO: 14571 - DNA, 645 bp, Muscodor strobelii
  misc_feature: SGI cDNA ID NO. 564804
  misc_feature: Encodes the peptide sequence at SEQ ID NO 14572
atgaaccgcctcttcggcagcaagcccacggggcccaagccgacgctcaacagcgccatctccaacatcgacacgcgcatctccaccgtcgacgtcaagatcgcctccataaacgccgagctccaaacctaccagaccaaaatctccaaaatgcgcgacggcccgggcaagacggcgctgaagcaaaaggccctcaaggtcctccagcggcgcaagcagtacgagtcccagcgcgaccagcttcagagccaggtctggaacatggagcaggcccagaccatgcaggacaacctctccggtgttatgaccaccgtcgacgccatgaagacgacgcagaaggagctcaagaaacagtacggcaaggtcgacctggacaagatcgagcgcatgcaggatgagatggccgatctgctcgatgtcggcaacgagatccaggagacgctgagccgtggctacgaggtccccgacgacgtcgacgaggccgagctcgatgccgagctcgaaatgctcggcgccgagatggagttcgaaggcgcaagtgccatggatgctggtggtgttccggatttcatgaaagatgaggtgcccgactttatcgacgagcccccggagtcgagctccaaggtccaggaggcggcgaggtga

SEQ ID NO: 14572 - protein, 214 aa, Muscodor strobelii
  misc_feature: SGI Peptide ID NO. 564804
  misc_feature (11)..(203): Pfam Id: PF03357 Pfam Desc: Snf7
  misc_feature (1)..(213): NCBI GI: 116204525 Blast Desc: CHGG_10146 [Chaetomium globosum CBS 148.51] gi|88176274|gb|EAQ83742.1| CHGG_10146 [Chaetomium globosum CBS 148.51]
  misc_feature (1)..(213): NCBI GI: 85077163 Blast Desc: NCU04541 [Neurospora crassa OR74A] gi|28917019|gb|EAA26745.1| NCU04541 [Neurospora crassa OR74A]
  misc_feature (1)..(213): NCBI GI: 261354326 Blast Desc: charged multivesicular body protein [Verticillium albo-atrum VaMs.102]
  misc_feature (1)..(213): NCBI GI: 171679779 Blast Desc: protein product [Podospora anserina] gi|170939515|emb|CAP64743.1| protein product [Podospora anserina]
  misc_feature (1)..(213): NCBI GI: 255947874 Blast Desc: Pc22g06760 [Penicillium chrysogenum Wisconsin 54-1255] gi|211591721|emb|CAP97964.1| Pc22g06760 [Penicillium chrysogenum Wisconsin 54-1255]
  misc_feature (1)..(213): NCBI GI: 70993762 Blast Desc: SNF7 family protein (Cta1) [Aspergillus fumigatus Af293] gi|66849362|gb|EAL89690.1| SNF7 family protein (Cta1), [Aspergillus fumigatus Af293] gi|159125352|gb|EDP50469.1| SNF7
  misc_feature (1)..(213): NCBI GI: 189190834 Blast Desc: charged multivesicular body protein 5 [Pyrenophora tritici-repentis Pt-1C-BFP] gi|187973362|gb|EDU40861.1| charged multivesicular body protein 5 [Pyrenophora tritici-repentis
  misc_feature (1)..(213): NCBI GI: 212542189 Blast Desc: SNF7 family protein (Cta1), [Penicillium marneffei ATCC 18224] gi|210066156|gb|EEA20249.1| SNF7 family protein (Cta1), [Penicillium marneffei ATCC 18224]
  misc_feature (1)..(213): NCBI GI: 119500294 Blast Desc: SNF7 family protein (Cta1), [Neosartorya fischeri NRRL 181] gi|119415069|gb|EAW25007.1| SNF7 family protein (Cta1), [Neosartorya fischeri NRRL 181]
  misc_feature (1)..(213): NCBI GI: 242769531 Blast Desc: SNF7 family protein (Cta1), [Talaromyces stipitatus ATCC 10500] gi|218724980|gb|EED24397.1| SNF7 family protein (Cta1), [Talaromyces stipitatus ATCC 10500]
MNRLFGSKPTGPKPTLNSAISNIDTRISTVDVKIASINAELQTYQTKISKMRDGPGKTALKQKALKVLQRRKQYESQRDQLQSQVWNMEQAQTMQDNLSGVMTTVDAMKTTQKELKKQYGKVDLDKIERMQDEMADLLDVGNEIQETLSRGYEVPDDVDEAELDAELEMLGAEMEFEGASAMDAGGVPDFMKDEVPDFIDEPPESSSKVQEAAR

SEQ ID NO: 14573 - DNA, 1557 bp, Muscodor strobelii
  misc_feature: SGI cDNA ID NO. 564805
  misc_feature: Reduced expression when VOC is produced
  misc_feature: Encodes the peptide sequence at SEQ ID NO 14574
atgtgggccacgaggtgctgctggcacgcgcagagacgcggtaaggtgacgtcacttgaacaaaacgaacagccacgaagctaccgctctcacaatgagcacgacaactacaccggtatagtcgccaaagtctcggaaaactcctttcggcggctagctggctgcagcatcaaccgcacgccatggccgacttccccctcgtcacgcactggaactcggtcgcccgccgtcgtcagacctcggttcctgacgactaattcgagctcaccctcaccgagcagcttgattgccgacgagacagcccgcgagacgaatcgcgacgaccagaaaatatacgagaagagagaacaagcgggcatcgaggaggccaccaagcaacagatcaagcgaccatggcaccggcaaggcgcagaccagcctccagtcgaggagacccatcgtaacctgaacaaatccatgaccaaaggaactctgctcaccacaccgacacgacttctgaagctgatcctgccgctccccgtcgatgccactcatgacgaacacggtaacaaaggtgaattccgagccatcgctcagaatgaggacatccaacctctcgcgctcttggtgcacccacaacagccgctttcctacctcgaaagactgatccaggccgaactgcctgccgtccacgataaagacggtcgcgagaagctccccagcgtgtattttctggccgaggcctccgagcgcgacgagcgtggcgagaagaaagagaaggcaagttccaacatcgcgtcatactcggggctgggacatgagggcgaagacacgccagccgagaaacaggattgggtacgctggagcagctccaccgagataggcgacttcattcgtgatgctgcgcgtggtcgcgaattcgccatctttatcgatgggcctgatgtggagattttcgtgggcgtgccgagtttcaacgatcggacacatttcatgcgatcccgcctccgtcgcatatcccgcactgtcgagcgcatgtccaaaatcaagcaggagtgcgatatgttggcgcatcgcggggcacatagactggccaaggctggttttgcagctttgtccggatggtgggcgactgtctacttcgtgaccttccataccgacgccggatgggacctcgtggagcccgtcacgtaccttgccggtctcaccaccatcatgggtggttatctttggttcttgttcatcagccgcgatctcagctatcaagctgccctgaagattactgtgtctcgacggcagaatgtgctttaccagtcccatggctttgacccacagaaatgggaagtcttagttcaggatgccaatgcgttgcgcagagagattcgaaccatagctgaggagtacgatgtggactacgacgaggcgagagatctcggcggagaggaggtgaaagaagtcttggagaaggaggaggacaagaggaatagacataaagataacgaagatgatgacacaggctctcaagagaagaagagcgagtcgaaagaggagaagaagcaagacaagaaagacgaataa

SEQ ID NO: 14574 - protein, 518 aa, Muscodor strobelii
  misc_feature: SGI Peptide ID NO. 564805
  misc_feature (383)..(456): Pfam Id: PF04678 Pfam Desc: Domain of function, DUF607
  misc_feature (89)..(496): NCBI GI: 171678257 Blast Desc: protein product [Podospora anserina] gi|170937198|emb|CAP61855.1| protein product [Podospora anserina]
  misc_feature (108)..(518): NCBI GI: 116205732 Blast Desc: CHGG_02159 [Chaetomium globosum CBS 148.51] gi|88182756|gb|EAQ90224.1| CHGG_02159 [Chaetomium globosum CBS 148.51]
  misc_feature (55)..(508): NCBI GI: 85093263 Blast Desc: NCU08166 [Neurospora crassa OR74A] gi|28921105|gb|EAA30422.1| [Neurospora crassa OR74A]
  misc_feature (107)..(513): NCBI GI: 145608044 Blast Desc: MGG_13655 [Magnaporthe grisea 70-15] gi|145015513|gb|EDK00050.1| MGG_13655 [Magnaporthe grisea 70-15]
  misc_feature (75)..(503): NCBI GI: 46137819 Blast Desc: FG10425.1 [Gibberella zeae PH-1]
  misc_feature (59)..(473): NCBI GI: 256720889 Blast Desc: NECHADRAFT_96683 [Nectria haematococca mpVI 77-13-4]
  misc_feature (98)..(473): NCBI GI: 261354340 Blast Desc: conserved [Verticillium albo-atrum VaMs.102]
  misc_feature (149)..(481): NCBI GI: 154320818 Blast Desc: BC1G_01881 [Botryotinia fuckeliana B05.10] gi|150853570|gb|EDN28762.1| BC1G_01881 [Botryotinia fuckeliana B05.10]
  misc_feature (127)..(481): NCBI GI: 242769873 Blast Desc: conserved [Talaromyces stipitatus ATCC 10500] gi|218725058|gb|EED24475.1| conserved [Talaromyces stipitatus ATCC 10500]
  misc_feature (158)..(481): NCBI GI: 156040509 Blast Desc: SS1G_12271 [Sclerotinia sclerotiorum 1980] gi|154696327|gb|EDN96065.1| SS1G_12271 [Sclerotinia sclerotiorum 1980]
  misc_feature: Useful for introducing or modulating the production of volatile compounds
MWATRCCWHAQRRGKVTSLEQNEQPRSYRSHNEHDNYTGIVAKVSENSFRRLAGCSINRTPWPTSPSSRTGTRSPAVVRPRFLTTNSSSPSPSSLIADETARETNRDDQKIYEKREQAGIEEATKQQIKRPWHRQGADQPPVEETHRNLNKSMTKGTLLTTPTRLLKLILPLPVDATHDEHGNKGEFRAIAQNEDIQPLALLVHPQQPLSYLERLIQAELPAVHDKDGREKLPSVYFLAEASERDERGEKKEKASSNIASYSGLGHEGEDTPAEKQDWVRWSSSTEIGDFIRDAARGREFAIFIDGPDVEIFVGVPSFNDRTHFMRSRLRRISRTVERMSKIKQECDMLAHRGAHRLAKAGFAALSGWWATVYFVTFHTDAGWDLVEPVTYLAGLTTIMGGYLWFLFISRDLSYQAALKITVSRRQNVLYQSHGFDPQKWEVLVQDANALRREIRTIAEEYDVDYDEARDLGGEEVKEVLEKEEDKRNRHKDNEDDDTGSQEKKSESKEEKKQDKKDE

SEQ ID NO: 14575 - DNA, 3420 bp, Muscodor strobelii
  misc_feature: SGI EST ID NO. CUFF.35077.0
  misc_feature: Variant of the nucleotide sequence at SEQ ID NO 14573
cttgaacaaaacgaacagccacgaagctaccgctctcacaatgagcacgacaactacaccggtatagtcgccaaagtctcggaaaactcgtgagacaatgagctatgcatttcgagcctgctctcacctgacagcggcctcaagctttcggcggctagctggctgcagcatcaaccgcacgccatggccgacttccccctcgtcacgcactggaactcggtcgcccgccgtcgtcagacctcggttcctgacgactaattcgagctcaccctcaccgagcagcttgattgccgacgagacagcccgcgagacgaatcgcgacgaccagaaaatatacgagaagagagaacaagcgggcatcgaggaggccaccaagcaacagatcaagcgaccatggcaccggcaaggcgcagaccagcctccagtcgaggagacccatcgtaacctgaacaaatccatgaccaaaggaactctgctcaccacaccgacacgacttctgaagctgatcctgccgctccccgtcgatgccactcatgacgaacacggtaacaaaggtgaattccgagccatcgctcagaatgaggacatccaacctctcgcgctcttggtgcacccacaacagccgctttcctacctcgaaagactgatccaggccgaactgcctgccgtccacgataaagacggtcgcgagaagctccccagcgtgtattttctggccgaggcctccgagcgcgacgagcgtggcgagaagaaagagaaggcaagttccaacatcgcgtcatactcggggctgggacatgagggcgaagacacgccagccgagaaacaggattgggtacgctggagcagctccaccgagataggcgacttcattcgtgatgctgcgcgtggtcgcgaattcgccatctttatcgatgggcctgatgtggagattttcgtgggcgtgccgagtttcaacgatcggacacatttcatgcgatcccgcctccgtcgcatatcccgcactgtcgagcgcatgtccaaaatcaagcaggagtgcgatatgttggcgcatcgcggggcacatagactggccaaggctggttttgcagctttgtccggatggtgggcgactgtctacttcgtgaccttccataccgacgccggatgggacctcgtggagcccgtcacgtaccttgccggtctcaccaccatcatgggtggttatctttggttcttgttcatcagccgcgatctcagctatcaagctgccctgaagattactgtgtctcgacggcagaatgtgctttaccagtcccatggctttgacccacagaaatgggaagtcttagttcaggatgccaatgcgttgcgcagagagattcgaaccatagctgaggagtacgatgtggactacgacgaggcgagagatctcggcggagaggaggtgaaagaagtcttggagaaggaggaggacaagaggaatagacataaagataacgaagatgatgacacaggctctcaagagaagaagagcgagtcgaaagaggagaagaagcaagacaagaaagacgaataaatcgagaatgatacccgatgtacaatactgtggatgcctagagttacgaatcatttcatgagctggttgtgctttggttgcacctagacccaaatctctgagagaaagagagaaatacacatcattcggagccccgaacctttggaccgaagagcttggtttctattttcaaggtaccttttttccttatcccttttgaattttccggcgaggaacacgcgctcctttctatcaactaaatatcgtcatcatgaaccatctgtggcgtagataccgctctagtcgctcagcatctggcgcaggaccttgacctgctcgagcacgcagctcttgctcgtgccgccccgggccgagcgcatttccacactgcgctcataatcgaagtactcggcaatatcacgctcgaagcgtgcgtcgatagacttcagttgctcgtaagagagctcattcataggtgtcttcgtctgctctgacatggcaacaactcgtccagagatatgatgagtctcacggaaaggcacgccctttcggacgagatagtcggcgatatctgtcgcgagcatgaaggggtccagagcggcgcgcattttctcaggggagatgtctagtgtggccagcacaccggtcgatatctggatactgtcgctgaccgtcttgacgctgtcgagcattacctcccagctctcctgtaggtccttattgtatgtgctaggcaaacccttgagcgttgtcatgaaacctgacatctggccgaagacgcggccgctcttaccgcgcagcagctcgagactatctgggttcttaaagtacactcgaagtcagttattactgttattggggtatttcagggatggatgggccactttcgagtctccacttcggattgtttccggataggggtacggcaaccgacccctaagactcaccccgtgggggaaaagactctgaatgcttaccttcttctgcggcatcaaggagctacctgtcgagtacgcatctgccaatcgcacaaaaccgaactcgcccgtactgtaaatgatcaaatcctcagcccaccgtgaaatgtgcatcatgagcatggatccccactgcagcgtctcggcgacaaagtctcggtcagccacagcgcccatggagttccagagaagtccctcgaagcccaactcctctgccatcatgtcccgatcgataccgaatgggtttccggccaaagcaccacagcccagtggactcttgttgatgcggtgtgagacctctcgcagtcgctctaaatccgcggcaaatgcgagtgcatgcgagagcatccaatggctccatcttacaggctgggcacgttgcaagtgtgtgtatcctggcatgacatgttcgacctctcgctcagcgcgatctgcgcatacttgtaggaatgtcacaaggtgagactcaattttctttagttcatcgcgcagccacatgcgcatgtcacatacaacctgctcattgcgactccgccctgtgtgtagcttgcctgcgacttccttgccaatgatttcgcctagtcggcgctcgtttgccgtgtggatgctatagttgaggttagcgatatgtattctgctatgttcgctgtcggagagatccgaaatcgctggcataaaaaacgtactcttcatcaacgcccggtacgatcttgaagctgttggcgtcccattccttcatcacagcgcagaggccattttcaatctttaggaattcatcttctgtaatcacaccacccttgcaatttgcccgggcaaaggcaatgctccctaatatgtcttgcctgtatgccgtcttgtcgatgtagatactctcgttgtatgccaccatcagagggtccagaccgc

SEQ ID NO: 14576 - DNA, 1404 bp, Muscodor strobelii
  misc_feature: SGI cDNA ID NO. 564806
  misc_feature: Reduced expression when VOC is produced
  misc_feature: Encodes the peptide sequence at SEQ ID NO 14577
atggcttccgataagaaacccgaggcgaacatgctttggggtggccgctttactggcggtctggaccctctgatggtggcatacaacgagagtatctacatcgacaagacggcatacaggcaagacatattagggagcattgcctttgcccgggcaaattgcaagggtggtgtgattacagaagatgaattcctaaagattgaaaatggcctctgcgctgtgatgaaggaatgggacgccaacagcttcaagatcgtaccgggcgttgatgaagacatccacacggcaaacgagcgccgactaggcgaaatcattggcaaggaagtcgcaggcaagctacacacagggcggagtcgcaatgagcaggttgtatgtgacatgcgcatgtggctgcgcgatgaactaaagaaaattgagtctcaccttgtgacattcctacaagtatgcgcagatcgcgctgagcgagaggtcgaacatgtcatgccaggatacacacacttgcaacgtgcccagcctgtaagatggagccattggatgctctcgcatgcactcgcatttgccgcggatttagagcgactgcgagaggtctcacaccgcatcaacaagagtccactgggctgtggtgctttggccggaaacccattcggtatcgatcgggacatgatggcagaggagttgggcttcgagggacttctctggaactccatgggcgctgtggctgaccgagactttgtcgccgagacgctgcagtggggatccatgctcatgatgcacatttcacggtgggctgaggatttgatcatttacagtacgggcgagttcggttttgtgcgattggcagatgcgtactcgacaggtagctccttgatgccgcagaagaagaacccagatagtctcgagctgctgcgcggtaagagcggccgcgtcttcggccagatgtcaggtttcatgacaacgctcaagggtttgcctagcacatacaataaggacctacaggagagctgggaggtaatgctcgacagcgtcaagacggtcagcgacagtatccagatatcgaccggtgtgctggccacactagacatctcccctgagaaaatgcgcgccgctctggaccccttcatgctcgcgacagatatcgccgactatctcgtccgaaagggcgtgcctttccgtgagactcatcatatctctggacgagttgttgccatgtcagagcagacgaagacacctatgaatgagctctcttacgagcaactgaagtctatcgacgcacgcttcgagcgtgatattgccgagtacttcgattatgagcgcagtgtggaaatgcgctcggcccggggcggcacgagcaagagctgcgtgctcgagcaggtcaaggtcctgcgccagatgctgagcgactag

SEQ ID NO: 14577 - protein, 467 aa, Muscodor strobelii
  misc_feature: SGI Peptide ID NO. 564806
  misc_feature (15)..(311): Pfam Id: PF00206 Pfam Desc: Lyase
  misc_feature (1)..(466): NCBI GI: 85093247 Blast Desc: argininosuccinate lyase [Neurospora crassa OR74A] gi|28921101|gb|EAA30418.1| argininosuccinate lyase [Neurospora crassa OR74A]
  misc_feature (8)..(465): NCBI GI: 39963199 Blast Desc: conserved [Magnaporthe grisea 70-15] gi|145015507|gb|EDK00044.1| conserved [Magnaporthe grisea 70-15]
  misc_feature (1)..(465): NCBI GI: 226289671 Blast Desc: argininosuccinate lyase [Paracoccidioides brasiliensis Pb18]
  misc_feature (1)..(465): NCBI GI: 225682292 Blast Desc: argininosuccinate lyase [Paracoccidioides brasiliensis Pb03]
  misc_feature (2)..(465): NCBI GI: 156059898 Blast Desc: SS1G_03962 [Sclerotinia sclerotiorum 1980] gi|154701748|gb|EDO01487.1| SS1G_03962 [Sclerotinia sclerotiorum 1980]
  misc_feature (1)..(465): NCBI GI: 169780552 Blast Desc: [Aspergillus oryzae RIB40] gi|238505278|ref|XP_002383868.1| argininosuccinate lyase [Aspergillus flavus NRRL3357] gi|83773480|dbj|BAE63607.1| protein
  misc_feature (9)..(465): NCBI GI: 261192045 Blast Desc: argininosuccinate lyase [Ajellomyces dermatitidis SLH14081] gi|239589746|gb|EEQ72389.1| argininosuccinate lyase [Ajellomyces dermatitidis SLH14081]
  misc_feature (1)..(465): NCBI GI: 121705064 Blast Desc: argininosuccinate lyase [Aspergillus clavatus NRRL 1] gi|119398941|gb|EAW09369.1| argininosuccinate lyase [Aspergillus clavatus NRRL 1]
  misc_feature (9)..(465): NCBI GI: 239608517 Blast Desc: argininosuccinate lyase [Ajellomyces dermatitidis ER-3]
  misc_feature (1)..(465): NCBI GI: 169624756 Blast Desc: SNOG_15639 [Phaeosphaeria nodorum SN15] gi|111055894|gb|EAT77014.1| SNOG_15639 [Phaeosphaeria nodorum SN15]
  misc_feature (1)..(465): SWISSPROT Homolog: EC 4.3.2.1 Argininosuccinate lyase
  misc_feature: Useful for introducing or modulating the production of volatile compounds
MASDKKPEANMLWGGRFTGGLDPLMVAYNESIYIDKTAYRQDILGSIAFARANCKGGVITEDEFLKIENGLCAVMKEWDANSFKIVPGVDEDIHTANERRLGEIIGKEVAGKLHTGRSRNEQVVCDMRMWLRDELKKIESHLVTFLQVCADRAEREVEHVMPGYTHLQRAQPVRWSHWMLSHALAFAADLERLREVSHRINKSPLGCGALAGNPFGIDRDMMAEELGFEGLLWNSMGAVADRDFVAETLQWGSMLMMHISRWAEDLIIYSTGEFGFVRLADAYSTGSSLMPQKKNPDSLELLRGKSGRVFGQMSGFMTTLKGLPSTYNKDLQESWEVMLDSVKTVSDSIQISTGVLATLDISPEKMRAALDPFMLATDIADYLVRKGVPFRETHHISGRVVAMSEQTKTPMNELSYEQLKSIDARFERDIAEYFDYERSVEMRSARGGTSKSCVLEQVKVLRQMLSD

SEQ ID NO: 14578 - DNA, 3438 bp, Muscodor strobelii
  misc_feature: SGI EST ID NO. CUFF.35078.1
  misc_feature: Variant of the nucleotide sequence at SEQ ID NO 14576
catcaacaaaacttaaccagatgagtcaacagataacaagcctttcggagacacaagtaaggtcatcatcgtcttcaagctgaattcaccctcacattccaatttcgacatcttcttgcaatctcaacttcggctcctcctctatcatggcttccgataagaaacccgaggcgaacatgctttggggtggccgctttactggcggtctggaccctctgatggtggcatacaacgagagtatctacatcgacaagacggcatacaggcaagacatattagggagcattgcctttgcccgggcaaattgcaagggtggtgtgattacagaagatgaattcctaaagattgaaaatggcctctgcgctgtgatgaaggaatgggacgccaacagcttcaagatcgtaccgggcgttgatgaagacatccacacggcaaacgagcgccgactaggcgaaatcattggcaaggaagtcgcaggcaagctacacacagggcggagtcgcaatgagcaggttgtatgtgacatgcgcatgtggctgcgcgatgaactaaagaaaattgagtctcaccttgtgacattcctacaagtatgcgcagatcgcgctgagcgagaggtcgaacatgtcatgccaggatacacacacttgcaacgtgcccagcctgtaagatggagccattggatgctctcgcatgcactcgcatttgccgcggatttagagcgactgcgagaggtctcacaccgcatcaacaagagtccactgggctgtggtgctttggccggaaacccattcggtatcgatcgggacatgatggcagaggagttgggcttcgagggacttctctggaactccatgggcgctgtggctgaccgagactttgtcgccgagacgctgcagtggggatccatgctcatgatgcacatttcacggtgggctgaggatttgatcatttacagtacgggcgagttcggttttgtgcgattggcagatgcgtactcgacaggtagctccttgatgccgcagaagaagaacccagatagtctcgagctgctgcgcggtaagagcggccgcgtcttcggccagatgtcaggtttcatgacaacgctcaagggtttgcctagcacatacaataaggacctacaggagagctgggaggtaatgctcgacagcgtcaagacggtcagcgacagtatccagatatcgaccggtgtgctggccacactagacatctcccctgagaaaatgcgcgccgctctggaccccttcatgctcgcgacagatatcgccgactatctcgtccgaaagggcgtgcctttccgtgagactcatcatatctctggacgagttgttgccatgtcagagcagacgaagacacctatgaatgagctctcttacgagcaactgaagtctatcgacgcacgcttcgagcgtgatattgccgagtacttcgattatgagcgcagtgtggaaatgcgctcggcccggggcggcacgagcaagagctgcgtgctcgagcaggtcaaggtcctgcgccagatgctgagcgactagagcggtatctacgccacagatggttcatgatgacgatatttagttgatagaaaggagcgcgtgttcctcgccggaaaattcaaaagggataaggaaaaaaggtaccttgaaaatagaaaccaagctcttcggtccaaaggttcggggctccgaatgatgtgtatttctctctttctctcagagatttgggtctaggtgcaaccaaagcacaaccagctcatgaaatgattcgtaactctaggcatccacagtattgtacatcgggtatcattctcgatttattcgtctttcttgtcttgcttcttctcctctttcgactcgctcttcttctcttgagagcctgtgtcatcatcttcgttatctttatgtctattcctcttgtcctcctccttctccaagacttctttcacctcctctccgccgagatctctcgcctcgtcgtagtccacatcgtactcctcagctatggttcgaatctctctgcgcaacgcattggcatcctgaactaagacttcccatttctgtgggtcaaagccatgggactggtaaagcacattctgccgtcgagacacagtaatcttcagggcagcttgatagctgagatcgcggctgatgaacaagaaccaaagataaccacccatgatggtggtgagaccggcaaggtacgtgacgggctccacgaggtcccatccggcgtcggtatggaaggtcacgaagtagacagtcgcccaccatccggacaaagctgcaaaaccagccttggccagtctatgtgccccgcgatgcgccaacatatcgcactcctgcttgattttggacatgcgctcgacagtgcgggatatgcgacggaggcgggatcgcatgaaatgtgtccgatcgttgaaactcggcacgcccacgaaaatctccacatcaggcccatcgataaagatggcgaattcgcgaccacgcgcagcatcacgaatgaagtcgcctatctcggtggagctgctccagcgtacccaatcctgtttctcggctggcgtgtcttcgccctcatgtcccagccccgagtatgacgcgatgttggaacttgccttctctttcttctcgccacgctcgtcgcgctcggaggcctcggccagaaaatacacgctggggagcttctcgcgaccgtctttatcgtggacggcaggcagttcggcctggatcagtctttcgaggtaggaaagcggctgttgtgggtgcaccaagagcgcgagaggttggatgtcctcattctgagcgatggctcggaattcacctttgttaccgtgttcgtcatgagtggcatcgacggggagcggcaggatcagcttcagaagtcgtgtcggtgtggtgagcagagttcctgggaaacattgtcagcttctgtcaagaaagttggcaaagaacctgctcacctttggtcatggatttgttcaggttacgatgggtctcctcgactggaggctggtctgcgccttgccggtgccatggtcgcttgatctgttgcttggtggcctcctcgatgcccgcttgttctctcttctcgtatattttctggtcgtcgcgattcgtctcgcgggctgtctcgtcggcaatcaagctgctcggtgagggtgagctcgaattagtcgtcaggaaccgaggtctgacgacggcgggcgaccgagttccagtgcgtgacgagggggaagtcggccatggcgtgcggttgatgctgcagccagctagccgccgaaagcttgaggccgctgtcaggtgagagcaggctcgaaatgcatagctcattgtctcacgagttttccgagactttggcgactataccggtgtagttgtcgtgctcattgtgagagcggtagcttcgtggctgttcgttttgttcaag

SEQ ID NO: 14579 - DNA, 1572 bp, Muscodor strobelii
  misc_feature: SGI cDNA ID NO. 564807
  misc_feature: Reduced expression when VOC is produced
  misc_feature: Encodes the peptide sequence at SEQ ID NO 14580
atggcaccctcacatgtttacctaccagacggccagagcttcacgatacagcctgtttttggaggcctgttcttcaagtcgaatgatctcaacactcatccaacaccttttccagctggatggagtgtatctatacataccgaagacggcgctggggataaccgaagacagccccaaatcgagaacgacgataagaaatcggacaaccgtcaagtctcgcatcgtttcaataggccaactttacaaaatgacgctctttttatctcttccatatcatacccttcgagtaatgactttaaaccccatgctagtccttctcggcaaatcgccttgatgctctacgtgtcgctctattggtactttcagcagccagaaccgtctccgcacgtgagcaccgaacggtccaagtatacaccttcaggggcaaggccgaaaggcgaatggcgaataaatatcaagcgagatggtatcttccggaccaaaaatatgattccgaaactcgagaggatgggactgattgcaagtttcgatacgtctgtgggcacgggtctctctgaaaaagatcatggctgggatcagatgtttgtgacgcggcgcatgttctggcaaatacatagtggaatatttctattcacgttgcagcctctgaagtaccagtcctcctatcctggatcgcctgtcacaagtcgtccaacttcaccagtcaggacagatttcgcaaagaaacccggatcacctccacctaacagccacatatcttcaactagtcatttgacagctgatatccctggcggaccgatattgggcactacgacaatgactccgtcgttccccatcggcccgtactactctgcatctcacttacctacgtactatcctccacctcctttgcagtacgccatgaccaataacatacggcacccccgccgccaaaagccgccgggcatgggcgagacgttttattccagatttgtacccagcgtgggtaaatacgtctctttcagggtggcgtcgctgtcaccagaccctgttccgcatttggggccggtctcaacgcatgagaaggatgagaaacacgctcgcctgtgtgctctttcggacgatacgctcatgcagatctggctatcgaacccacgcgtctcggctttctggggcgactatcacccaaatttcttatccgacgccatgaagtcacaacattctttcccagtaatcggactctgggatggggttccgtttgcgttcttcgagctttactgggtcaaagaagacccactgggacaacaaatgggaaacgatgcacaggacttcgatagaggaatacacgtttttgttggcgaagactgggcgcgtggacaggtccctgcctggctgtcaagtctaattcattattgttggcaggcagataatcgcactatgaatatctgtctggaaccaagagtggataatactagatttattgatcatctccagagcgcgggctttgcgaaagaaaggcaggtctcattcccacataagcaatcatggctctgtcggatgaggagagatgcgtgggaaggaccggcgttgtag

SEQ ID NO: 14580 - protein, 523 aa, Muscodor strobelii
  misc_feature: SGI Peptide ID NO. 564807
  misc_feature (1)..(523): NCBI GI: 171678255 Blast Desc: protein product [Podospora anserina] gi|170937197|emb|CAP61854.1| protein product [Podospora anserina]
  misc_feature (1)..(500): NCBI GI: 116205734 Blast Desc: CHGG_02160 [Chaetomium globosum CBS 148.51] gi|88182757|gb|EAQ90225.1| CHGG_02160 [Chaetomium globosum CBS 148.51]
  misc_feature (1)..(485): NCBI GI: 256720888 Blast Desc: NECHADRAFT_50302 [Nectria haematococca mpVI 77-13-4]
  misc_feature (1)..(496): NCBI GI: 85093266 Blast Desc: NCU08167 [Neurospora crassa OR74A] gi|28921106|gb|EAA30423.1| conserved [Neurospora crassa OR74A]
  misc_feature (1)..(461): NCBI GI: 46137821 Blast Desc: FG10426.1 [Gibberella zeae PH-1]
  misc_feature (3)..(523): NCBI GI: 261354339 Blast Desc: aerobactin siderophore biosynthesis protein iucB [Verticillium albo-atrum VaMs.102]
  misc_feature (1)..(523): NCBI GI: 169606652 Blast Desc: SNOG_06373 [Phaeosphaeria nodorum SN15] gi|111065084|gb|EAT86204.1| SNOG_06373 [Phaeosphaeria nodorum SN15]
  misc_feature (1)..(523): NCBI GI: 189191152 Blast Desc: aerobactin siderophore biosynthesis protein iucB [Pyrenophora tritici-repentis Pt-1C-BFP] gi|187973521|gb|EDU41020.1| aerobactin siderophore biosynthesis
  misc_feature (8)..(523): NCBI GI: 121702955 Blast Desc: siderophore biosynthesis protein, [Aspergillus clavatus NRRL 1] gi|119397885|gb|EAW08316.1| siderophore biosynthesis protein, [Aspergillus clavatus NRRL 1]
  misc_feature (1)..(523): NCBI GI: 238486372 Blast Desc: siderophore biosynthesis protein, [Aspergillus flavus NRRL3357] gi|220699303|gb|EED55642.1| siderophore biosynthesis protein, [Aspergillus flavus NRRL3357]
  misc_feature: Useful for introducing or modulating the production of volatile compounds
MAPSHVYLPDGQSFTIQPVFGGLFFKSNDLNTHPTPFPAGWSVSIHTEDGAGDNRRQPQIENDDKKSDNRQVSHRFNRPTLQNDALFISSISYPSSNDFKPHASPSRQIALMLYVSLYWYFQQPEPSPHVSTERSKYTPSGARPKGEWRINIKRDGIFRTKNMIPKLERMGLIASFDTSVGTGLSEKDHGWDQMFVTRRMFWQIHSGIFLFTLQPLKYQSSYPGSPVTSRPTSPVRTDFAKKPGSPPPNSHISSTSHLTADIPGGPILGTTTMTPSFPIGPYYSASHLPTYYPPPPLQYAMTNNIRHPRRQKPPGMGETFYSRFVPSVGKYVSFRVASLSPDPVPHLGPVSTHEKDEKHARLCALSDDTLMQIWLSNPRVSAFWGDYHPNFLSDAMKSQHSFPVIGLWDGVPFAFFELYWVKEDPLGQQMGNDAQDFDRGIHVFVGEDWARGQVPAWLSSLIHYCWQADNRTMNICLEPRVDNTRFIDHLQSAGFAKERQVSFPHKQSWLCRMRRDAWEGPAL

SEQ ID NO: 14581 - DNA, 3341 bp, Muscodor strobelii
  misc_feature: SGI EST ID NO. CUFF.35132.2
  misc_feature: Variant of the nucleotide sequence at SEQ ID NO 14579
atggaagatctttggatcaaaatagccggacataatatgccgtcttaatctctctctcctctttctgcatcctgaatatctgcacatactgcttggttcatgtacatatcagaagaccctacgacgtgaagtaaatatggagacaatgttaccggctatggtaagagtcgatagagccagccctagagctaccccatctccccactaaacgtacgatccacatagtatgacgttgaggccttgtccctagtgctgttcggggatatcgtgatatcagacggtgagtatattgaaaggcgactaaattggaggcattcctgtcgcagtctggtctcttctcgcttgttttggtaccgttcacgtcttgtcccgatttctgtcgaagtcactccagagcccgctgtaggtatccatcctgaatgccgagcatcttgctctattcttcaccactgatagcgtctcttctcaatgatagacacgtactatctatttctagttcattaaacattacaattatcttgaacggagtcgagtgcttacgagccacgacctactcagtctggggagcagagtattcaaagaagcgtgaaaggcgccaaagaaagcatggcaccctcacatgtttacctaccagacggccagagcttcacgatacagcctgtttttggaggcctgttcttcaagtcgaatgatctcaacactcatccaacaccttttccagctggatggagtgtatctatacataccgaagacggcgctggggataaccgaagacagccccaaatcgagaacgacgataagaaatcggacaaccgtcaagtctcgcatcgtttcaataggccaactttacaaaatgacgctctttttatctcttccatatcatacccttcgagtaatgactttaaaccccatgctagtccttctcggcaaatcgccttgatgctctacgtgtcgctctattggtactttcagcagccagaaccgtctccgcacgtgagcaccgaacggtccaagtatacaccttcaggggcaaggccgaaaggcgaatggcgaataaatatcaagcgagatggtatcttccggaccaaaaatatgattccgaaactcgagaggatgggactgattgcaagtttcgatacgtctgtgggcacgggtctctctgaaaaagatcatggctgggatcagatgtttgtgacgcggcgcatgttctggcaaatacatagtggaatatttctattcacgttgcagcctctgaagtaccagtcctcctatcctggatcgcctgtcacaagtcgtccaacttcaccagtcaggacagatttcgcaaagaaacccggatcacctccacctaacagccacatatcttcaactagtcatttgacagctgatatccctggcggaccgatattgggcactacgacaatgactccgtcgttccccatcggcccgtactactctgcatctcacttacctacgtactatcctccacctcctttgcagtacgccatgaccaataacatacggcacccccgccgccaaaagccgccgggcatgggcgagacgttttattccagatttgtacccagcgtgggtaaatacgtctctttcagggtggcgtcgctgtcaccagaccctgttccgcatttggggccggtctcaacgcatgagaaggatgagaaacacgctcgcctgtgtgctctttcggacgatacgctcatgcagatctggctatcgaacccacgcgtctcggctttctggggcgactatcacccaaatttcttatccgacgccatgaagtcacaacattctttcccagtaatcggactctgggatggggttccgtttgcgttcttcgagctttactgggtcaaagaagacccactgggacaacaaatgggaaacgatgcacaggacttcgatagaggaatacacgtttttgttggcgaagactgggcgcgtggacaggtccctgcctggctgtcaagtctaattcattattgttggcaggcagataatcgcactatgaatatctgtctggaaccaagagtggataatactagatttattgatcatctccagagcgcgggctttgcgaaagaaaggcaggtctcattcccacataagcaatcatggctctgtcggatgaggagagatgcgtgggaaggaccggcgttgtagaaagcgataagaatcattcaaaagacttcattcatcatcacactacagaaccaaacccagaatgattctggagggccagagtccaggaagagggagtgactgttcgtattggtactggcaacatcctttctaatgcgagatagggcgtctcatgtaattacttaagtcacaatgtcaaatgaataaaggttcgtataatttgcaattctgtacgtcgaaccagacctgcgatacatacggtgtcccaatgagattgaatgaaacggcaaacactacggtatcatgataaagcctttacatagtcttcgaacttatccgacttcgcggcagacaaatcggcagcgaatgcgccatgaacagtatgcttattgatactcgaagcgttgtttgcaggctgcgagggcgccgtggttgcagatgcatacgcgaatttagcggcagtgttatttgggctcagcgaagtgattgcgttattatctccagtccaactcgagcaaccagtgcagagcgttgtaagagtccagtgggttgcattcacggacgagcccttgagcactttgtacgtcgcgcctgtgtaagggacgggaggcgtatgagcgctggtcaatgttagtcgaatgttttcccattgatttacacgagaatcgattttatgagacaatacatactcggaccagcgcgatgaaacaacagtagcattgctattagcccaccctactgtcaaaggattttttgccattttccctccccatgagagcgccgcccaaccgagggtcttgggtgcaacgatctgaagtagaatgtcatatggatccttttctaccgctggaatcgcgaatcgaaaagtaatatcgccaacttgtgactcggagtaacagacagttgtcgtagtgtcgcaatactgtgacgcgctcgaaagaggtagtagcgtgagcgcgagcgcggcggtggcaaacgtgaggaaacccatcggatctgccaagagtcaattcatcggtagcagaaatttcactgctggatagctttggggcgagggcagtctatgcattttgtatgtagccttcaatatagattcaatgccatcgagatgctttctagtcgatgacaaaaaccaattatctcatttgacagtcgtcttggtttggtatattagtcaagacttg

SEQ ID NO: 14582 - DNA, 621 bp, Muscodor strobelii
  misc_feature: SGI cDNA ID NO. 564808
  misc_feature: Encodes the peptide sequence at SEQ ID NO 14583
atgggtttcctcacgtttgccaccgccgcgctcgcgctcacgctactacctctttcgagcgcgtcacagtattgcgacactacgacaactgtctgttactccgagtcacaagttggcgatattacttttcgattcgcgattccagcggtagaaaaggatccatatgacattctacttcagatcgttgcacccaagaccctcggttgggcggcgctctcatggggagggaaaatggcaaaaaatcctttgacagtagggtgggctaatagcaatgctactgttgtttcatcgcgctggtccgacgctcatacgcctcccgtcccttacacaggcgcgacgtacaaagtgctcaagggctcgtccgtgaatgcaacccactggactcttacaacgctctgcactggttgctcgagttggactggagataataacgcaatcacttcgctgagcccaaataacactgccgctaaattcgcgtatgcatctgcaaccacggcgccctcgcagcctgcaaacaacgcttcgagtatcaataagcatactgttcatggcgcattcgctgccgatttgtctgccgcgaagtcggataagttcgaagactatgtaaaggctttatcatga

SEQ ID NO: 14583 - protein, 206 aa, Muscodor strobelii
  misc_feature: SGI Peptide ID NO. 564808
  misc_feature (1)..(206): NCBI GI: 171681240 Blast Desc: protein product [Podospora anserina] gi|170940578|emb|CAP65806.1| protein product [Podospora anserina]
  misc_feature (24)..(189): NCBI GI: 169595930 Blast Desc: SNOG_00712 [Phaeosphaeria nodorum SN15] gi|111071087|gb|EAT92207.1| SNOG_00712 [Phaeosphaeria nodorum SN15]
  misc_feature (22)..(197): NCBI GI: 171683019 Blast Desc: protein product [Podospora anserina] gi|170941469|emb|CAP67120.1| protein product [Podospora anserina]
  misc_feature (23)..(204): NCBI GI: 116182928 Blast Desc: CHGG_02092 [Chaetomium globosum CBS 148.51] gi|88186389|gb|EAQ93857.1| CHGG_02092 [Chaetomium globosum CBS 148.51]
  misc_feature (1)..(205): NCBI GI: 145603194 Blast Desc: MGG_06206 [Magnaporthe grisea 70-15] gi|145011477|gb|EDJ96133.1| MGG_06206 [Magnaporthe grisea 70-15]
  misc_feature (11)..(205): NCBI GI: 85118770 Blast Desc: NCU01873 [Neurospora crassa OR74A] gi|28927314|gb|EAA36268.1| [Neurospora crassa OR74A]
  misc_feature (41)..(205): NCBI GI: 38636436 Blast Desc: related to cellobiose dehydrogenase [Neurospora crassa]
  misc_feature (20)..(203): NCBI GI: 116200335 Blast Desc: CHGG_08323 [Chaetomium globosum CBS 148.51] gi|88179602|gb|EAQ87070.1| CHGG_08323 [Chaetomium globosum CBS 148.51]
  misc_feature (33)..(204): NCBI GI: 189203559 Blast Desc: conserved [Pyrenophora tritici-repentis Pt-1C-BFP] gi|187985214|gb|EDU50702.1| conserved [Pyrenophora tritici-repentis Pt-1C-BFP]
  misc_feature (21)..(202): NCBI GI: 85110321 Blast Desc: NCU08432 [Neurospora crassa OR74A] gi|28881259|emb|CAD70518.1| related to cellobiose dehydrogenase (cdh) [Neurospora crassa] gi|28925081|gb|EAA34166.1| [Neurospora
  misc_feature (23)..(204): SWISSPROT Homolog: EC 1.1.99.18 Cellobiose dehydrogenase (acceptor)
MGFLTFATAALALTLLPLSSASQYCDTTTTVCYSESQVGDITFRFAIPAVEKDPYDILLQIVAPKTLGWAALSWGGKMAKNPLTVGWANSNATVVSSRWSDAHTPPVPYTGATYKVLKGSSVNATHWTLTTLCTGCSSWTGDNNAITSLSPNNTAAKFAYASATTAPSQPANNASSINKHTVHGAFAADLSAAKSDKFEDYVKALS

SEQ ID NO: 14584 - DNA, 3454 bp, Muscodor strobelii
  misc_feature: SGI EST ID NO. CUFF.35133.0
  misc_feature: Variant of the nucleotide sequence at SEQ ID NO 14582
caagtcttgactaatataccaaaccaagacgactgtcaaatgagataattggtttttgtcatcgactagaaagcatctcgatggcattgaatctatattgaaggctacatacaaaatgcatagactgccctcgccccaaagctatccagcagtgaaatttctgctaccgatgaattgactcttggcagatccgatgggtttcctcacgtttgccaccgccgcgctcgcgctcacgctactacctctttcgagcgcgtcacagtattgcgacactacgacaactgtctgttactccgagtcacaagttggcgatattacttttcgattcgcgattccagcggtagaaaaggatccatatgacattctacttcagatcgttgcacccaagaccctcggttgggcggcgctctcatggggagggaaaatggcaaaaaatcctttgacagtagggtgggctaatagcaatgctactgttgtttcatcgcgctggtccgacgctcatacgcctcccgtcccttacacaggcgcgacgtacaaagtgctcaagggctcgtccgtgaatgcaacccactggactcttacaacgctctgcactggttgctcgagttggactggagataataacgcaatcacttcgctgagcccaaataacactgccgctaaattcgcgtatgcatctgcaaccacggcgccctcgcagcctgcaaacaacgcttcgagtatcaataagcatactgttcatggcgcattcgctgccgatttgtctgccgcgaagtcggataagttcgaagactatgtaaaggctttatcatgataccgtagtgtttgccgtttcattcaatctcattgggacaccgtatgtatcgcaggtctggttcgacgtacagaattgcaaattatacgaacctttattcatttgacattgtgacttaagtaattacatgagacgccctatctcgcattagaaaggatgttgccagtaccaatacgaacagtcactccctcttcctggactctggccctccagaatcattctgggtttggttctgtagtgtgatgatgaatgaagtcttttgaatgattcttatcgctttctacaacgccggtccttcccacgcatctctcctcatccgacagagccatgattgcttatgtgggaatgagacctgcctttctttcgcaaagcccgcgctctggagatgatcaataaatctggttatttgttagtcgcgacgataattttgacagcaagggaaagtacctagtattatccactcttggttccagacagatattcatagtgcgattatctgcctgccaacaataatgaattagacttgacagccaggcagggacctgtccacgcgcccagtcttcgccaacaaaaacgtgtattcctctatcgaagtcctgtgcatcgtttcccatttgttgtcccagtgggtcttctttgacccagtaaagctcgaagaacgcaaacggaaccccatcccagagtccgattactgggaaagaatgttgtgacttcatggcgtcggataagaaatttgggtgatagtcgccccagaaagccgagacgcgtgggttcgatagccagatctgcatgagcgtatcgtccgaaagagcacacaggcgagcgtgtttctcatccttctcatgcgttgagaccggccccaaatgcggaacagggtctggtgacagcgacgccaccctgaaagagacgtatttacccacgctgggtacaaatctggaataaaacgtctcgcccatgcccggcggcttttggcggcgggggtgccgtatgttattggtcatggcgtactgcaaaggaggtggaggatagtacgtaggtaagtgagatgcagagtagtacgggccgatggggaacgacggagtcattgtcgtagtgcccaatatcggtccgccagggatatcagctgtcaaatgactagttgaagatatgtggctgttaggtggaggtgatccgggtttctttgcgaaatctgtcctgactggtgaagttggacgacttgtgacaggcgatccaggataggaggactggtacttcagaggctgcaacgtgaatagaaatattccactatgtatttgccagaacatgcgccgcgtcacaaacatctgatcccagccatgatctttttcagagagacccgtgcccacagacgtatcgaaacttgcaatcagtcccatcctctcgagtttcggaatcatatttttggtccggaagataccatctcgcttgatatttattcgccattcgcctttcggccttgcccctgaaggtgtatacttggaccgttcggtgctcacgtgcggagacggttctggctgctgaaagtaccaatagagcgacacgtagagcatcaaggcgatttgccgagaaggactagcatggggtttaaagtcattactcgaagggtatgatatggaagagataaaaagagcgtcattttgtaaagttggcctattgaaacgatgcgagacttgacggttgtccgatttcttatcgtcgttctcgatttggggctgtcttcggttatccccagcgccgtcttcggtatgtatagatacactccatccagctggaaaaggtgttggatgagtgttgagatcattcgacttgaagaacaggcctccaaaaacaggctgtatcgtgaagctctggccgtctggtaggtaaacatgtgagggtgccatgctttctttggcgcctttcacgcttctttgaatactctgctccccagactgagtaggtcgtggctcgtaagcactcgactccgttcaagataattgtaatgtttaatgaactagaaatagatagtacgtgtctatcattgagaagagacgctatcagtggtgaagaatagagcaagatgctcggcattcaggatggatacctacagcgggctctggagtgacttcgacagaaatcgggacaagacgtgaacggtaccaaaacaagcgagaagagaccagactgcgacaggaatgcctccaatttagtcgcctttcaatatactcaccgtctgatatcacgatatccccgaacagcactagggacaaggcctcaacgtcatactatgtggatcgtacgtttagtggggagatggggtagctctagggctggctctatcgactcttaccatagccggtaacattgtctccatatttacttcacgtcgtagggtcttctgatatgtacatgaaccaagcagtatgtgcagatattcaggatgcagaaagaggagagagagattaagacggcatattatgtccggctattttgatccaaagatcttccatcgcaagctctggcgcaatgccaacttcagaaaatggaatacctatatccctaatttatccctatcgtagatatcgaatcaatcgtagcaattgacgacagtataggtgcatacttgatgtcactcgatatcgc

SEQ ID NO: 14585 - DNA, 1254 bp, Muscodor strobelii
  misc_feature: SGI cDNA ID NO. 564809
  misc_feature: Encodes the peptide sequence at SEQ ID NO 14586
atggcatctaatcctgatgagcctctggtttctggccatgttcacttcgccatgcctcaaggtctcgagagcttccacctatttgccctctttccatatgatatccgtcacttgatctggcagcaagccatctttcagcccggtatccatttcctcaagttcgtcgatactgccaattcagttgtcgcgcgtcttcataatctatcctttgctggctctagatcgattgaaaaagcccaagacgcgcaaccctcaagcttctcggcgaccttagagccatttttcgcagacgaacgggcagacaaatctcactatctcgtggttcgtaaagtcctagcacagtttcgtactatttgtgaagaatctaggtcaatagtggataacttggaggctcgacctggtaacctgtttctcgacgatggccgtctaatctcgctggacaagtccttggatgttgtgtgtatcgactatccaaatcttggggatttcacacatcactccaatacagcggagacagatcacttgggcaaatggacagaccatcttcatcttggtcagctagccaagattcgccgtctggctgttcgttatcatcatgagtgggacaacaaccacctgtgcgccatatgcggccgggttcattcctcacaattctccaaacatccttatccccgacatgtttatgaatttgcagctcttttcgaaaatctcgagacattctatttcatagattcgctgattctgcggaagtcaacagcgtacgacgctagtgtcaacagtcaaagctcttcaatttcgtaccccagtgacggagagcggaggagatatttcgaagtaacacccaactcgtgtgtctcgcacacgagcgtattcgatactttgtcatggattcgcgaaagctacgtctcttactgctcactaaagaaacgaggcaccatccgtccagagtcggtagagttcaaggtcctgggttgcgagtggatgccaggtcggaggacgaccaccgtcaaacgacctcagcatttctcaacttccagtcgaggtaaacgagcacgagctagagccccgggcctccgaatcattgagcttagatcacctacaagccctgcaatcgatgctggctctagtaacagtattctccccgctatactaggcaacaaagccgtgtccacgttcaatttcgcacccgatgtctcctccgaagctcgtatgataacagactcggtatcgcataagattggtctcttggggtaa

SEQ ID NO: 14586 - protein, 417 aa, Muscodor strobelii
  misc_feature: SGI Peptide ID NO. 564809
  misc_feature (2)..(351): NCBI GI: 46109406 Blast Desc: FG01585.1 [Gibberella zeae PH-1]
  misc_feature (14)..(327): NCBI GI: 261357134 Blast Desc: conserved [Verticillium albo-atrum VaMs.102]
  misc_feature (14)..(402): NCBI GI: 256730551 Blast Desc: NECHADRAFT_30278 [Nectria haematococca mpVI 77-13-4]
MASNPDEPLVSGHVHFAMPQGLESFHLFALFPYDIRHLIWQQAIFQPGIHFLKFVDTANSVVARLHNLSFAGSRSIEKAQDAQPSSFSATLEPFFADERADKSHYLVVRKVLAQFRTICEESRSIVDNLEARPGNLFLDDGRLISLDKSLDVVCIDYPNLGDFTHHSNTAETDHLGKWTDHLHLGQLAKIRRLAVRYHHEWDNNHLCAICGRVHSSQFSKHPYPRHVYEFAALFENLETFYFIDSLILRKSTAYDASVNSQSSSISYPSDGERRRYFEVTPNSCVSHTSVFDTLSWIRESYVSYCSLKKRGTIRPESVEFKVLGCEWMPGRRTTTVKRPQHFSTSSRGKRARARAPGLRIIELRSPTSPAIDAGSSNSILPAILGNKAVSTFNFAPDVSSEARMITDSVSHKIGLLG

SEQ ID NO: 14587 - DNA, 379 bp, Muscodor strobelii
  misc_feature: SGI EST ID NO. CUFF.34688.0
  misc_feature: Variant of the nucleotide sequence at SEQ ID NO 14585
ggacaagtccttggatgttgtgtgtatcgactatccaaatcttggggatttcacacatcactccaatacagcggagacagatcacttgggcaaatggacagaccatcttcatcttggtcagctagccaagattcgccgtctggctgttcgttatcatcatgagtgggacaacaaccacctgtgcgccatatgcggccgggttcattcctcacaattctccaaacatccttatccccgacatgtttatgaatttgcagctcttttcgaaaatctcgagacattctatttcatagattcgctgattctgcggaagtcaacagcgtacgacgctagtgtcaacagtcaaagctcttcaatttcgtaccccagtgacggagag

SEQ ID NO: 14588 - DNA, 597 bp, Muscodor strobelii
  misc_feature: SGI cDNA ID NO. 564810
  misc_feature: Encodes the peptide sequence at SEQ ID NO 14589
atggtttcccagcaatcctcaactccacgcggtcgcattctagccgtatttgttgttatcatcgtcctcttcttcttcggcagttcaccgtccctgaatttcagcgagtcccgagccgccatgtcggatccagtcatttcagcgctcaaagtctcggttcgacaatcaagctcttctcctcccacgcttgttgtgggcgtcacaaacacgcacacgagtcccgtgacgctgttgaaatgggactcgccactcgacccatccgcattgaaactcggagtgctagccttcacccccgaaggaagcgaatcagcggtggaaataccaacgatcgcgattcgaagactcatgcctccaggagacgatcaattcgtcacaatcgagcctagtcatacagaagagcgcgaaattttgttggacaaccccattttcccgatggataagctgcagggcaatggcaaggtggtttgcaagggccactggagaagcgtgtggggttcaaagaaggaagaggtatcctcagaggaattgaagagcccaggaacaggccaagcattgacaggagaatttgaaagcgaacctgccgactttgaattctaa

SEQ ID NO: 14589 - protein, 198 aa, Muscodor strobelii
  misc_feature: SGI Peptide ID NO. 564810
  misc_feature (42)..(191): NCBI GI: 39943412 Blast Desc: MGG_10926 [Magnaporthe grisea 70-15] gi|149209327|ref|XP_001522038.1| MGCH7_ch7g155 [Magnaporthe grisea 70-15] gi|86196110|gb|EAQ70748.1| MGCH7_ch7g155 grisea
  misc_feature (46)..(196): NCBI GI: 256733851 Blast Desc: NECHADRAFT_77409 [Nectria haematococca mpVI 77-13-4]
  misc_feature (45)..(197): NCBI GI: 46127821 Blast Desc: FG08288.1 [Gibberella zeae PH-1]
  misc_feature (15)..(183): NCBI GI: 169614752 Blast Desc: SNOG_10523 [Phaeosphaeria nodorum SN15] gi|160702814|gb|EAT81917.2| SNOG_10523 [Phaeosphaeria nodorum SN15]
  misc_feature (23)..(180): NCBI GI: 189207959 Blast Desc: [Pyrenophora tritici-repentis Pt-1C-BFP] gi|187976406|gb|EDU43032.1| [Pyrenophora tritici-repentis Pt-1C-BFP]
  misc_feature (58)..(192): NCBI GI: 238497740 Blast Desc: conserved [Aspergillus flavus NRRL3357] gi|220693379|gb|EED49724.1| conserved [Aspergillus flavus NRRL3357]
  misc_feature (46)..(198): NCBI GI: 121708721 Blast Desc: conserved [Aspergillus clavatus NRRL 1] gi|119400374|gb|EAW10800.1| conserved [Aspergillus clavatus NRRL 1]
  misc_feature (62)..(192): NCBI GI: 85077802 Blast Desc: NCU05070 [Neurospora crassa OR74A] gi|28917103|gb|EAA26823.1| [Neurospora crassa OR74A]
  misc_feature (51)..(198): NCBI GI: 238506965 Blast Desc: conserved [Aspergillus flavus NRRL3357] gi|220689397|gb|EED45748.1| conserved [Aspergillus flavus NRRL3357]
  misc_feature (65)..(177): NCBI GI: 255930127 Blast Desc: Pc06g00070 [Penicillium chrysogenum Wisconsin 54-1255] gi|211581236|emb|CAP79000.1| Pc06g00070 [Penicillium chrysogenum Wisconsin 54-1255]
MVSQQSSTPRGRILAVFVVIIVLFFFGSSPSLNFSESRAAMSDPVISALKVSVRQSSSSPPTLVVGVTNTHTSPVTLLKWDSPLDPSALKLGVLAFTPEGSESAVEIPTIAIRRLMPPGDDQFVTIEPSHTEEREILLDNPIFPMDKLQGNGKVVCKGHWRSVWGSKKEEVSSEELKSPGTGQALTGEFESEPADFEF

SEQ ID NO: 14590 - DNA, 1522 bp, Muscodor strobelii
  misc_feature: SGI EST ID NO. CUFF.34694.0
  misc_feature: Variant of the nucleotide sequence at SEQ ID NO 14588
ctgccacttccagaataataataacagagaatagatatggattcaaaggctttgttagattgaatatcacttaggagaaggaggagaagaacaagggtttgaataaaactaaagctgtagtctcgccttcgctggtatttcaactgccatttacacttgtctttcgaactgatacttcgcgccaaactgctcggcaaagactggctatcttcaggcttcagcgggattagcacgcagtatcctgatatcgtttgcaccggtcgcacccgataaccaatggccttcttgaataggtgtggactatatctccaattcaagaagctcaaatgggtatgacgcgacatcgccaagcatcctcggtggcattcccaccttccacaacccctcaacgtcatatgtacttcctagtaggcctccgtattcaactactagagctttcaaaataagaacaattggtcgctcgtcactgcattctgcattttttgagtcaacgaaatcgtatgtggttaaatagtcgtcaaggcatccattctgaattgagacatattttccctctatttgatctcgaaaactcgagcagcacccggcactgctttataagtcacactagcatcgccatctagctttaatggtttcccagcaatcctcaactccacgcggtcgcattctagccgtatttgttgttatcatcgtcctcttcttcttcggcagttcaccgtccctgaatttcagcgagtcccgagccgccatgtcggatccagtcatttcagcgctcaaagtctcggttcgacaatcaagctcttctcctcccacgcttgttgtgggcgtcacaaacacgcacacgagtcccgtgacgctgttgaaatgggactcgccactcgacccatccgcattgaaactcggagtgctagccttcacccccgaaggaagcgaatcagcggtggaaataccaacgatcgcgattcgaagactcatgcctccaggagacgatcaattcgtcacaatcgagcctagtcatacagaagagcgcgaaattttgttggacaaccccattttcccgatggataagctgcagggcaatggcaaggtggtttgcaagggccactggagaagcgtgtggggttcaaagaaggaagaggtatcctcagaggaattgaagagcccaggaacaggccaagcattgacaggagaatttgaaagcgaacctgccgactttgaattctaaacagggttccagtgaagtccggtatatgcagggtcacttgctttgaaggctgtaattctagcaatgtcaaaaacaacagttttgcgggactggtataaaaaatctggaattatgaagtatatgtgataatcatgctcaaatcttagataccttgcaatggatctctattctggcttctcccttaaaatttgagaataacaaatcagccgcttgcgagcagtcaaatctgatgctctgagaagactaatctcgaagcttgtggcaccgctgaaaatgtcacactgtctatgctccaag

SEQ ID NO: 14591 - DNA, 1503 bp, Muscodor strobelii
  misc_feature: SGI cDNA ID NO. 564811
  misc_feature: Encodes the peptide sequence at SEQ ID NO 14592
atgttgttcacgttgatcgctatctgtttagctgccgccttggcgcttcggcttgtccaattatgtctctccccccttagagatataccaggtccatttctgactagatggagtgacatatggtatgcatggagagcacataaaggtaactttgagaggcaaaatatacagttacatagaacgtatggtaccattgttcgatacggacccaagcgctatagcatcagcgaccccgaagctgtaaacacaatttacgggcacggcactcgtttcaccaagtcttcatggtactacgcctggcagcacccacaaaagcccaacttatttgcagaccgatcgatacaaaatcatgcggaaactaggagacaactacagagcacctacacaatgacttcactagtctcgtacgagccttacgttaataaatgttctgacgtcttctcacaacgattgtccgagatggctgctgcgggaacatcggtggacatcggtcattggcttcagtgctatgcattcgatgtaatcggcgagattaccttcggtaaacggttcggatttctagaccaaggtattgacatcgaaggtctcatgtctgcaatcgaggcgtcactggcatatgcttcagtgctcggaatatatcctcggcttcatccactaggcttcaaaatattcaactacatggcgggaagcaaaggcgccggacgggcttatgtcgaggcctttgctcgcaccatggttgccgagcatgaacagaatagagaagtgtcgccaacagtgagcagtgcaacacttgcagagccattcgtgtcaaagtttctcaccagacatgaggaaactcctgataaattctcgaagctcaatattgtggcaggctgcacgtctaatgtggccgccggttctgatacaacaggcgttagcctctcggctattctctactatttgttgaaatacccacaacacctagaaacattgcatagagaaatcgcggaatttcaaaagcagggagcactatcggaatcattcgacttcaaacagactcaagagatgccatttctccaagcagtcattaaagaagcgcttcgaatgcacccggctaccggatttcccctggaacgagaggttcctcagggtggtgccactatccttggcaaattcttccctgccggcacaatcgtcggtattaattcgtgggtgttgcatagagataaggcagtcttcggagaagacgtagatgacttcaatcccgagagatggcttaccaatgacaaggataaattagcagcaatgaatcgtcaatggataccattcgggatgggggcacgtacttgtattggccgccatatatctactcttgagattagcaaactcattccacgcattatccgagacttccacttcgaactctcagacgaagtcacgggaccggaaaactcgtggtcaactcggaaccattggttcgtaaagcctgtaggattcaaagtcagggtatcgcgacggaagtaa

SEQ ID NO: 14592 - protein, 500 aa, Muscodor strobelii
  misc_feature: SGI Peptide ID NO. 564811
  misc_feature (30)..(496): Pfam Id: PF00067 Pfam Desc: Cytochrome P450
  misc_feature (268)..(496): Pfam Id: PF00067 Pfam Desc: Cytochrome P450
  misc_feature (130)..(194): Pfam Id: PF00067 Pfam Desc: Cytochrome P450
  misc_feature (4)..(500): NCBI GI: 46114836 Blast Desc: FG03260.1 [Gibberella zeae PH-1]
  misc_feature (1)..(500): NCBI GI: 189196883 Blast Desc: pisatin demethylase [Pyrenophora tritici-repentis Pt-1C-BFP] gi|187980727|gb|EDU47353.1| pisatin demethylase [Pyrenophora tritici-repentis Pt-1C-BFP]
  misc_feature (2)..(496): NCBI GI: 256733362 Blast Desc: NECHADRAFT_36590 [Nectria haematococca mpVI 77-13-4]
  misc_feature (17)..(500): NCBI GI: 256729810 Blast Desc: NECHADRAFT_95420 [Nectria haematococca mpVI 77-13-4]
  misc_feature (5)..(500): NCBI GI: 256725852 Blast Desc: NECHADRAFT_43561 [Nectria haematococca mpVI 77-13-4]
  misc_feature (13)..(499): NCBI GI: 169778009 Blast Desc: [Aspergillus oryzae RIB40] gi|83772207|dbj|BAE62337.1| protein product [Aspergillus oryzae]
  misc_feature (26)..(499): NCBI GI: 119479803 Blast Desc: cytochrome P450 pisatin demethylase, [Neosartorya fischeri NRRL 181] gi|119408084|gb|EAW18033.1| cytochrome P450 pisatin demethylase, [Neosartorya fischeri NRRL 181]
  misc_feature (4)..(499): NCBI GI: 46127199 Blast Desc: FG07977.1 [Gibberella zeae PH-1]
  misc_feature (2)..(499): NCBI GI: 240111121 Blast Desc: Cytochrome P450 family protein [Coccidioides posadasii C735 delta SOWgp]
  misc_feature (2)..(499): NCBI GI: 121715089 Blast Desc: cytochrome P450 pisatin demethylase, [Aspergillus clavatus NRRL 1] gi|119403310|gb|EAW13728.1| cytochrome P450 pisatin demethylase, [Aspergillus clavatus NRRL 1]
  misc_feature (26)..(500): SWISSPROT Homolog: EC 1.14.13.12 Benzoate 4-monooxygenase
MLFTLIAICLAAALALRLVQLCLSPLRDIPGPFLTRWSDIWYAWRAHKGNFERQNIQLHRTYGTIVRYGPKRYSISDPEAVNTIYGHGTRFTKSSWYYAWQHPQKPNLFADRSIQNHAETRRQLQSTYTMTSLVSYEPYVNKCSDVFSQRLSEMAAAGTSVDIGHWLQCYAFDVIGEITFGKRFGFLDQGIDIEGLMSAIEASLAYASVLGIYPRLHPLGFKIFNYMAGSKGAGRAYVEAFARTMVAEHEQNREVSPTVSSATLAEPFVSKFLTRHEETPDKFSKLNIVAGCTSNVAAGSDTTGVSLSAILYYLLKYPQHLETLHREIAEFQKQGALSESFDFKQTQEMPFLQAVIKEALRMHPATGFPLEREVPQGGATILGKFFPAGTIVGINSWVLHRDKAVFGEDVDDFNPERWLTNDKDKLAAMNRQWIPFGMGARTCIGRHISTLEISKLIPRIIRDFHFELSDEVTGPENSWSTRNHWFVKPVGFKVRVSRRK

SEQ ID NO: 14593 - DNA, 2907 bp, Muscodor strobelii
  misc_feature: SGI EST ID NO. CUFF.34758.0
  misc_feature: Variant of the nucleotide sequence at SEQ ID NO 14591
tgacagtcaaagacttactaaaaagtgccattatcttgtttcactcgctctcgtgtgagatcctgacgaagttgtgttatcaattgcatttggagatcttctacctgaacgctggaaacgccagaacactcctacatatgttgttcacgttgatcgctatctgtttagctgccgccttggcgcttcggcttgtccaattatgtctctccccccttagagatataccaggtccatttctgactagatggagtgacatatggtatgcatggagagcacataaaggtaactttgagaggcaaaatatacagttacatagaacgtatggtaccattgttcgatacggacccaagcgctatagcatcagcgaccccgaagctgtaaacacaatttacgggcacggcactcgtttcaccaagtcttcatggtactacgcctggcagcacccacaaaagcccaacttatttgcagaccgatcgatacaaaatcatgcggaaactaggagacaactacagagcacctacacaatgacttcactagtctcgtacgagccttacgttaataaatgttctgacgtcttctcacaacgattgtccgagatggctgctgcgggaacatcggtggacatcggtcattggcttcagtgctatgcattcgatgtaatcggcgagattaccttcggtaaacggttcggatttctagaccaaggtattgacatcgaaggtctcatgtctgcaatcgaggcgtcactggcatatgcttcagtgctcggaatatatcctcggcttcatccactaggcttcaaaatattcaactacatggcgggaagcaaaggcgccggacgggcttatgtcgaggcctttgctcgcaccatggttgccgagcatgaacagaatagagaagtgtcgccaacagtgagcagtgcaacacttgcagagccattcgtgtcaaagtttctcaccagacatgaggaaactcctgataaattctcgaagctcaatattgtggcaggctgcacgtctaatgtggccgccggttctgatacaacaggcgttagcctctcggctattctctactatttgttgaaatacccacaacacctagaaacattgcatagagaaatcgcggaatttcaaaagcagggagcactatcggaatcattcgacttcaaacagactcaagagatgccatttctccaagcagtcattaaagaagcgcttcgaatgcacccggctaccggatttcccctggaacgagaggttcctcagggtggtgccactatccttggcaaattcttccctgccggcacaatcgtcggtattaattcgtgggtgttgcatagagataaggcagtcttcggagaagacgtagatgacttcaatcccgagagatggcttaccaatgacaaggataaattagcagcaatgaatcgtcaatggataccattcgggatgggggcacgtacttgtattggccgccatatatctactcttgagattagcaaactcattccacgcattatccgagacttccacttcgaactctcagacgaagtcacgggaccggaaaactcgtggtcaactcggaaccattggttcgtaaagcctgtaggattcaaagtcagggtatcgcgacggaagtaatagatggttaggggcttgcatatcaaattagaatcaggctcacccttggacgacattattcaaaatttggggttgtttcataatatcacgtgataaaaattcccataaaaacttcaatcatctaacgtacctaacgttcaatgaggcccgttcaaattagtctccgtcggccttgcaaatcacacagccattcaatgcggtatcttgaaggaaattacataaaatctctttgttgtgatatatggtgttaatattacgtcttgggtaagggacgcagcacggtatgtacctgtatacaggataggtagaatcagagctctgaatccaactcaggcggatagtttagaagctctcggatcagggtgagctttatttcgcacctataaattctgaccctggcatgatcatcttcgtctcctaaatctccattcgaattcaaacctgtgaggctttttcgatcaccgatgtgtatgaaatctaacccttgtagtttaggggaatattggcgattttctgcctttgaaatgcgaaaggtaactggcagtaatgctcaataagtatcttgttactttctcgtggtcgcctgatgtaagagggaccggcacaaaaggataccctgggagtgctctatgagcagagccgcaagatgatgttgagtgagatgtgctctcctcagacgctccagttgtttccttctagggtttggcatccctcgtccagtcgtcgtgaggtatccaagaccctattcatgatccatcccgatctaatagcagttgtattaagagcaggagctccttggaccccgtcttcgaggattttgatgcatgacccagtagcagttgagaattcgagacagtgggatccggcttcatgcccaagtcgtaactggtcagaaattagacattttcctggcacataagaaaactgcatgcacgagaatttgctttcacatgctactcggcatttttcaaatgattctagagcgtcttcgccagtctgcgacagagcggtcttttcttcctttgagagtttggagattgcctcgcggctgtactcagttccctccgacatattgtcccactcgctgcgctcggattcaagacgcggcaaaatggaatttctaaaaatatcccggaagcggacgattgtttggttgtaacgcagccattcctggtcgagctgccacaagctttggaattctgactttatcatatggtggaaggtcaaggatgggtaacaccagttgttactactcgcccaatcgatc

SEQ ID NO: 14594 - DNA, 1320 bp, Muscodor strobelii
  misc_feature: SGI cDNA ID NO. 564812
  misc_feature: Elevated expression when VOC is produced
  misc_feature: Encodes the peptide sequence at SEQ ID NO 14595
atgcaccctgcatcaactatcaccaacatgaacaagacactgaactcagccgctgtgcctatcttgaattctcacattgatccgctggtctgccccgagtcgcctttgttgcaagatgttcttgttgtcatccggactggagcaaccgaagtgcgcgaaaagctaccggtacacttccagaccgttcttaaatgtgtgcctgattacatcatatactcggattttgaagaagacatagaagggcaccatacatttgacgtgctagatcaaactaatgacgaggtcagaaaaactgttcctgagttttggttgtacaacaagcttcgtgctggtggaagaaacggtctcgtctaccagacttcatacgggagcggggcaacgggcgcacttgacaatccgggttggaaattagataaatggaagtttcttcctatggtcgataaatcgttgcaatacaggcccaacgcaaaatggtttgtgttcgtcgagccagacacttatatgatctggcagaatatgctggattttttatcgaaactcgattcagagaaaccacaatatctaggcagattttcgtggatcggagatgtattgttcgcacatgggggatccggatttgtgctatccaaccctgccgcaaagatggcaacggaccactggaagtcaaaacaagactggtttgacaaatacaccgcgaaagagtgggcgggcgacatgattctggggaagatcatgaaggatgttggcatcgacctaatctctgcttcaccgcatacgcagggagacagcgtgtcatcgatcgattgggcgagtagtaacaactggtgttacccatccttgaccttccaccatatgataaagtcagaattccaaagcttgtggcagctcgaccaggaatggctgcgttacaaccaaacaatcgtccgcttccgggatatttttagaaattccattttgccgcgtcttgaatccgagcgcagcgagtgggacaatatgtcggagggaactgagtacagccgcgaggcaatctccaaactctcaaaggaagaaaagaccgctctgtcgcagactggcgaagacgctctagaatcatttgaaaaatgccgattacgacttgggcatgaagccggatcccactgtctcgaattctcaactgctactgggtcatgcatcaaaatcctcgaagacggggtccaaggagctcctgctcttaatacaactgctattagatcgggatggatcatgaatagggtcttggatacctcacgacgactggacgagggatgccaaaccctagaaggaaacaactggagcgtctga

SEQ ID NO: 14595 - protein, 439 aa, Muscodor strobelii
  misc_feature: SGI Peptide ID NO. 564812
  misc_feature (26)..(439): NCBI GI: 169606410 Blast Desc: SNOG_06243 [Phaeosphaeria nodorum SN15] gi|111064954|gb|EAT86074.1| SNOG_06243 [Phaeosphaeria nodorum SN15]
  misc_feature (26)..(429): NCBI GI: 169616260 Blast Desc: SNOG_11300 [Phaeosphaeria nodorum SN15] gi|111059888|gb|EAT81008.1| SNOG_11300 [Phaeosphaeria nodorum SN15]
  misc_feature (31)..(418): NCBI GI: 119492909 Blast Desc: NFIA_070030 [Neosartorya fischeri NRRL 181] gi|119411889|gb|EAW21832.1| conserved [Neosartorya fischeri NRRL 181]
  misc_feature (31)..(418): NCBI GI: 159127898 Blast Desc: conserved [Aspergillus fumigatus A1163]
  misc_feature (3)..(418): NCBI GI: 71000381 Blast Desc: conserved [Aspergillus fumigatus Af293] gi|66852522|gb|EAL92847.1| conserved [Aspergillus fumigatus Af293]
  misc_feature (31)..(418): NCBI GI: 70981442 Blast Desc: conserved [Aspergillus fumigatus Af293] gi|66843872|gb|EAL84213.1| conserved [Aspergillus fumigatus Af293]
  misc_feature (31)..(418): NCBI GI: 121704952 Blast Desc: conserved [Aspergillus clavatus NRRL 1] gi|119398885|gb|EAW09313.1| conserved [Aspergillus clavatus NRRL 1]
  misc_feature (27)..(439): NCBI GI: 115386924 Blast Desc: [Aspergillus terreus NIH2624] gi|114191001|gb|EAU32701.1| [Aspergillus terreus NIH2624]
  misc_feature (37)..(433): NCBI GI: 240110133 Blast Desc: CPC735_061650 [Coccidioides posadasii C735 delta SOWgp]
  misc_feature (31)..(418): NCBI GI: 159122724 Blast Desc: conserved [Aspergillus fumigatus A1163]
  misc_feature: Useful for introducing or modulating the production of volatile compounds
MHPASTITNMNKTLNSAAVPILNSHIDPLVCPESPLLQDVLVVIRTGATEVREKLPVHFQTVLKCVPDYIIYSDFEEDIEGHHTFDVLDQTNDEVRKTVPEFWLYNKLRAGGRNGLVYQTSYGSGATGALDNPGWKLDKWKFLPMVDKSLQYRPNAKWFVFVEPDTYMIWQNMLDFLSKLDSEKPQYLGRFSWIGDVLFAHGGSGFVLSNPAAKMATDHWKSKQDWFDKYTAKEWAGDMILGKIMKDVGIDLISASPHTQGDSVSSIDWASSNNWCYPSLTFHHMIKSEFQSLWQLDQEWLRYNQTIVRFRDIFRNSILPRLESERSEWDNMSEGTEYSREAISKLSKEEKTALSQTGEDALESFEKCRLRLGHEAGSHCLEFSTATGSCIKILEDGVQGAPALNTTAIRSGWIMNRVLDTSRRLDEGCQTLEGNNWSV

SEQ ID NO: 14596 - DNA, 3606 bp, Muscodor strobelii
  misc_feature: SGI EST ID NO. CUFF.34759.1
  misc_feature: Variant of the nucleotide sequence at SEQ ID NO 14594
tttgtgtattaggtgacaaaatattttccccatgccagttgctgcaatgatccgaaagtccatctgctcgcgcaggtctcggtctcgcgtagcccgaactatcacttctattgcgtccctatttcttttttataattttcgtcagacactgaactcagccgctgtgcctatcttgaattctcacattgatccgctggtctgccccgagtcgcctttgttgcaagatgttcttgttgtcatccggactggagcaaccgaagtgcgcgaaaagctaccggtacacttccagaccgttcttaaatgtgtgcctgattacatcatatactcggattttgaagaagacatagaagggcaccatacatttgacgtgctagatcaaactaatgacgaggtcagaaaaactgttcctgagttttggttgtacaacaagcttcgtgctggtggaagaaacggtctcgtctaccagacttcatacgggagcggggcaacgggcgcacttgacaatccgggttggaaattagataaatggaagtttcttcctatggtcgataaatcgttgcaatacaggcccaacgcaaaatggtttgtgttcgtcgagccagacacttatatgatctggcagaatatgctggattttttatcgaaactcgattcagagaaaccacaatatctaggcagattttcgtggatcggagatgtattgttcgcacatgggggatccggatttgtgctatccaaccctgccgcaaagatggcaacggaccactggaagtcaaaacaagactggtttgacaaatacaccgcgaaagagtgggcgggcgacatgattctggggaagatcatgaaggatgttggcatcgacctaatctctgcttcaccgcatacgcagggagacagcgtgtcatcgatcgattgggcgagtagtaacaactggtgttacccatccttgaccttccaccatatgataaagtcagaattccaaagcttgtggcagctcgaccaggaatggctgcgttacaaccaaacaatcgtccgcttccgggatatttttagaaattccattttgccgcgtcttgaatccgagcgcagcgagtgggacaatatgtcggagggaactgagtacagccgcgaggcaatctccaaactctcaaaggaagaaaagaccgctctgtcgcagactggcgaagacgctctagaatcatttgaaaaatgccgagtagcatgtgaaagcaaattctcgtgcatgcagttttcttatgtgccaggaaaatgtctaatttctgaccagttacgacttgggcatgaagccggatcccactgtctcgaattctcaactgctactgggtcatgcatcaaaatcctcgaagacggggtccaaggagctcctgctcttaatacaactgctattagatcgggatggatcatgaatagggtcttggatacctcacgacgactggacgagggatgccaaaccctagaaggaaacaactggagcgtctgaggagagcacatctcactcaacatcatcttgcggctctgctcatagagcactcccagggtatccttttgtgccggtccctcttacatcaggcgaccacgagaaagtaacaagatacttattgagcattactgccagttacctttcgcatttcaaaggcagaaaatcgccaatattcccctaaactacaagggttagatttcatacacatcggtgatcgaaaaagcctcacaggtttgaattcgaatggagatttaggagacgaagatgatcatgccagggtcagaatttataggtgcgaaataaagctcaccctgatccgagagcttctaaactatccgcctgagttggattcagagctctgattctacctatcctgtatacaggtacataccgtgctgcgtcccttacccaagacgtaatattaacaccatatatcacaacaaagagattttatgtaatttccttcaagataccgcattgaatggctgtgtgatttgcaaggccgacggagactaatttgaacgggcctcattgaacgttaggtacgttagatgattgaagtttttatgggaatttttatcacgtgatattatgaaacaaccccaaattttgaataatgtcgtccaagggtgagcctgattctaatttgatatgcaagcccctaaccatctattacttccgtcgcgataccctgactttgaatcctacaggctttacgaaccaatggttccgagttgaccacgagttttccggtcccgtgacttcgtctgagagttcgaagtggaagtctcggataatgcgtggaatgagtttgctaatctcaagagtagatatatggcggccaatacaagtacgtgcccccatcccgaacttgaggggaattatgcgttagtaatcatgtgctaacaagaacgaagaagtccgttgactgactggtatccattgacgattcattgctgctaatttatccttgtcattggtaagccatctctcgggattgaagtcatctacgtcttctccgaagactgccttatctctatgcaacacccacgaattaataccgacgattgtctacataacgcttagcttgggcacagtttaaagcttgtttcatacttacgccggcagggaagaatttgccaaggatagtggcaccaccctgaggaacctctcgttccaggggaaatccggtagccgggtgcattcgaagcgcttctttaatgactgcttggagaaatggcatctcttgagtctgtttgaagtcgaatgattccgatagtgctccctgcttttgaaattccgcgatttctctatgcaatgtttctaggtgttgtgggtatttcaacaaatagtagagaatagccgagaggctaacgcctgttgtatcagaaccggcggccacattagacgtgcagcctgccacaatattgagcttcgagaatttatcaggagtttcctcatgtctggtgagaaactttgacacgaatggctctgcaagtgttgcactgctcactgttggcgacacttctctattctgttcatgctcggcaaccatggtgcgagcaaaggcctcgacataagcccgtccggcgcctttgcttcccgccatgtagttgaatattttgaagcctagtggatgaagccgaggatatattccgagcactgaagcatatgccagtgacgcctcgattgcagacatgagaccttcgatgtcaataccttggtctagaaatccgaaccgtttaccgaaggtaatctcgccgattacatcgaatgcatagcactgaagccaatgaccgatgtccaccgatgttcccgcagcagccatctcggacaatcgttgtgagaagacgtcagaacatttattaacgtaaggctcgtacgagactagtgaagtcattgtgtaggtgctctgtagttgtctcctagtttccgcatgattttgtatcgatcggtctgcaaataagttgggcttttgtgggtgctgccaggcgtagtaccatgaagacttggtgaaacgagtgccgtgcccgtaaattgtgtttacagcttcggggtcgctgatgctatagcgcttgggtccgtatcgaacaatggtacctttg

SEQ ID NO: 14597 - DNA, 1335 bp, Muscodor strobelii
  misc_feature: SGI cDNA ID NO. 564813
  misc_feature: Encodes the peptide sequence at SEQ ID NO 14598
atgtcggaaatagcagctttcgctaagctaggtgagaatgacccccttttcacgaaagagttgctccaacattatgaagccgaggccgcgagggatagcgaaactatagagttccgtaaccctcagggtgttacaggtgctgtactgaatcgtatcaaaggtgtcaaattatccgacgttccacatggagagtctcagctccggtatgttatttctttcaatgatgagaggaaatacgagaaatgggcagcgggtgagaggacacatccttttagtcctgttgcagccatggccatcacgggcactggtccgttgaaaaccgaacaggaaacacgcgatatgtttaaggaaacgctagaaactttcgagacgagcgaggaagcaaagaatattgaggaattgatcaagaccaatctcgttgactgcaaggtggacaaggtctttggctttggtctaggctcgatcacttgggcgatccctgggatgccgcgccagatggattacgctattgagagagttatgcgtgagcacgctgctctcatcgtggtggcgagagcgattcaagaagtaagttcagcggaaaaggtacatattcttgtacaggatccaggctacaaggctatttgtatacaagtattgagcgaattcggtatcgatgtcatcgactgttggggcgcactgggcttcgctatgattgatgaggactcggttgtatttgcgcatcacccgagtttccccttcagagaaatcattgctgacatggcaaggccgaatatgatttgtatgaggagccaggaggaaattgataatgaaagtgcacacccctatttctcagtatggctcgacattaattccaggagatcgagaaagatgcttgagcagtaccgtctggaaaggcttcccggcgtggttagagcttttatggctaatgtgtggtattttagagaagaaagttatgtagttgagacgaaaactcaagtgagcgaggagatacagcctcctcagactcctgaggatgagaatgagcaagaaaaggaggagaacgagaaggaggagaacgagaaggaggagaacgagaaggaggagaacgaaaaggaggaggaagaaaaggaggaagaaaaggaggaggaaaaggaaaaggaaaaggaagaaaagaaagagggggagacaaacggagataaggaagaagagaagcttcaaccgaaccttcaatcttctaatggagataatgctcagcgcctgaaggacactgagagtttcgatctcgggggtctgagtaggaagcaaaaaaggcaggcaaagaagaacgcaaagaagaacgcaaagaagcagtag

SEQ ID NO: 14598 - protein, 444 aa, Muscodor strobelii
  misc_feature: SGI Peptide ID NO. 564813
MSEIAAFAKLGENDPLFTKELLQHYEAEAARDSETIEFRNPQGVTGAVLNRIKGVKLSDVPHGESQLRYVISFNDERKYEKWAAGERTHPFSPVAAMAITGTGPLKTEQETRDMFKETLETFETSEEAKNIEELIKTNLVDCKVDKVFGFGLGSITWAIPGMPRQMDYAIERVMREHAALIVVARAIQEVSSAEKVHILVQDPGYKAICIQVLSEFGIDVIDCWGALGFAMIDEDSVVFAHHPSFPFREIIADMARPNMICMRSQEEIDNESAHPYFSVWLDINSRRSRKMLEQYRLERLPGVVRAFMANVWYFREESYVVETKTQVSEEIQPPQTPEDENEQEKEENEKEENEKEENEKEENEKEEEEKEEEKEEEKEKEKEEKKEGETNGDKEEEKLQPNLQSSNGDNAQRLKDTESFDLGGLSRKQKRQAKKNAKKNAKKQ

SEQ ID NO: 14599 - DNA, 595 bp, Muscodor strobelii
  misc_feature: SGI EST ID NO. CUFF.34724.0
  misc_feature: Variant of the nucleotide sequence at SEQ ID NO 14597
gcttttatggctaatgtgtggtattttagagaagaaagttatgtagttgagacgaaaactcaagtgagcgaggagatacagcctcctcagactcctgaggatgagaatgagcaagaaaaggaggagaacgagaaggaggagaacgagaaggaggagaacgagaaggaggagaacgaaaaggaggaggaagaaaaggaggaagaaaaggaggaggaaaaggaaaaggaaaaggaagaaaagaaagagggggagacaaacggagataaggaagaagagaagcttcaaccgaaccttcaatcttctaatggagataatgctcagcgcctgaaggacactgagagtttcgatctcgggggtctgagtaggaagcaaaaaaggcaggcaaagaagaacgcaaagaagaacgcaaagaagcagtagttacagtacggagcatatgaccagcgtaagccgcttattgctagcaaatgctgttaattccattagtttgtctacgatataccgcgtagagagagactacatgtatcaagacagagctagcttctcttcgatgcaacaaagaaggtgtatattttgtacttattgaccatgtcaa

SEQ ID NO: 14600 - DNA, 2595 bp, Muscodor strobelii
  misc_feature: SGI cDNA ID NO. 564814
  misc_feature: Encodes the peptide sequence at SEQ ID NO 14601
atgcagaacaacacgaccatcctggcggtgcccttccgcaagggcacacagctgtccctgtcgtcggccatcaagcagtacatatccaccaagtatgaccaacaccccgacatgttccgccaggacctcgacgtcatcgacgccctccgacgcgacgccgtcaacgtccacgagccgcaccccagcggcctgaagaagctgcaagcctacgccgcccagctcgtctggatcgccggcaagttccccatcgatataggtgccgacttcacctggtatcccgcactcggctacaacgtcgaccggcccatcgtccacaacaacctccagttcgagcgcgcaaacatcgccttcaacctcgccgccctttattcgcagctggccacagcaagcaaccgcaccagcaccgagggcctcaaggccgccgcaagctacttcagccaggccgccggcgtcctcgcccacctcaagaacgacatcgtccccgacctgcgcaccaccccgcccgacgacatggacgccaacgccctcgagtcgctcatccagctgcagctggcccagtcccaggaatgcttctggcacaaggccgttatggacggctacaaggacgcttccatcgccaagctcgccgccaaggtctccgacttctacgacaccgccagcgaggccgccatgcaatctgacgccatcagcagctcctggatccaccacatgagcgccaagcatcaccactttgccgccgctgcccagtaccgtgccgcccgcgaatgtctcgagaagaggaagtacggcgaggaggtcgcccgcctgcgcgacgccctggcttgcgtggcagagggcatgaaggagaccaagggcggctatctcaacaaggccgttgtcgaggatttaaacagcttgaagaggagggtggaagaggacctgaagcgagccgagcgagacaacgatgtcatctatctaaatcccgtgacccccaaatccgaactcaaaatcctcgacagggccaccatggcatccgcaaaaacacctccgcaagttgccaagcctttggagtacatcggcgacaaaggcgagttcggccccgcgctcttcaccaagctggtcccctactctgtgcacttggccgtatccatatacgaggagcgtagagaccggctagtcaaccagagcataataacagaactcgagacgttaaacgagagaatccacgagcttctgtcttcgctcaacctgccaggctcaatacaggcatttgagaaacccctaggtctacctggcacactggtccaacatgccgaagagatccgccaggcagacgccctgaaccggttgcataggagtttcgccgatatcgagaagctccgagccacggatatggccatgttcgaggaaggcaggggctacctactcaccgaggaagaagaagacatgcgcctacggtccaaatttggcactgatcggtggaccaggccggacggtcgctctgagccaaaccaaggcgcaaagctgtggactcaagctggtgaggccgagggatggttcgcaaatagcgcaagtagtgatgcggtggtacgagacaaatttcataaggttgaaccgatgattgcggttctcacgggcccggacagagcgattatggacttcgttccttcctctagacgtaccgaagtcccggactctctgaggccagctatcggacggctgcgaagcgtctacaatgacttgacccgtctcgaaagccgccgtacgcgcaaggccgaggcactgcgagagaaggcccggagcgacgacattaagtctgatatccttctcgaagcagctcgattagaacgcaatcaggcagtagccaccgctattgtgccagcacatttcgaagacttcttcgagaaacgattggactcgctgtacgagcctgacatggagatggtgcagaaagagggcgccgatcaggaaaaactactatccgacctagtgcgcgcgaatcgcgactttgaaagccagaagaaggttgcaggtgacaagggaactcgtgagagggaacaagccttacagaagctcgaaaatgcatactataagtataaagagctcacgagcaacgtcgaggtcgggcgaaagttctacaatgatctcagtcgcatcgtgggtaacttccgcgatagcgctaggacgtttcttaccgagcggagaagagaggcacatatgcttgaggacgaattcagtatgccccctctcaacagcttgtctcttggacaacagcaacaacaacagagtcatgcgcagccaccgccatctgccgcatcctggaataacacgcctacgtaccaatctccgccgcaacacccaagacactcgtatggtggtcagccgccagctcctcaactgccacggcagcaggtccagagtcctgctgaagcacagattcaatcctgggcgccgcctgccgagcccgttgctccccagccgcaacagccagctgcgaacatttggagccagaatatgcccatcaagttctcaggtcccgctggtgggaaccctccgccacaggctaagacgccgtctggtacttgggacccgactagcgggatacggttcggctag

SEQ ID NO: 14601 - protein, 864 aa, Muscodor strobelii
  misc_feature: SGI Peptide ID NO. 564814
  misc_feature (6)..(390): Pfam Id: PF03097 Pfam Desc: BRO1-like domain
  misc_feature (2)..(864): NCBI GI: 171678773 Blast Desc: protein product [Podospora anserina] gi|170937456|emb|CAP62114.1| protein product [Podospora anserina]
  misc_feature (8)..(864): NCBI GI: 39974041 Blast Desc: MGG_00833 [Magnaporthe grisea 70-15] gi|73921578|sp|Q51NJ3.1|PALA_MAGGR RecName: Full=pH-response regulator protein palA/RIM20 gi|145018227|gb|EDK02506.1| grisea
  misc_feature (5)..(864): NCBI GI: 46109642 Blast Desc: FG01703.1 [Gibberella zeae PH-1]
  misc_feature (3)..(864): NCBI GI: 85094339 Blast Desc: pH-response regulator protein palA/RIM20 [Neurospora crassa OR74A] gi|73921579|sp|Q7S532.1|PALA_NEUCR RecName: Full=pH-response regulator protein palA/rim-20 pH-response crassa
  misc_feature (5)..(864): NCBI GI: 116206034 Blast Desc: CHGG_02310 [Chaetomium globosum CBS 148.51] gi|88182907|gb|EAQ90375.1| CHGG_02310 [Chaetomium globosum CBS 148.51]
  misc_feature (5)..(864): NCBI GI: 156043845 Blast Desc: SS1G_10926 [Sclerotinia sclerotiorum 1980] gi|154695313|gb|EDN95051.1| SS1G_10926 [Sclerotinia sclerotiorum 1980]
  misc_feature (5)..(864): NCBI GI: 154297753 Blast Desc: BC1G_12288 [Botryotinia fuckeliana B05.10] gi|150858417|gb|EDN33609.1| BC1G_12288 [Botryotinia fuckeliana B05.10]
  misc_feature (5)..(864): NCBI GI: 67528306 Blast Desc: AN4351.2 [Aspergillus nidulans FGSC A4] gi|68052397|sp|P79020.3|PALA_EMENI RecName: Full=pH-response regulator protein palA/RIM20 gi|32436411|emb|CAB05920.3| PalA A4]
  misc_feature (1)..(864): NCBI GI: 261357119 Blast Desc: pH-response regulator protein palA/rim-20 [Verticillium albo-atrum VaMs.102]
  misc_feature (4)..(864): NCBI GI: 119501242 Blast Desc: pH signal transduction protein PalA, [Neosartorya fischeri NRRL 181] gi|119415543|gb|EAW25481.1| pH signal transduction protein PalA, [Neosartorya fischeri NRRL 181]
  misc_feature (12)..(731): SWISSPROT Homolog: EC 3.1.3.48 Protein-tyrosine-phosphatase
MQNNTTILAVPFRKGTQLSLSSAIKQYISTKYDQHPDMFRQDLDVIDALRRDAVNVHEPHPSGLKKLQAYAAQLVWIAGKFPIDIGADFTWYPALGYNVDRPIVHNNLQFERANIAFNLAALYSQLATASNRTSTEGLKAAASYFSQAAGVLAHLKNDIVPDLRTTPPDDMDANALESLIQLQLAQSQECFWHKAVMDGYKDASIAKLAAKVSDFYDTASEAAMQSDAISSSWIHHMSAKHHHFAAAAQYRAARECLEKRKYGEEVARLRDALACVAEGMKETKGGYLNKAVVEDLNSLKRRVEEDLKRAERDNDVIYLNPVTPKSELKILDRATMASAKTPPQVAKPLEYIGDKGEFGPALFTKLVPYSVHLAVSIYEERRDRLVNQSIITELETLNERIHELLSSLNLPGSIQAFEKPLGLPGTLVQHAEEIRQADALNRLHRSFADIEKLRATDMAMFEEGRGYLLTEEEEDMRLRSKFGTDRWTRPDGRSEPNQGAKLWTQAGEAEGWFANSASSDAVVRDKFHKVEPMIAVLTGPDRAIMDFVPSSRRTEVPDSLRPAIGRLRSVYNDLTRLESRRTRKAEALREKARSDDIKSDILLEAARLERNQAVATAIVPAHFEDFFEKRLDSLYEPDMEMVQKEGADQEKLLSDLVRANRDFESQKKVAGDKGTREREQALQKLENAYYKYKELTSNVEVGRKFYNDLSRIVGNFRDSARTFLTERRREAHMLEDEFSMPPLNSLSLGQQQQQQSHAQPPPSAASWNNTPTYQSPPQHPRHSYGGQPPAPQLPRQQVQSPAEAQIQSWAPPAEPVAPQPQQPAANIWSQNMPIKFSGPAGGNPPPQAKTPSGTWDPTSGIRFG

SEQ ID NO: 14602 - DNA, 3142 bp, Muscodor strobelii
  misc_feature: SGI EST ID NO. CUFF.34785.0
  misc_feature: Variant of the nucleotide sequence at SEQ ID NO 14600
ccaccatctaccgttgccaaagattaggtactgctagaagtacagaacgacaccgggtctttcctcgtgcacatagcatcatcatgctagtgtatcgctagcactagcactaggcttttccctttgcttcctcccgtgtcgccagagtgagatgaagccggggcatcagtctacgaggaggaccctaagccgcgaaccccgccgtcgccatcaccaaggccgcgatgcagaacaacacgaccatcctggcggtgcccttccgcaagggcacacagctgtccctgtcgtcggccatcaagcagtacatatccaccaagtatgaccaacaccccgacatgttccgccaggacctcgacgtcatcgacgccctccgacgcgacgccgtcaacgtccacgagccgcaccccagcggcctgaagaagctgcaagcctacgccgcccagctcgtctggatcgccggcaagttccccatcgatataggtgccgacttcacctggtatcccgcactcggctacaacgtcgaccggcccatcgtccacaacaacctccagttcgagcgcgcaaacatcgccttcaacctcgccgccctttattcgcagctggccacagcaagcaaccgcaccagcaccgagggcctcaaggccgccgcaagctacttcagccaggccgccggcgtcctcgcccacctcaagaacgacatcgtccccgacctgcgcaccaccccgcccgacgacatggacgccaacgccctcgagtcgctcatccagctgcagctggcccagtcccaggaatgcttctggcacaaggccgttatggacggctacaaggacgcttccatcgccaagctcgccgccaaggtctccgacttctacgacaccgccagcgaggccgccatgcaatctgacgccatcagcagctcctggatccaccacatgagcgccaagcatcaccactttgccgccgctgcccagtaccgtgccgcccgcgaatgtctcgagaagaggaagtacggcgaggaggtcgcccgcctgcgcgacgccctggcttgcgtggcagagggcatgaaggagaccaagggcggctatctcaacaaggccgttgtcgaggatttaaacagcttgaagaggagggtggaagaggacctgaagcgagccgagcgagacaacgatgtcatctatctaaatcccgtgacccccaaatccgaactcaaaatcctcgacagggccaccatggcatccgcaaaaacacctccgcaagttgccaagcctttggagtacatcggcgacaaaggcgagttcggccccgcgctcttcaccaagctggtcccctactctgtgcacttggccgtatccatatacgaggagcgtagagaccggctagtcaaccagagcataataacagaactcgagacgttaaacgagagaatccacgagcttctgtcttcgctcaacctgccaggctcaatacaggcatttgagaaacccctaggtctacctggcacactggtccaacatgccgaagagatccgccaggcagacgccctgaaccggttgcataggagtttcgccgatatcgagaagctccgagccacggatatggccatgttcgaggaaggcaggggctacctactcaccgaggaagaagaagacatgcgcctacggtccaaatttggcactgatcggtggaccaggccggacggtcgctctgagccaaaccaaggcgcaaagctgtggactcaagctggtgaggccgagggatggttcgcaaatagcgcaagtagtgatgcggtggtacgagacaaatttcataaggttgaaccgatgattgcggttctcacgggcccggacagagcgattatggacttcgttccttcctctagacgtaccgaagtcccggactctctgaggccagctatcggacggctgcgaagcgtctacaatgacttgacccgtctcgaaagccgccgtacgcgcaaggccgaggcactgcgagagaaggcccggagcgacgacattaagtctgatatccttctcgaagcagctcgattagaacgcaatcaggcagtagccaccgctattgtgccagcacatttcgaagacttcttcgagaaacgattggactcgctgtacgagcctgacatggagatggtgcagaaagagggcgccgatcaggaaaaactactatccgacctagtgcgcgcgaatcgcgactttgaaagccagaagaaggttgcaggtgacaagggaactcgtgagagggaacaagccttacagaagctcgaaaatgcatactataagtataaagagctcacgagcaacgtcgaggtcgggcgaaagttctacaatgatctcagtcgcatcgtgggtaacttccgcgatagcgctaggacgtttcttaccgagcggagaagagaggcacatatgcttgaggacgaattcagtatgccccctctcaacagcttgtctcttggacaacagcaacaacaacagagtcatgcgcagccaccgccatctgccgcatcctggaataacacgcctacgtaccaatctccgccgcaacacccaagacactcgtatggtggtcagccgccagctcctcaactgccacggcagcaggtccagagtcctgctgaagcacagattcaatcctgggcgccgcctgccgagcccgttgctccccagccgcaacagccagctgcgaacatttggagccagaatatgcccatcaagttctcaggtcccgctggtgggaaccctccgccacaggctaagacgccgtctggtacttgggacccgactagcgggatacggttcggctagggggcgaacatatctcgtcgcagggcttgaggggaaggggctgagaagtgcgtggttgggtaactagattatgagctatgatatcctttgatgaaagcgtggttgatagtgtaggtaatatcgcgagacttgattcgaacgagtgttgcctttgtgttgtatacgtgatgtccgctgtgtaacgaagattctatacgagattaccgaatacaatgccttgtataccagcacttgcgcgagcggtagattcggtcggctttgagcaatctaaggctgaagtccttgaacaagtgccgctttatccacgcatagcaagggtcgat

SEQ ID NO: 14603 - DNA, 2595 bp, Muscodor strobelii
  misc_feature: SGI cDNA ID NO. 564815
  misc_feature: Encodes the peptide sequence at SEQ ID NO 14604
atgcagaacaacacgaccatcctggcggtgcccttccgcaagggcacacagctgtccctgtcgtcggccatcaagcagtacatatccaccaagtatgaccaacaccccgacatgttccgccaggacctcgacgtcatcgacgccctccgacgcgacgccgtcaacgtccacgagccgcaccccagcggcctgaagaagctgcaagcctacgccgcccagctcgtctggatcgccggcaagttccccatcgatgtacgtgccgacttcacctggtatcccgcactcggctacaacgtcgaccggcccatcgtccacaacaacctccagttcgagcgcgcaaacatcgccttcaacctcgccgccctttattcgcagctggccacagcaagcaaccgcaccagcaccgagggcctcaaggccgccgcaagctacttcagccaggccgccggcgtcctcgcccacctcaagaacgacatcgtccccgacctgcgcaccaccccgcccgacgacatggacgccaacgccctcgagtcgctcatccagctgcagctggcccagtcccaggaatgcttctggcacaaggccgttatggacggctacaaggacgcttccatcgccaagctcgccgccaaggtctccgacttctacgacaccgccagcgaggccgccatgcaatctgacgccatcagcagctcctggatccaccacatgagcgccaagcatcaccactttgccgccgctgcccagtaccgtgccgcccgcgaatgtctcgagaagaggaagtacggcgaggaggtcgcccgcctgcgcgacgccctggcttgcgtggcagagggcatgaaggagaccaagggcggctatctcaacaaggccgttgtcgaggatttaaacagcttgaagaggagggtggaagaggacctgaagcgagccgagcgagacaacgatgtcatctatctaaatcccgtgacccccaaatccgaactcaaaatcctcgacagggccaccatggcatccgcaaaaacacctccgcaagttgccaagcctttggagtacatcggcgacaaaggcgagttcggccccgcgctcttcaccaagctggtcccctactctgtgcacttggccgtatccatatacgaggagcgtagagaccggctagtcaaccagagcataataacagaactcgagacgttaaacgagagaatccacgagcttctgtcttcgctcaacctgccaggctcaatacaggcatttgagaaacccctaggtctacctggcacactggtccaacatgccgaagagatccgccaggcagacgccctgaaccggttgcataggagtttcgccgatatcgagaagctccgagccacggatatggccatgttcgaggaaggcaggggctacctactcaccgaggaagaagaagacatgcgcctacggtccaaatttggcactgatcggtggaccaggccggacggtcgctctgagccaaaccaaggcgcaaagctgtggactcaagctggtgaggccgagggatggttcgcaaatagcgcaagtagtgatgcggtggtacgagacaaatttcataaggttgaaccgatgattgcggttctcacgggcccggacagagcgattatggacttcgttccttcctctagacgtaccgaagtcccggactctctgaggccagctatcggacggctgcgaagcgtctacaatgacttgacccgtctcgaaagccgccgtacgcgcaaggccgaggcactgcgagagaaggcccggagcgacgacattaagtctgatatccttctcgaagcagctcgattagaacgcaatcaggcagtagccaccgctattgtgccagcacatttcgaagacttcttcgagaaacgattggactcgctgtacgagcctgacatggagatggtgcagaaagagggcgccgatcaggaaaaactactatccgacctagtgcgcgcgaatcgcgactttgaaagccagaagaaggttgcaggtgacaagggaactcgtgagagggaacaagccttacagaagctcgaaaatgcatactataagtataaagagctcacgagcaacgtcgaggtcgggcgaaagttctacaatgatctcagtcgcatcgtgggtaacttccgcgatagcgctaggacgtttcttaccgagcggagaagagaggcacatatgcttgaggacgaattcagtatgccccctctcaacagcttgtctcttggacaacagcaacaacaacagagtcatgcgcagccaccgccatctgccgcatcctggaataacacgcctacgtaccaatctccgccgcaacacccaagacactcgtatggtggtcagccgccagctcctcaactgccacggcagcaggtccagagtcctgctgaagcacagattcaatcctgggcgccgcctgccgagcccgttgctccccagccgcaacagccagctgcgaacatttggagccagaatatgcccatcaagttctcaggtcccgctggtgggaaccctccgccacaggctaagacgccgtctggtacttgggacccgactagcgggatacggttcggctag

SEQ ID NO: 14604 - protein, 864 aa, Muscodor strobelii
  misc_feature: SGI Peptide ID NO. 564815
  misc_feature (6)..(390): Pfam Id: PF03097 Pfam Desc: BRO1-like domain
  misc_feature (5)..(864): NCBI GI: 258568346 Blast Desc: pH-response regulator protein palA/RIM20 [Uncinocarpus reesii 1704] gi|237906363|gb|EEP80764.1| pH-response regulator protein palA/RIM20 [Uncinocarpus reesii 1704]
  misc_feature (7)..(863): NCBI GI: 242766127 Blast Desc: pH signal transduction protein PalA, [Talaromyces stipitatus ATCC 10500] gi|218724307|gb|EED23724.1| pH signal transduction protein PalA, [Talaromyces stipitatus ATCC 10500]
  misc_feature (5)..(863): NCBI GI: 255949712 Blast Desc: Pc22g17100 [Penicillium chrysogenum Wisconsin 54-1255] gi|211592640|emb|CAP98998.1| Pc22g17100 [Penicillium chrysogenum Wisconsin 54-1255]
  misc_feature (5)..(863): NCBI GI: 240107906 Blast Desc: PalA protein, [Coccidioides posadasii C735 delta SOWgp]
  misc_feature (4)..(735): NCBI GI: 169603988 Blast Desc: SNOG_05003 [Phaeosphaeria nodorum SN15] gi|160706486|gb|EAT87394.2| SNOG_05003 [Phaeosphaeria nodorum SN15]
  misc_feature (1)..(864): NCBI GI: 121706540 Blast Desc: pH signal transduction protein PalA, [Aspergillus clavatus NRRL 1] gi|119399680|gb|EAW10106.1| pH signal transduction protein PalA, [Aspergillus clavatus NRRL 1]
  misc_feature (5)..(863): NCBI GI: 226293042 Blast Desc: pH-response regulator protein palA/RIM20 [Paracoccidioides brasiliensis Pb18]
  misc_feature (5)..(753): NCBI GI: 225683680 Blast Desc: pH-response regulator protein palA/RIM20 [Paracoccidioides brasiliensis Pb03]
  misc_feature (24)..(863): NCBI GI: 238838730 Blast Desc: pH-response regulator protein palA/RIM20 [Microsporum canis CBS 113480]
  misc_feature (38)..(863): NCBI GI: 239606587 Blast Desc: pH-response regulator protein palA/RIM20 [Ajellomyces dermatitidis ER-3]
  misc_feature (12)..(731): SWISSPROT Homolog: EC 3.1.3.48 Protein-tyrosine-phosphatase
MQNNTTILAVPFRKGTQLSLSSAIKQYISTKYDQHPDMFRQDLDVIDALRRDAVNVHEPHPSGLKKLQAYAAQLVWIAGKFPIDVRADFTWYPALGYNVDRPIVHNNLQFERANIAFNLAALYSQLATASNRTSTEGLKAAASYFSQAAGVLAHLKNDIVPDLRTTPPDDMDANALESLIQLQLAQSQECFWHKAVMDGYKDASIAKLAAKVSDFYDTASEAAMQSDAISSSWIHHMSAKHHHFAAAAQYRAARECLEKRKYGEEVARLRDALACVAEGMKETKGGYLNKAVVEDLNSLKRRVEEDLKRAERDNDVIYLNPVTPKSELKILDRATMASAKTPPQVAKPLEYIGDKGEFGPALFTKLVPYSVHLAVSIYEERRDRLVNQSIITELETLNERIHELLSSLNLPGSIQAFEKPLGLPGTLVQHAEEIRQADALNRLHRSFADIEKLRATDMAMFEEGRGYLLTEEEEDMRLRSKFGTDRWTRPDGRSEPNQGAKLWTQAGEAEGWFANSASSDAVVRDKFHKVEPMIAVLTGPDRAIMDFVPSSRRTEVPDSLRPAIGRLRSVYNDLTRLESRRTRKAEALREKARSDDIKSDILLEAARLERNQAVATAIVPAHFEDFFEKRLDSLYEPDMEMVQKEGADQEKLLSDLVRANRDFESQKKVAGDKGTREREQALQKLENAYYKYKELTSNVEVGRKFYNDLSRIVGNFRDSARTFLTERRREAHMLEDEFSMPPLNSLSLGQQQQQQSHAQPPPSAASWNNTPTYQSPPQHPRHSYGGQPPAPQLPRQQVQSPAEAQIQSWAPPAEPVAPQPQQPAANIWSQNMPIKFSGPAGGNPPPQAKTPSGTWDPTSGIRFG

SEQ ID NO: 14605 - DNA, 3142 bp, Muscodor strobelii; identical to SEQ ID NO: 14602
  misc_feature: SGI EST ID NO. CUFF.34785.0
  misc_feature: Variant of the nucleotide sequence at SEQ ID NO 14603

SEQ ID NO: 14606 - DNA, 1620 bp, Muscodor strobelii
  misc_feature: SGI cDNA ID NO. 564816
  misc_feature: Reduced expression when VOC is produced
  misc_feature: Encodes the peptide sequence at SEQ ID NO 14607
atgcggaatccgttcgtgagaaccgtcatcttcgtggttgcgatcctgatcctcctcggagtaacatggaaatcgaacaggatagaaggcgtcggcacgcagatcatcaaagccgccgcgccacagcataataaagagagctacattccacaggaccagaaacccgttggcgagcggttgaacactccacacgccaccgacctggatgttccgcccgtctctgatcatgctatggactgcaggatcgatgggaattacatggctcagctgaagaacaagtatgagctcatggacggtttccagtactacaagcgctacgtcaaaatcaaccgagagccaatcccaagaaagagtattaccaagctcgatcagccgttcttgccgagcacgttcaagtcaatcaatctccagcaacctaacttcggaaatgaaaagtgtgttgagccactcaacgtctacgtcccggagtcgccctacccatcctcgggcaacctatctgatttcatgtttggcgtctccactacatttaaaagatttagcggcgagaaaacaagtcccgtcaatgaatggatttattggctcaccgacgggaaaggccactccaatggcgggaaactcattctgtttctgttagacgcgacggaggaagagattacacacgctcggaccacgctgacaaccgctggcattgacgtggatgtataccattccgactcgtccctggagatggcggtccgttatttgacgcttctccctacgctgtacaatcatcccgagcgtgtcaacaagaagtggcttgtatcttgtgatgatgacactttcttccccagcgtccatttgcttgtggagaaaatgagcgagtttgatcccgaggagcagctgtacatcggtgtcttgtcagaagacattaacaacgttgatcgtcacggctcccaggcattcggtggtgcgggtgtcttcgtctccgtccctctcgcggcgcaagtggctcgtgactacgaaacatgcaagacggatgagaagattcgcgaatcaaactcgggctggggaccacagggtgatattctgctgcgcaagtgcatctacgagaataccgatgtgcgcttgtccatcctgcgtggtctgtaccagctggacctctacggcgacccatctggtttctacgagtccggaatcaagcctgtctctcttcaccacttcaagggcggcggctggcacagtgctttgccttgggagtacaccaagattgctcacatctgcggagaagattgcacgctgcaacggttccagacaagtgacgacttcatcatttccacgggtttcagtgtcgtgcactatcctctcggcatcgacttcaacctgcgccagatggagcgtactttcgcggctgctccccaggataagggatggaacctagactacgtgttcgacccgcaacgacccagtctcctgaagactggccgaaagatcagctgggatctccaggaggcaacccacgctccggataatactgtccaccaggtctacgtgcgaaaagcgaacgattggcgatgggtagacaaagacgagcagcccatgtcccatgttgatggtatcatcgagctcgtctgggttccctag

SEQ ID NO: 14607 - protein, 539 aa, Muscodor strobelii
  misc_feature: SGI Peptide ID NO. 564816
  misc_feature (1)..(539): NCBI GI: 85094347 Blast Desc: NCU05878 [Neurospora crassa OR74A] gi|28921325|gb|EAA30633.1| NCU05878 [Neurospora crassa OR74A]
  misc_feature (3)..(535): NCBI GI: 145610893 Blast Desc: MGG_11486 [Magnaporthe grisea 70-15] gi|145018229|gb|EDK02508.1| MGG_11486 [Magnaporthe grisea 70-15]
  misc_feature (2)..(538): NCBI GI: 156043849 Blast Desc: SS1G_10928 [Sclerotinia sclerotiorum 1980] gi|154695315|gb|EDN95053.1| SS1G_10928 [Sclerotinia sclerotiorum 1980]
  misc_feature (72)..(504): NCBI GI: 261357105 Blast Desc: conserved [Verticillium albo-atrum VaMs.102]
  misc_feature (1)..(411): NCBI GI: 171678593 Blast Desc: protein product [Podospora anserina] gi|170937366|emb|CAP62024.1| protein product [Podospora anserina]
  misc_feature (1)..(539): NCBI GI: 116206000 Blast Desc: CHGG_02293 [Chaetomium globosum CBS 148.51] gi|88182890|gb|EAQ90358.1| CHGG_02293 [Chaetomium globosum CBS 148.51]
  misc_feature (2)..(440): NCBI GI: 154297751 Blast Desc: BC1G_12287 [Botryotinia fuckeliana B05.10] gi|150858416|gb|EDN33608.1| BC1G_12287 [Botryotinia fuckeliana B05.10]
  misc_feature (50)..(539): NCBI GI: 154323716 Blast Desc: BC1G_00257 [Botryotinia fuckeliana B05.10] gi|150842486|gb|EDN17679.1| BC1G_00257 [Botryotinia fuckeliana B05.10]
  misc_feature (83)..(524): NCBI GI: 156056911 Blast Desc: SS1G_04186 [Sclerotinia sclerotiorum 1980] gi|154701972|gb|EDO01711.1| SS1G_04186 [Sclerotinia sclerotiorum 1980]
  misc_feature (354)..(539): NCBI GI: 261355750 Blast Desc: conserved [Verticillium albo-atrum VaMs.102]
  misc_feature: Useful for introducing or modulating the production of volatile compounds
MRNPFVRTVIFVVAILILLGVTWKSNRIEGVGTQIIKAAAPQHNKESYIPQDQKPVGERLNTPHATDLDVPPVSDHAMDCRIDGNYMAQLKNKYELMDGFQYYKRYVKINREPIPRKSITKLDQPFLPSTFKSINLQQPNFGNEKCVEPLNVYVPESPYPSSGNLSDFMFGVSTTFKRFSGEKTSPVNEWIYWLTDGKGHSNGGKLILFLLDATEEEITHARTTLTTAGIDVDVYHSDSSLEMAVRYLTLLPTLYNHPERVNKKWLVSCDDDTFFPSVHLLVEKMSEFDPEEQLYIGVLSEDINNVDRHGSQAFGGAGVFVSVPLAAQVARDYETCKTDEKIRESNSGWGPQGDILLRKCIYENTDVRLSILRGLYQLDLYGDPSGFYESGIKPVSLHHFKGGGWHSALPWEYTKIAHICGEDCTLQRFQTSDDFIISTGFSVVHYPLGIDFNLRQMERTFAAAPQDKGWNLDYVFDPQRPSLLKTGRKISWDLQEATHAPDNTVHQVYVRKANDWRWVDKDEQPMSHVDGIIELVWVP

SEQ ID NO: 14608 - DNA, 3351 bp, Muscodor strobelii
  misc_feature: SGI EST ID NO. CUFF.34790.0
  misc_feature: Variant of the nucleotide sequence at SEQ ID NO 14606
cacaccttcccgtagtctgtccatggtggacctgggagggatcccctgcgcttccctgttggtctaataatcatgagagaaattcctcctttccctgtggctggcggcactcttgacccttttgtcctcctctcctggtcaactttttttttctctcttctggcttcactatcttccacctgacaaccctccatcgatcagtcttgggtactcagttccgggtttcactgattgagtttcctctcctgcctctgtgtcttagaggtgttcattcgttaccacctgcttctcggcatcggagcatttgtttgctctaccagaatccatttggccgggtcggcttcttacacgacggcttcgctcccacaagtagcctcaaattgtcctgtcgcatgtcggctcataaacgactagagtcttgtgtgaagaactgagaagacgaaccaacttgaagacgagatcagagatacgaggcctgcgtttcaggcaaacacagccccggctggagccacagaacctatagcttcccttttggcacctccctacaccaagaacaatgggagctagcctaccatcttcccaccagagactattaaacatgcggaatccgttcgtgagaaccgtcatcttcgtggttgcgatcctgatcctcctcggagtaacatggaaatcgaacaggatagaaggcgtcggcacgcagatcatcaaagccgccgcgccacagcataataaagagagctacattccacaggaccagaaacccgttggcgagcggttgaacactccacacgccaccgacctggatgttccgcccgtctctgatcatgctatggactgcaggatcgatgggaattacatggctcagctgaagaacaagtatgagctcatggacggtttccagtactacaagcgctacgtcaaaatcaaccgagagccaatcccaagaaagagtattaccaagctcgatcagccgttcttgccgagcacgttcaagtcaatcaatctccagcaacctaacttcggaaatgaaaagtgtgttgagccactcaacgtctacgtcccggagtcgccctacccatcctcgggcaacctatctgatttcatgtttggcgtctccactacatttaaaagatttagcggcgagaaaacaagtcccgtcaatgaatggatttattggctcaccgacgggaaaggccactccaatggcgggaaactcattctgtttctgttagacgcgacggaggaagagattacacacgctcggaccacgctgacaaccgctggcattgacgtggatgtataccattccgactcgtccctggagatggcggtccgttatttgacgcttctccctacgctgtacaatcatcccgagcgtgtcaacaagaagtggcttgtatcttgtgatgatgacactttcttccccagcgtccatttgcttgtggagaaaatgagcgagtttgatcccgaggagcagctgtacatcggtgtcttgtcagaagacattaacaacgttgatcgtcacggctcccaggcattcggtggtgcgggtgtcttcgtctccgtccctctcgcggcgcaagtggctcgtgactacgaaacatgcaagacggatgagaagattcgcgaatcaaactcgggctggggaccacagggtgatattctgctgcgcaagtgcatctacgagaataccgatgtgcgcttgtccatcctgcgtggtctgtaccagctggacctctacggcgacccatctggtttctacgagtccggaatcaagcctgtctctcttcaccacttcaagggcggcggctggcacagtgctttgccttgggagtacaccaagattgctcacatctgcggagaagattgcacgctgcaacggttccagacaagtgacgacttcatcatttccacgggtttcagtgtcgtgcactatcctctcggcatcgacttcaacctgcgccagatggagcgtactttcgcggctgctccccaggataagggatggaacctagactacgtgttcgacccgcaacgacccagtctcctgaagactggccgaaagatcagctgggatctccaggaggcaacccacgctccggataatactgtccaccaggtctacgtgcgaaaagcgaacgattggcgatgggtagacaaagacgagcagcccatgtcccatgttgatggtatcatcgagctcgtctgggttccctagaggatccgagtgctgcatccgccacataaaatgatgattagctaaacgacggcgctgccattggtgcatattgggtacaactcgtttttttcttggaaataaaagcagcacagaagccagggtaactctcttggatatgaacaagaacggcaaggctaggcgagtgcgccctgcctacgacgaattcgcggaagatcgcatctggtagttggtcgccggaaccccgaacgatgccaacgagagacgacagccttagctttcctcgaccacaccctcgacgccgaatatggcgtccgccccatggttacacgataatgcataatactacactacaccctctgcttcgagtcaatcattcgcttgtcgccaccgcttgctcctcgacaggctcgttggcatgattgtcgtgtcagacaccaagcacacacatgttcttttttcctttctcccttctgtcacggctgagcacagcgaacccggcgttcggtgatcttcgcacctagacgcctgcagcatttacatcacattacatcacattacgacaggaatgttgagttcaaaagtcggcgtgctcggctcgccagcatggcttaaacccatggacgatatcccgcttttggacaaaagagacattcatatacgaaaccatttcaccatcattgccgcgctttgtatcatagacctggttatgtgggccgagggagttgtgaggatagaaatgtctttttggaacttattattttcgcattcacgagaggagaggagggtggcgagggccagaccgcggacgaggggctcgagcagcgaggaagtggcgggtggcaggggagtgagtctggccggtacatgatttgtagatatgtctgcagggagggttggccatgctcaatatcgaagtgctcgagaggagacagccaggatattcttccctcgttgtacatatgttagataagcggaaccgcattgccaaacatcaatggaacatgaaacgtgaaacctagaatcagcttaccaaacacatgtgctacactggtgagagatgtataaggcgacggcctgcactctgactcggataattctgtgttgagtgagaccaagggttgaacagtctgaaccagcgagcgaagtataag

SEQ ID NO: 14609 - DNA, 1710 bp, Muscodor strobelii
  misc_feature: SGI cDNA ID NO. 564817
  misc_feature: Encodes the peptide sequence at SEQ ID NO 14610
atggatcaggcaaacaactggcactggcttgatcgctatgggaaaggataccatgcgtgggtccgcgaaacagatgatgggtttgcaagaccatgtggtttggtcgaggcaagatttgacactgatgggcgctactttgaaggcagagccgacgtcaatccgattttaacattgggcttatcaacacatctatcagatcggaagcttcaagaacatattctgcttgcatatactttattgcggttgcgtcactgcttgacaagggcaaaagctgagccacgaactcttgggattgagccatggttcacggtgaaaatttttacatctaccacagatgctatcgaagatgctgcttcagctctacagtttttgccagccgatagccaaatcgatgtcggagaattccatagccacgcacaaaatgtcgctcgtcttattgacccgggacggtccttaagccgagcgatcgtgttcccgatagagtcgaaaggcggcacccggcgaacgttaaatattttctttgccattgctcatcagatcgtagatgggcttagttgcatgaattggatgttcgacttcgtgcggatcatgaatttgccaacagcccagatccagcatagaatagaatcggcagtctgtagcacagattcgggtcgttcgattctaccaccggcgcaagaagacctatacgcacctgttgctcctaccagggctcgagataggtggttttgggcaattactattgttctccgatatgcgaagaaacctctaccccaagccttctccaaccccttacggagagctagcccattatccagagcacgaccattccctccaatatattcaaatattctcgattattctcagactccaccactcaacactttctctgcaacagccgaattgtctcaggctgccagccagagactgttccgtctctgtcgggaagcaggagctagcatcggcgcaggggggttcgttttagtcgcaatggtgatgatggctcttcacgagcgcagatatccggacgagccagccaagaatcggcggcctttcatcggcagctttccgctgaatcctcgcccattcatcaataccaaatgccttgatagcgtcatgttagcattttctgaaggcatagtattgccatttctcccatcgcatttggatatagataaaagattcaaacttcttgtccggcaggcgagcaggcagctgtcaacatatcaaaaacgagttcgtcccgtgagtgatacagatgccttggcttacatgggtattcatggtgccggtcgactggttgcgtcgaactacatagacggcgtggagaagctccgtgaactacttccagctcatctccaacacgtcatgccctcaccgcaaggcgaattccaagttcctatttggaagcttggtcggggcacttgcggtgttagtagtatcggaaaggttgactggtccggggctcgctttaatctggacgcagagcctggaaaaggagtgattgcaagtactgagggcttcagatcaggtgtccgtgtccgcgataacgaatttcttgttgcaacttcgagcgacaacgatatcatacatgcaggtgtaagcttcgatggcaatttcatcgatcaagaagacgtacatttgtgggttgaggcaatggaatcattgttagagccaacttcagaggcaagattcaagcatcgtctataa

SEQ ID NO: 14610 - protein, 569 aa, Muscodor strobelii
  misc_feature: SGI Peptide ID NO. 564817
  misc_feature (2)..(558): NCBI GI: 189203145 Blast Desc: conserved [Pyrenophora tritici-repentis Pt-1C-BFP] gi|187985007|gb|EDU50495.1| conserved [Pyrenophora tritici-repentis Pt-1C-BFP]
  misc_feature (1)..(265): NCBI GI: 169602623 Blast Desc: SNOG_04315 [Phaeosphaeria nodorum SN15] gi|111066955|gb|EAT88075.1| SNOG_04315 [Phaeosphaeria nodorum SN15]
  misc_feature (355)..(561): NCBI GI: 169602621 Blast Desc: SNOG_04314 [Phaeosphaeria nodorum SN15] gi|111066954|gb|EAT88074.1| SNOG_04314 [Phaeosphaeria nodorum SN15]
MDQANNWHWLDRYGKGYHAWVRETDDGFARPCGLVEARFDTDGRYFEGRADVNPILTLGLSTHLSDRKLQEHILLAYTLLRLRHCLTRAKAEPRTLGIEPWFTVKIFTSTTDAIEDAASALQFLPADSQIDVGEFHSHAQNVARLIDPGRSLSRAIVFPIESKGGTRRTLNIFFAIAHQIVDGLSCMNWMFDFVRIMNLPTAQIQHRIESAVCSTDSGRSILPPAQEDLYAPVAPTRARDRWFWAITIVLRYAKKPLPQAFSNPLRRASPLSRARPFPPIYSNILDYSQTPPLNTFSATAELSQAASQRLFRLCREAGASIGAGGFVLVAMVMMALHERRYPDEPAKNRRPFIGSFPLNPRPFINTKCLDSVMLAFSEGIVLPFLPSHLDIDKRFKLLVRQASRQLSTYQKRVRPVSDTDALAYMGIHGAGRLVASNYIDGVEKLRELLPAHLQHVMPSPQGEFQVPIWKLGRGTCGVSSIGKVDWSGARFNLDAEPGKGVIASTEGFRSGVRVRDNEFLVATSSDNDIIHAGVSFDGNFIDQEDVHLWVEAMESLLEPTSEARFKHRL

SEQ ID NO: 14611 - DNA, 3406 bp, Muscodor strobelii
  misc_feature: SGI EST ID NO. CUFF.34747.0
  misc_feature: Variant of the nucleotide sequence at SEQ ID NO 14609
ctttttcgatttttgttatcaggctggggccgagaaatgctcattctgggggccatcggtagatgacatatcaaaccgctttgacaaaattgtcgattatctcctgaataaccctctacctgtatccgggctgggagtcggaggcacaggtatacctgatctagtaacatacgccgatcttaaggctgcattgctcgagtcgatgtatgcacctttgagatcctttcccattctagcggatggccttgctctgatggagcagggtaacttttcggtcatcgcgggttactatcattccgtcattgacgtgacagacgatgccatcaatattatcacttgcaccgacgcttacaacacaaacgaagtctctactttcgaccaatggaccaatttggtggaagtaggctctcagaagagcaaatactttggtgacatattccctatctatgccgaccctgttctctgtcggtccatcaaacccaacttgcccgagagcttatactatacaaagcctctgcctgtctccagcaagaacacgtcctttcctattctatttgctaccaataccatcgaccccgttactccaaacttcgctgcgcatgccgtgtcgaaagaattcccgggatccgttgtagtacagcaggaagctgtaggacactcagtatttgcacagcttgggtcggattgctatttcgaactggtgcaaggttactttagcggcatcgttccggagcacaacatcacttgcccacaagctcatataccattccaggctgatggatcatcaacacctatgatcaaaacaagacttctgaaatagaagtggaaaagataatatctgatcttggttgaaaagtgaataaaggaacattctgggacatggtgtgttttcccttacacaggtgggcctcatggcttttcaaaactcccgcacctcttgctagatacacaagttatacatgcttcaactgattaattctacctacaaacccgtctttgagagccatgtgccgcacggcttgcgacttcgcgttatgtcatgttattatcgaatcagatcgcattgtcgttgtgtactgtgtctttttggagcaaagaagaaacgtcgaatgtcgaacaccacccggatttcgctcatgagctactatttgtaacggcgaattggattattatcactctgaaatggctaacgcttccgtcggagaccgtcttgcgccgtacgccctgcgctggctggcatgtttcccacgcccttcaagtcatccagaaaggatgatagtttcaacagcgcgtaatccaacaattaagtgtcccgtgaaaccgtccacggctccttttattttgagtaatcgcaatgtattcccgatgcaaaacatcacaactcaacatcgtcatctcagtactctcatttccttgacccattgtaaaacctagtccatctttggcaaggttcttgtcgtccggtttaaacccggttcggcgacattttctccgcctaaaagcacattcgtacatgcttgcattggggattttcgacggatcataaattggcaggcgatggatcaggcaaacaactggcactggcttgatcgctatgggaaaggataccatgcgtgggtccgcgaaacagatgatgggtttgcaagaccatgtggtttggtcgaggcaagatttgacactgatgggcgctactttgaaggcagagccgacgtcaatccgattttaacattgggcttatcaacacatctatcagatcggaagcttcaagaacatattctgcttgcatatactttattgcggttgcgtcactgcttgacaagggcaaaagctgagccacgaactcttgggattgagccatggttcacggtgaaaatttttacatctaccacagatgctatcgaagatgctgcttcagctctacagtttttgccagccgatagccaaatcgatgtcggagaattccatagccacgcacaaaatgtcgctcgtcttattgacccgggacggtccttaagccgagcgatcgtgttcccgatagagtcgaaaggcggcacccggcgaacgttaaatattttctttgccattgctcatcagatcgtagatgggcttagttgcatgaattggatgttcgacttcgtgcggatcatgaatttgccaacagcccagatccagcatagaatagaatcggcagtctgtagcacagattcgggtcgttcgattctaccaccggcgcaagaagacctatacgcacctgttgctcctaccagggctcgagataggtggttttgggcaattactattgttctccgatatgcgaagaaacctctaccccaagccttctccaaccccttacggagagctagcccattatccagagcacgaccattccctccaatatattcaaatattctcgattattctcagactccaccactcaacactttctctgcaacagccgaattgtctcaggctgccagccagagactgttccgtctctgtcgggaagcaggagctagcatcggcgcaggggggttcgttttagtcgcaatggtgatgatggctcttcacgagcgcagatatccggacgagccagccaagaatcggcggcctttcatcggcagctttccgctgaatcctcgcccattcatcaataccaaatgccttgatagcgtcatgttagcattttctgaaggcatagtattgccatttctcccatcgcatttggatatagataaaagattcaaacttcttgtccggcaggcgagcaggcagctgtcaacatatcaaaaacgagttcgtcccgtgagtgatacagatgccttggcttacatgggtattcatggtgccggtcgactggttgcgtcgaactacatagacggcgtggagaagctccgtgaactacttccagctcatctccaacacgtcatgccctcaccgcaaggcgaattccaagttcctatttggaagcttggtcggggcacttgcggtgttagtagtatcggaaaggttgactggtccggggctcgctttaatctggacgcagagcctggaaaaggagtgattgcaagtactgagggcttcagatcaggtgtccgtgtccgcgataacgaatttcttgttgcaacttcgagcgacaacgatatcatacatgcaggtgtaagcttcgatggcaatttcatcgatcaagaagacgtacatttgtgggttgaggcaatggaatcattgttagagccaacttcagaggcaagattcaagcatcgtctataaaacacggtgttgagcataactcgacacattgtatttgcatccgtcgtgatgaaaacagtcaaactctgactccttaagactgcaaagacaaattttctccaatgtccatgcgtcgatcgtgttctcctctgcaattctg

SEQ ID NO: 14612 - DNA, 1689 bp, Muscodor strobelii
  misc_feature: SGI cDNA ID NO. 564818
  misc_feature: Encodes the peptide sequence at SEQ ID NO 14613
atgtctatcaaccagcgacttcttacgctttgcgtcgtggctgtctcgctctcttgggccggatgtactccgacactctcgggggatgtcaaatgcagctccaaacctccctcgggctctaatatggtatattcgtttgatgccattaggccatcaccaaagttggaatggtccccttgtttcgataactttatgtgcgccaacatagaggttccgcttgactattcggattcaaacactgggaaaacatccgtggcattcatcaaactgataggcgccaatgcgactgatcagtcagagagcattttggtgaacccaggcggacccggcggatctggcgttgatctcgttcttacgcaaggcgacctcctatctcagggattggggcaacaatataatatcattggtttcgacccgcggggcgtcaacaatagtggcttggttcttgactgcttctctggcaacacagaggcgcgaaccttcttcaactacgcacataaaacaggcactacgaatatgtcttcggacgccgtcatcaatcagtactattcggctagtatatatggggagtggtgcaatgatgctgtgaaaaaacacacccctttcggttattacgtgaccacaccggctgttgcacaggacatgctcacattcatcgaggcagaagcaatactcaagggcaaagcgactgaagatgcacagctatggtactatggggtttcttatggtactctgctgggaaccacgtttgcatccttgtttccggaaagagttggtaaattcgtcctcgatggtgttctcaactcggatttctactacaaaaataatcttagcttggagacgactcaaagcgatcttgctatggaagcctttttcgatttttgttatcaggctggggccgagaaatgctcattctgggggccatcggtagatgacatatcaaaccgctttgacaaaattgtcgattatctcctgaataaccctctacctgtatccgggctgggagtcggaggcacaggtatacctgatctagtaacatacgccgatcttaaggctgcattgctcgagtcgatgtatgcacctttgagatcctttcccattctagcggatggccttgctctgatggagcagggtaacttttcggtcatcgcgggttactatcattccgtcattgacgtgacagacgatgccatcaatattatcacttgcaccgacgcttacaacacaaacgaagtctctactttcgaccaatggaccaatttggtggaagtaggctctcagaagagcaaatactttggtgacatattccctatctatgccgaccctgttctctgtcggtccatcaaacccaacttgcccgagagcttatactatacaaagcctctgcctgtctccagcaagaacacgtcctttcctattctatttgctaccaataccatcgaccccgttactccaaacttcgctgcgcatgccgtgtcgaaagaattcccgggatccgttgtagtacagcaggaagctgtaggacactcagtatttgcacagcttgggtcggattgctatttcgaactggtgcaaggttactttagcggcatcgttccggagcacaacatcacttgcccacaagctcatataccattccaggctgatggatcatcaacacctatgatcaaaacaagacttctgaaatag

SEQ ID NO: 14613 - protein, 562 aa, Muscodor strobelii
  misc_feature: SGI Peptide ID NO. 564818
  misc_feature (132)..(526): Pfam Id: PF00561 Pfam Desc: alpha/beta hydrolase fold
  misc_feature (429)..(539): Pfam Id: PF08386 Pfam Desc: TAP-like protein
  misc_feature (461)..(539): Pfam Id: PF08386 Pfam Desc: TAP-like protein
  misc_feature (42)..(546): NCBI GI: 238500211 Blast Desc: conserved [Aspergillus flavus NRRL3357] gi|220693093|gb|EED49439.1| conserved [Aspergillus flavus NRRL3357]
  misc_feature (42)..(508): NCBI GI: 119499606 Blast Desc: NFIA_101470 [Neosartorya fischeri NRRL 181] gi|119414725|gb|EAW24663.1| conserved [Neosartorya fischeri NRRL 181]
  misc_feature (42)..(510): NCBI GI: 242821196 Blast Desc: conserved [Talaromyces stipitatus ATCC 10500] gi|218712552|gb|EED11977.1| conserved [Talaromyces stipitatus ATCC 10500]
  misc_feature (40)..(546): NCBI GI: 46115764 Blast Desc: FG03724.1 [Gibberella zeae PH-1]
  misc_feature (69)..(456): NCBI GI: 169779549 Blast Desc: [Aspergillus oryzae RIB40] gi|83772978|dbj|BAE63106.1| protein product [Aspergillus oryzae]
  misc_feature (32)..(465): NCBI GI: 67902646 Blast Desc: AN8310.2 [Aspergillus nidulans FGSC A4] gi|40747777|gb|EAA66933.1| AN8310.2 [Aspergillus nidulans FGSC A4] gi|259484234|tpe|CBF80281.1| TPA: conserved [Aspergillus FGSC
  misc_feature (97)..(485): NCBI GI: 115396460 Blast Desc: conserved [Aspergillus terreus NIH2624] gi|114193438|gb|EAU35138.1| conserved [Aspergillus terreus NIH2624]
  misc_feature (30)..(439): NCBI GI: 145611924 Blast Desc: MGG_00033 [Magnaporthe grisea 70-15] gi|145019137|gb|EDK03416.1| MGG_00033 [Magnaporthe grisea 70-15]
  misc_feature (9)..(547): NCBI GI: 115399452 Blast Desc: [Aspergillus terreus NIH2624] gi|114192198|gb|EAU33898.1| [Aspergillus terreus NIH2624]
  misc_feature (36)..(547): NCBI GI: 189195916 Blast Desc: conserved [Pyrenophora tritici-repentis Pt-1C-BFP] gi|187980175|gb|EDU46801.1| conserved [Pyrenophora tritici-repentis Pt-1C-BFP]
MSINQRLLTLCVVAVSLSWAGCTPTLSGDVKCSSKPPSGSNMVYSFDAIRPSPKLEWSPCFDNFMCANIEVPLDYSDSNTGKTSVAFIKLIGANATDQSESILVNPGGPGGSGVDLVLTQGDLLSQGLGQQYNIIGFDPRGVNNSGLVLDCFSGNTEARTFFNYAHKTGTTNMSSDAVINQYYSASIYGEWCNDAVKKHTPFGYYVTTPAVAQDMLTFIEAEAILKGKATEDAQLWYYGVSYGTLLGTTFASLFPERVGKFVLDGVLNSDFYYKNNLSLETTQSDLAMEAFFDFCYQAGAEKCSFWGPSVDDISNRFDKIVDYLLNNPLPVSGLGVGGTGIPDLVTYADLKAALLESMYAPLRSFPILADGLALMEQGNFSVIAGYYHSVIDVTDDAINIITCTDAYNTNEVSTFDQWTNLVEVGSQKSKYFGDIFPIYADPVLCRSIKPNLPESLYYTKPLPVSSKNTSFPILFATNTIDPVTPNFAAHAVSKEFPGSVVVQQEAVGHSVFAQLGSDCYFELVQGYFSGIVPEHNITCPQAHIPFQADGSSTPMIKTRLLK

SEQ ID NO: 14614 - DNA, 3406 bp, Muscodor strobelii; identical to SEQ ID NO: 14611
  misc_feature: SGI EST ID NO. CUFF.34747.0
  misc_feature: Variant of the nucleotide sequence at SEQ ID NO 14612

SEQ ID NO: 14615 - DNA, 2205 bp, Muscodor strobelii
  misc_feature: SGI cDNA ID NO. 564819
  misc_feature: Encodes the peptide sequence at SEQ ID NO 14616
atgacaactgcaatggactctcatgtaaggctctgcctgactaacgtccaggatggagagatcgtctaccaacgctgtctcctcatcacgggaacttgtcacgactctgcgactccggaagatttcgttgctgtgaaagtgaaggacaatttccagcgcagctcagcccaacagaattggccagttggcaatggctcatttcggtgtctcgtgatgcttcatgcaggacccaacaagatcaacttcaaattgttccataacggccagattcatagctcaaatgagatcaccatccaacaccaaccgctgctacaactaccaccactacatttggcaattatggttgctaaagactcaccgttgctcattgactgtccgccaacaaagcggggagcgataagtagtgcacacagctccctagacgcggctatcgtgaagctgagaatggcggcctatatgtggcaagccctgactgccgaggattttcgccttcgtggtatggggaggaggtcgtttagacttgacgaagaatggggctttgacacgactacagccgcatccatgcggcatgacactggttctaaacacatggatacaattgccaaggtcaatgtcattaggagcgagaaaaatgtcatagagttgagaagcgcggaagcttcaagaatgaatcgacaccaggacaacatttacagctttttcgagaaggccctgcaagctcatggtgcacctttcactcctggctctcagccagttgttgcgggtatgatactggacacacagtatgcgattggctcaggtcttactcttgctcatagtgcaacggggcgcaacatgccttctggcctttctcttggcatctttggaagtcatactacatattcgtggccccgattcctcgaagaggtgcccagctgcctgctcgatcgaggtctcattggcgataccgtggccaatgaccgcggtcaatgcttcacaatgagggacgcatgttgcattggtcaagctagcctgttccatcaagttagacatgcctttggagtcacggatgagtcgtatcaaccatggcaaacgagatcgattgcctcatggagcgccgcattcgttgctcaaccatcgaaagagccttggatttcatgggatctacaaggagcactgatattaaagacaaaacaccatttccaacttcctggcgacaaagcattgacaaagatcgaagaagagagcgagattactgtggcctgcgccttggacgagaatgaagatgccatgctcgaaattatgtgtatggccggaatcgcccgtgtacgctttacgagcgaaaaggtcaaggagatcaactttctcaaacgtaaagctgatgagatcgatgacgatatcacaccaccgccctcgaaatatataatttctcaagctaggttagaggaggatctcggtcgagggcgaaattcagaactggaagttcttgggatgaatgggaaaaggcacaaaggcagaaatgtttggcaactcctggccgaccgcccattcattaaggtacctggaacttctctagtgctttcaaaacgggcagcgaagatgcaagagggcagccattcggtacgagactgggccttattattgaagaaacgaagtgcatcggatccatcgggattcaccacggcaagtcgaattgacattcgaattggagccattatggatggtgccgtagtgtactatcgcgatggcagtcacgtcaactgtggtctccctgatcagtcgggatacggtgggcatcagtctgaagacaagactttaccgtcaaatgatgttttcaaaatatcccgtgtagaagtgaataagggtcggcaaaatcgcaacagcgaactctacgggtgcaggatgtcaatgatcaacaatgagtcttgggggcacctgaataatcacgggaaccacgaaattgagcggcttgtctgtggtcccgacgagcgtattatcggcttctacgggaaaagttttgaaggcagtggatatacttgcgagtttggcatcattacagccccaagagacatcgtggacagcgcggaaggtctgccgacacagatatacgatatgacagaactgatgaacaatcctagcggcaaccaggatcatgatgacgatgacgataattcctcaaactcggattcagatgaagatatggaagacaacgatgatgacgaataa

SEQ ID NO: 14616 - protein, 734 aa, Muscodor strobelii
  misc_feature: SGI Peptide ID NO. 564819
  misc_feature (13)..(704): NCBI GI: 238485298 Blast Desc: conserved [Aspergillus flavus NRRL3357] gi|220698766|gb|EED55105.1| conserved [Aspergillus flavus NRRL3357]
  misc_feature (13)..(704): NCBI GI: 169772095 Blast Desc: [Aspergillus oryzae RIB40] gi|83768376|dbj|BAE58515.1| protein product [Aspergillus oryzae]
  misc_feature (114)..(713): NCBI GI: 189209399 Blast Desc: metallopeptidase [Pyrenophora tritici-repentis Pt-1C-BFP] gi|187977125|gb|EDU43751.1| metallopeptidase [Pyrenophora tritici-repentis Pt-1C-BFP]
  misc_feature (13)..(703): NCBI GI: 154276300 Blast Desc: [Ajellomyces capsulatus NAm1] gi|150414068|gb|EDN09433.1| [Ajellomyces capsulatus NAm1]
  misc_feature (13)..(703): NCBI GI: 261200615 Blast Desc: zinc metalloproteinase [Ajellomyces dermatitidis SLH14081] gi|239593780|gb|EEQ76361.1| zinc metalloproteinase [Ajellomyces dermatitidis SLH14081]
  misc_feature (13)..(703): NCBI GI: 239607348 Blast Desc: zinc metalloproteinase [Ajellomyces dermatitidis ER-3]
  misc_feature (16)..(732): NCBI GI: 171680530 Blast Desc: protein product [Podospora anserina] gi|170939892|emb|CAP65118.1| protein product [Podospora anserina]
  misc_feature (13)..(643): NCBI GI: 225555859 Blast Desc: conserved [Ajellomyces capsulatus G186AR]
  misc_feature (13)..(708): NCBI GI: 226281218 Blast Desc: conserved [Paracoccidioides brasiliensis Pb01]
  misc_feature (25)..(651): NCBI GI: 226289161 Blast Desc: conserved [Paracoccidioides brasiliensis Pb18]
MTTAMDSHVRLCLTNVQDGEIVYQRCLLITGTCHDSATPEDFVAVKVKDNFQRSSAQQNWPVGNGSFRCLVMLHAGPNKINFKLFHNGQIHSSNEITIQHQPLLQLPPLHLAIMVAKDSPLLIDCPPTKRGAISSAHSSLDAAIVKLRMAAYMWQALTAEDFRLRGMGRRSFRLDEEWGFDTTTAASMRHDTGSKHMDTIAKVNVIRSEKNVIELRSAEASRMNRHQDNIYSFFEKALQAHGAPFTPGSQPVVAGMILDTQYAIGSGLTLAHSATGRNMPSGLSLGIFGSHTTYSWPRFLEEVPSCLLDRGLIGDTVANDRGQCFTMRDACCIGQASLFHQVRHAFGVTDESYQPWQTRSIASWSAAFVAQPSKEPWISWDLQGALILKTKHHFQLPGDKALTKIEEESEITVACALDENEDAMLEIMCMAGIARVRFTSEKVKEINFLKRKADEIDDDITPPPSKYIISQARLEEDLGRGRNSELEVLGMNGKRHKGRNVWQLLADRPFIKVPGTSLVLSKRAAKMQEGSHSVRDWALLLKKRSASDPSGFTTASRIDIRIGAIMDGAVVYYRDGSHVNCGLPDQSGYGGHQSEDKTLPSNDVFKISRVEVNKGRQNRNSELYGCRMSMINNESWGHLNNHGNHEIERLVCGPDERIIGFYGKSFEGSGYTCEFGIITAPRDIVDSAEGLPTQIYDMTELMNNPSGNQDHDDDDDNSSNSDSDEDMEDNDDDE

SEQ ID NO: 14617 - DNA, 4968 bp, Muscodor strobelii
  misc_feature: SGI EST ID NO. CUFF.34956.1
  misc_feature: Variant of the nucleotide sequence at SEQ ID NO 14615
ctgaaattgatgagaaaacagcaggagaaaacaattatataagacattgagtgacctgaatattatgcatccacgaactcattagcctttgcttcattatgacaactgcaatggactctcatgtaaggctctgcctgactaacgtccaggatggagagatcgtctaccaacgctgtctcctcatcacgggaacttgtcacgactctgcgactccggaagatttcgttgctgtgaaagtgaaggacaatttccagcgcagctcagcccaacagaattggccagttggcaatggctcatttcggtgtctcgtgatgcttcatgcaggacccaacaagatcaacttcaaattgttccataacggccagattcatagctcaaatgagatcaccatccaacaccaaccgctgctacaactaccaccactacatttggcaattatggttgctaaagactcaccgttgctcattgactgtccgccaacaaagcggggagcgataagtagtgcacacagctccctagacgcggctatcgtgaagctgagaatggcggcctatatgtggcaagccctgactgccgaggattttcgccttcgtggtatggggaggaggtcgtttagacttgacgaagaatggggctttgacacgactacagccgcatccatgcggcatgacactggttctaaacacatggatacaattgccaaggtcaatgtcattaggagcgagaaaaatgtcatagagttgagaagcgcggaagcttcaagaatgaatcgacaccaggacaacatttacagctttttcgagaaggccctgcaagctcatggtgcacctttcactcctggctctcagccagttgttgcgggtatgatactggacacacagtatgcgattggctcaggtcttactcttgctcatagtgcaacggggcgcaacatgccttctggcctttctcttggcatctttggaagtcatactacatattcgtggccccgattcctcgaagaggtgcccagctgcctgctcgatcgaggtctcattggcgataccgtggccaatgaccgcggtcaatgcttcacaatgagggacgcatgttgcattggtcaagctagcctgttccatcaagttagacatgcctttggagtcacggatgagtcgtatcaaccatggcaaacgagatcgattgcctcatggagcgccgcattcgttgctcaaccatcgaaagagccttggatttcatgggatctacaaggagcactgatattaaagacaaaacaccatttccaacttcctggcgacaaagcattgacaaagatcgaagaagagagcgagattactgtggcctgcgccttggacgagaatgaagatgccatgctcgaaattatgtgtatggccggaatcgcccgtgtacgctttacgagcgaaaaggtcaaggagatcaactttctcaaacgtaaagctgatgagatcgatgacgatatcacaccaccgccctcgaaatatataatttctcaagctaggttagaggaggatctcggtcgagggcgaaattcagaactggaagttcttgggatgaatgggaaaaggcacaaaggcagaaatgtttggcaactcctggccgaccgcccattcattaaggtacctggaacttctctagtgctttcaaaacgggcagcgaagatgcaagagggcagccattcggtacgagactgggccttattattgaagaaacgaagtgcatcggatccatcgggattcaccacggcaagtcgaattgacattcgaattggagccattatggatggtgccgtagtgtactatcgcgatggcagtcacgtcaactgtggtctccctgatcagtcgggatacggtgggcatcagtctgaagacaagactttaccgtcaaatgatgttttcaaaatatcccgtgtagaagtgaataagggtcggcaaaatcgcaacagcgaactctacgggtgcaggatgtcaatgatcaacaatgagtcttgggggcacctgaataatcacgggaaccacgaaattgagcggcttgtctgtggtcccgacgagcgtattatcggcttctacgggaaaagttttgaaggcagtggatatacttgcgagtttggcatcattacagccccaagagacatcgtggacagcgcggaaggtctgccgacacagatatacgatatgacagaactgatgaacaatcctagcggcaaccaggatcatgatgacgatgacgataattcctcaaactcggattcagatgaagatatggaagacaacgatgatgacgaataaatgagacgatttttagttaacttctcgacttggactgagaaacgacgcgatcacgatcatttccgtgcctgttgggccgagtgcggtgacggggtgcgtgatgcaaatagacctcgatttgtacatgtacttgtttatagtaaatttgtcttagcgaatattattcaggcactcaatcgcagcattctggaaaatggggcagtggttttaaattgaattaattgacgatcctatcggcaatcaactgcgcccaacactgattaactgcagctggagcacacagcctcaaaagctgacgtatttaggtacccatattcacgattgatagatgccacggggccaagagatgtcataagactgcgccgtgactaggcttaggaaacgtgatattagagcttgaggtttgcgatttgtttacgtggcttccgtatactgtccctccttgcaggtgggttttttgacggcctttcgctgtatccgctgtccacccgaccccgatattaaagagtccaacactaccgtgagcatgtcgtgatcccgtgatgggctgctaaacagaatacattccgacatatcaacacaaagcgttttccaccatctcccaagaagcaagcattttgtctccggtgtcgcctcagtcgagtcaggcaggtaccaaaatagtgtgtccgtggacattgttcgcaggtctttgccgggtcaagcgccattccgtttcaacccaactcgcctctcgttatgagcgagtttgttgaagcacggtctttggccgctctgaatcaacttgctgcaaatcctcctcagtatccaaagaagccaacggagacaagacaagatgcacttacgctctatatttccagagtcccaggcacgagggacataatcctttcgactttaaagccccaggtcaaaaatgtgactgcagaggatgttgctagttcgctttactatgtgcatttccagacgcccgaggatgagcctctcgttccgccaaaccagtccaggcgctctccctctccaagatcaagcggagagagcccacgaagtcagatccagcggaaaccaataccaaacatgacggacgtgaattcaaattcaagagattactccacgcaaggagtcctgtatggcaacgagcaaggctcgagaatgccctcccgaaaacctattgcagggacggataatggtgcgctgcacagttacaacacgacgtctgtgaatcaaatgacagaaaacattcccgttctgagaaaaccatttggccccaggcctattggtggtgaagggttgaatccttctgttgcggatttccataatgtaccacatccgttgtcacagtcaatgcccagcgccgagcaacagcctcctcccttgccagctcgccctatggagcggcagcgacaacagatgaacccagcaaaccctccatatctaacgaatgcgcatgctgagcctcttgcgcccacgaggcgacgaccttttgtcccgttctctctgacaatgatcagaagagacccaagctcgagccagcagtggaacgttgggaagatcgcttcttttcagctcgagaatccggaactcatcgatgatgagaggcatcaccagccatctccatccgttcagattcacctagagacgtcgggctatgcgaaattccgtggaatgccgacgggggcagacatcgggttgaggggcagccttgacattcggccgggaagctcatcatctgctacaagattacaggttccggacctaaacacgcactcacatggctctggcttcttcgaacgtcaagtgaaaatggtatatactccatccttcacagccaatctccgacaacgtttccgcagccgtagttctgcagacgaaggccgtcccccttctccagtcaaacgaccaggtcatgatcgccatggcagtcaagtatccattggctcttttggaggagagtttgacggaagtgatgcgccagtcataacacagcccgcaccagggctcaagcctcggggatatatgttctacagcccttgggacggtcgttgcgaattcttgacaggcaatgccggacgcagcttgaaatgtcgacacgtgctcccctcctatagcaatggtgtttacaatcctttggtggaaggatgggattacgacgctgctgagcaaaaagttgagactgcccaaccggtcagcgagctacggttcaatttaccaacaaatgaactgttctcagacaagaagatgcctgaaggcggtgtgcggaccagagaccacttacaaagtcaattccagaagatggtcgcaagggcgcagggcaccgaggacagtgacgatgctgacatgccctttgacctaagcctaggaagagaaaaggcaggtggaggaaacaggggcaaacgagcgaagatgggcaagctgatcatttttgacgaaggactcaagatgctagatctcgctgttgccgcgaacattggcatctggtggatcacttatgaacgaacttatgacaactagacacacctcaccacttcacgcataaagcgcaagatgatagacgaagatcataacaccattcaccctctcaagagatagcatctaaaaagcactgttctggagtcacggcatcagtttcatgggccatatttgatataataatgctaatacattttgc

SEQ ID NO: 14618 - DNA, 1770 bp, Muscodor strobelii
  misc_feature: SGI cDNA ID NO. 564820
  misc_feature: Reduced expression when VOC is produced
  misc_feature: Encodes the peptide sequence at SEQ ID NO 14619
atgagcgagtttgttgaagcacggtctttggccgctctgaatcaacttgctgcaaatcctcctcagtatccaaagaagccaacggagacaagacaagatgcacttacgctctatatttccagagtcccaggcacgagggacataatcctttcgactttaaagccccaggtcaaaaatgtgactgcagaggatgttgctagttcgctttactatgtgcatttccagacgcccgaggatgagcctctcgttccgccaaaccagtccaggcgctctccctctccaagatcaagcggagagagcccacgaagtcagatccagcggaaaccaataccaaacatgacggacgtgaattcaaattcaagagattactccacgcaaggagtcctgtatggcaacgagcaaggctcgagaatgccctcccgaaaacctattgcagggacggataatggtgcgctgcacagttacaacacgacgtctgtgaatcaaatgacagaaaacattcccgttctgagaaaaccatttggccccaggcctattggtggtgaagggttgaatccttctgttgcggatttccataatgtaccacatccgttgtcacagtcaatgcccagcgccgagcaacagcctcctcccttgccagctcgccctatggagcggcagcgacaacagatgaacccagcaaaccctccatatctaacgaatgcgcatgctgagcctcttgcgcccacgaggcgacgaccttttgtcccgttctctctgacaatgatcagaagagacccaagctcgagccagcagtggaacgttgggaagatcgcttcttttcagctcgagaatccggaactcatcgatgatgagaggcatcaccagccatctccatccgttcagattcacctagagacgtcgggctatgcgaaattccgtggaatgccgacgggggcagacatcgggttgaggggcagccttgacattcggccgggaagctcatcatctgctacaagattacaggttccggacctaaacacgcactcacatggctctggcttcttcgaacgtcaagtgaaaatggtatatactccatccttcacagccaatctccgacaacgtttccgcagccgtagttctgcagacgaaggccgtcccccttctccagtcaaacgaccaggtcatgatcgccatggcagtcaagtatccattggctcttttggaggagagtttgacggaagtgatgcgccagtcataacacagcccgcaccagggctcaagcctcggggatatatgttctacagcccttgggacggtcgttgcgaattcttgacaggcaatgccggacgcagcttgaaatgtcgacacgtgctcccctcctatagcaatggtgtttacaatcctttggtggaaggatgggattacgacgctgctgagcaaaaagttgagactgcccaaccggtcagcgagctacggttcaatttaccaacaaatgaactgttctcagacaagaagatgcctgaaggcggtgtgcggaccagagaccacttacaaagtcaattccagaagatggtcgcaagggcgcagggcaccgaggacagtgacgatgctgacatgccctttgacctaagcctaggaagagaaaaggcaggtggaggaaacaggggcaaacgagcgaagatgggcaagctgatcatttttgacgaaggactcaagatgctagatctcgctgttgccgcgaacattggcatctggtggatcacttatgaacgaacttatgacaactag

SEQ ID NO: 14619 - protein, 589 aa, Muscodor strobelii
  misc_feature: SGI Peptide ID NO. 564820
  misc_feature (3)..(587): NCBI GI: 85076506 Blast Desc: NCU05010 [Neurospora crassa OR74A] gi|28916970|gb|EAA26701.1| [Neurospora crassa OR74A]
  misc_feature (4)..(587): NCBI GI: 46126981 Blast Desc: FG07868.1 [Gibberella zeae PH-1]
  misc_feature (5)..(587): NCBI GI: 256724419 Blast Desc: NECHADRAFT_88214 [Nectria haematococca mpVI 77-13-4]
  misc_feature (1)..(587): NCBI GI: 39942802 Blast Desc: MGG_03481 [Magnaporthe grisea 70-15] gi|145009966|gb|EDJ94622.1| MGG_03481 [Magnaporthe grisea 70-15]
  misc_feature (5)..(586): NCBI GI: 169599793 Blast Desc: SNOG_02722 [Phaeosphaeria nodorum SN15] gi|111068333|gb|EAT89453.1| SNOG_02722 [Phaeosphaeria nodorum SN15]
  misc_feature (5)..(580): NCBI GI: 242790932 Blast Desc: conserved [Talaromyces stipitatus ATCC 10500] gi|218718245|gb|EED17665.1| conserved [Talaromyces stipitatus ATCC 10500]
  misc_feature (3)..(500): NCBI GI: 154291503 Blast Desc: BC1G_15272 [Botryotinia fuckeliana B05.10] gi|150846770|gb|EDN21963.1| BC1G_15272 [Botryotinia fuckeliana B05.10]
  misc_feature (245)..(584): NCBI GI: 225560809 Blast Desc: conserved [Ajellomyces capsulatus G186AR]
  misc_feature (241)..(583): NCBI GI: 115389852 Blast Desc: conserved [Aspergillus terreus NIH2624] gi|114194827|gb|EAU36527.1| conserved [Aspergillus terreus NIH2624]
  misc_feature (250)..(586): NCBI GI: 212534706 Blast Desc: conserved [Penicillium marneffei ATCC 18224] gi|210069908|gb|EEA23998.1| conserved [Penicillium marneffei ATCC 18224]
  misc_feature: Useful for introducing or modulating the production of volatile compounds
MSEFVEARSLAALNQLAANPPQYPKKPTETRQDALTLYISRVPGTRDIILSTLKPQVKNVTAEDVASSLYYVHFQTPEDEPLVPPNQSRRSPSPRSSGESPRSQIQRKPIPNMTDVNSNSRDYSTQGVLYGNEQGSRMPSRKPIAGTDNGALHSYNTTSVNQMTENIPVLRKPFGPRPIGGEGLNPSVADFHNVPHPLSQSMPSAEQQPPPLPARPMERQRQQMNPANPPYLTNAHAEPLAPTRRRPFVPFSLTMIRRDPSSSQQWNVGKIASFQLENPELIDDERHHQPSPSVQIHLETSGYAKFRGMPTGADIGLRGSLDIRPGSSSSATRLQVPDLNTHSHGSGFFERQVKMVYTPSFTANLRQRFRSRSSADEGRPPSPVKRPGHDRHGSQVSIGSFGGEFDGSDAPVITQPAPGLKPRGYMFYSPWDGRCEFLTGNAGRSLKCRHVLPSYSNGVYNPLVEGWDYDAAEQKVETAQPVSELRFNLPTNELFSDKKMPEGGVRTRDHLQSQFQKMVARAQGTEDSDDADMPFDLSLGREKAGGGNRGKRAKMGKLIIFDEGLKMLDLAVAANIGIWWITYERTYDN

SEQ ID NO: 14620 - DNA, 3273 bp, Muscodor strobelii
  misc_feature: SGI EST ID NO. CUFF.34956.2
  misc_feature: Variant of the nucleotide sequence at SEQ ID NO 14618
ctgactccaattatgcgatagtcgggatacggtgggcatcagtctgaagacaagactttaccgtcaaatgatgttttcaaaatatcccgtgtagaagtgaataagggtcggcaaaatcgcaacagcgaacgtaagtgcgcattgtcgaactatgacagtctttgctttggttgggtgaacgacaaatttctccaagtcgtgcggaaacagctttcaaatttagccccggaacttatctatggacgccaatcgcaaagtgtcgagcatcgctaattttctgagttgcagtctacgggtgcaggatgtcaatgatcaacaatgagtcttgggggcacctgaataatcacgggaaccacgaaattgagcggcttgtctgtggtcccgacgagcgtattatcggcttctacgggaaaagttttgaaggcagtggatatacttgcgagtttggcatcattacagccccaagagacatcgtggacagcgcggaaggtctgccgacacagatatacgatatgacagaactgatgaacaatcctagcggcaaccaggatcatgatgacgatgacgataattcctcaaactcggattcagatgaagatatggaagacaacgatgatgacgaataaatgagacgatttttagttaacttctcgacttggactgagaaacgacgcgatcacgatcatttccgtgcctgttgggccgagtgcggtgacggggtgcgtgatgcaaatagacctcgatttgtacatgtacttgtttatagtaaatttgtcttagcgaatattattcaggcactcaatcgcagcattctggaaaatggggcagtggttttaaattgaattaattgacgatcctatcggcaatcaactgcgcccaacactgattaactgcagctggagcacacagcctcaaaagctgacgtatttaggtacccatattcacgattgatagatgccacggggccaagagatgtcataagactgcgccgtgactaggcttaggaaacgtgatattagagcttgaggtttgcgatttgtttacgtggcttccgtatactgtccctccttgcaggtgggttttttgacggcctttcgctgtatccgctgtccacccgaccccgatattaaagagtccaacactaccgtgagcatgtcgtgatcccgtgatgggctgctaaacagaatacattccgacatatcaacacaaagcgttttccaccatctcccaagaagcaagcattttgtctccggtgtcgcctcagtcgagtcaggcaggtaccaaaatagtgtgtccgtggacattgttcgcaggtctttgccgggtcaagcgccattccgtttcaacccaactcgcctctcgttatgagcgagtttgttgaagcacggtctttggccgctctgaatcaacttgctgcaaatcctcctcagtatccaaagaagccaacggagacaagacaagatgcacttacgctctatatttccagagtcccaggcacgagggacataatcctttcgactttaaagccccaggtcaaaaatgtgactgcagaggatgttgctagttcgctttactatgtgcatttccagacgcccgaggatgagcctctcgttccgccaaaccagtccaggcgctctccctctccaagatcaagcggagagagcccacgaagtcagatccagcggaaaccaataccaaacatgacggacgtgaattcaaattcaagagattactccacgcaaggagtcctgtatggcaacgagcaaggctcgagaatgccctcccgaaaacctattgcagggacggataatggtgcgctgcacagttacaacacgacgtctgtgaatcaaatgacagaaaacattcccgttctgagaaaaccatttggccccaggcctattggtggtgaagggttgaatccttctgttgcggatttccataatgtaccacatccgttgtcacagtcaatgcccagcgccgagcaacagcctcctcccttgccagctcgccctatggagcggcagcgacaacagatgaacccagcaaaccctccatatctaacgaatgcgcatgctgagcctcttgcgcccacgaggcgacgaccttttgtcccgttctctctgacaatgatcagaagagacccaagctcgagccagcagtggaacgttgggaagatcgcttcttttcagctcgagaatccggaactcatcgatgatgagaggcatcaccagccatctccatccgttcagattcacctagagacgtcgggctatgcgaaattccgtggaatgccgacgggggcagacatcgggttgaggggcagccttgacattcggccgggaagctcatcatctgctacaagattacaggttccggacctaaacacgcactcacatggctctggcttcttcgaacgtcaagtgaaaatggtatatactccatccttcacagccaatctccgacaacgtttccgcagccgtagttctgcagacgaaggccgtcccccttctccagtcaaacgaccaggtcatgatcgccatggcagtcaagtatccattggctcttttggaggagagtttgacggaagtgatgcgccagtcataacacagcccgcaccagggctcaagcctcggggatatatgttctacagcccttgggacggtcgttgcgaattcttgacaggcaatgccggacgcagcttgaaatgtcgacacgtgctcccctcctatagcaatggtgtttacaatcctttggtggaaggatgggattacgacgctgctgagcaaaaagttgagactgcccaaccggtcagcgagctacggttcaatttaccaacaaatgaactgttctcagacaagaagatgcctgaaggcggtgtgcggaccagagaccacttacaaagtcaattccagaagatggtcgcaagggcgcagggcaccgaggacagtgacgatgctgacatgccctttgacctaagcctaggaagagaaaaggcaggtggaggaaacaggggcaaacgagcgaagatgggcaagctgatcatttttgacgaaggactcaagatgctagatctcgctgttgccgcgaacattggcatctggtggatcacttatgaacgaacttatgacaactagacacacctcaccacttcacgcataaagcgcaagatgatagacgaagatcataacaccattcaccctctcaagagatagcatctaaaaagcactgttctggagtcacggcatcagtttcatgggccatatttgatataat

SEQ ID NO: 14621 - DNA, 417 bp, Muscodor strobelii
  misc_feature: SGI cDNA ID NO. 564821
  misc_feature: Encodes the peptide sequence at SEQ ID NO 14622
atgttgccgacgatagcgcgacggatggcgtcgagcccattcgtgcccccgaagctccgaaatgcgggtagagcgcctctgccttccgcatatgccaagtacaccccgaagaagatctggccgccagacttcgcgagactgtcggagaaagagcagttccgcttcgagagacgatataagcgtcgtgtgaagctcgcaactgcgcgcccacgctgggataaatacgtcaggttggcgcagctgggaactgtttcttttgtccttgtatatacagtcttgttcatggactggaatacggagaaacagcctttccaaggagtacgaaatgcattctgggggactatcgaatccctctccccttcacagagacacgaacgacgtacgcccgatgcgccgacatccacgagcaagaaatag

SEQ ID NO: 14622 - protein, 138 aa, Muscodor strobelii
  misc_feature: SGI Peptide ID NO. 564821
  misc_feature (1)..(123): NCBI GI: 171689798 Blast Desc: protein product [Podospora anserina] gi|170944861|emb|CAP70973.1| protein product [Podospora anserina]
  misc_feature (28)..(115): NCBI GI: 164422902 Blast Desc: NCU09462 [Neurospora crassa OR74A] gi|38524245|emb|CAE75710.1| [Neurospora crassa] gi|157069866|gb|EAA33981.2| [Neurospora crassa OR74A]
  misc_feature (31)..(116): NCBI GI: 119500288 Blast Desc: NFIA_104920 [Neosartorya fischeri NRRL 181] gi|119415066|gb|EAW25004.1| conserved [Neosartorya fischeri NRRL 181]
  misc_feature (4)..(113): NCBI GI: 39968681 Blast Desc: MGG_02433 [Magnaporthe grisea 70-15] gi|145013966|gb|EDJ98607.1| MGG_02433 [Magnaporthe grisea 70-15]
  misc_feature (31)..(116): NCBI GI: 159125348 Blast Desc: conserved [Aspergillus fumigatus A1163]
  misc_feature (31)..(116): NCBI GI: 70993770 Blast Desc: conserved [Aspergillus fumigatus Af293] gi|66849366|gb|EAL89694.1| conserved [Aspergillus fumigatus Af293]
  misc_feature (31)..(122): NCBI GI: 242769512 Blast Desc: conserved [Talaromyces stipitatus ATCC 10500] gi|218724977|gb|EED24394.1| conserved [Talaromyces stipitatus ATCC 10500]
  misc_feature (31)..(116): NCBI GI: 121707865 Blast Desc: conserved [Aspergillus clavatus NRRL 1] gi|119400111|gb|EAW10537.1| conserved [Aspergillus clavatus NRRL 1]
  misc_feature (31)..(116): NCBI GI: 115391305 Blast Desc: [Aspergillus terreus NIH2624] gi|114194081|gb|EAU35781.1| [Aspergillus terreus NIH2624]
  misc_feature (34)..(118): NCBI GI: 212542203 Blast Desc: conserved [Penicillium marneffei ATCC 18224] gi|210066163|gb|EEA20256.1| conserved [Penicillium marneffei ATCC 18224]
MLPTIARRMASSPFVPPKLRNAGRAPLPSAYAKYTPKKIWPPDFARLSEKEQFRFERRYKRRVKLATARPRWDKYVRLAQLGTVSFVLVYTVLFMDWNTEKQPFQGVRNAFWGTIESLSPSQRHERRTPDAPTSTSKK

SEQ ID NO: 14623 - DNA, 1732 bp, Muscodor strobelii
  misc_feature: SGI EST ID NO. CUFF.34952.0
  misc_feature: Variant of the nucleotide sequence at SEQ ID NO 14621
accacctcaggtaccggccagaaccccagtcaatccattagccccatcgggcatagccacaaagcatccatcaacaggatatcaagatcgggataaccaagagaacgaagttcatcaaagcaaccaatctcgccaattgcctcgcactcaggtgcaaggacaacgacaatcgagtccatgttgccgacgatagcgcgacggatggcgtcgagcccattcgtgcccccgaagctccgaaatgcgggtagagcgcctctgccttccgcatatgccaagtacaccccgaagaagatctggccgccagacttcgcgagactgtcggagaaagagcagttccgcttcgagagacgatataagcgtcgtgtgaagctcgcaactgcgcgcccacgctgggataaatacgtcaggttggcgcagctgggaactgtttcttttgtccttgtatatacagtcttgttcatggactggaatacggagaaacagcctttccaaggagtacgaaatgcattctgggggactatcgaatccctctccccttcacagagacacgaacgacgtacgcccgatgcgccgacatccacgagcaagaaatagagacgttgccttgtacgatatagcaccactcacacatagcatggacggagttacggattacggagataccataacgtgttggaacgtgtaaaaatataccatttcctgcccaagatgcgttctccgtggtgaaatcatgtcatatcgcctttatgccatcttgaatgccctcgccgaaacgccgttgaactccactatgatagtatctgtttcgctagactcttcacctgccaggccatacaaagttccctcccatagataacccagcaccgagtccagaaccgagtgcagaaccccgagactcattgacaggtctcttcgcaacagtgccctgtgccttgaccccagccacaatcttgtcgagattcgtctcgatcacaacaccgccgacaatcatctcgctgagggtagcgtggagggtctcgaagttgaagatcaagtctagctcgcagacttgctcgaagagtctatccagtgattcaacgtaaacttgtatcaggtctaacaaagccaggggtgactcggtggacgtggatatgacgatgaagtaaagggttgcgtagttgcgataggttacaagcgagggcacgtcgttggtctgctcagaagacgagtgggaagtaccctctgccgcgagtagtgggggcagggggagaaagttgcatgcgccgcttggcctatttgacacgaggctgaagatctcggcgagaagacgctgttggatgctcgtttcctataccccaaatgtgagctgttgtatttcgtatatttgataagcatgcggtgtccataccagctgggtatagaatttagtcagacggggttggccttggccattgaagaccaacactgcgttgatcatggcgcagggtgcttctcgtgagacattagcttatagaaacgccgagagcgaggttggagatgtcgatattacgttgcgcgactggttacaagcttcgcatggcggggcattaggtcactgttcgcacctgatgctctaggtacagggctgtaagacggaatgctaagtatcgcaagtgaatacgcgtagatacggagcggaggacagtgggcatttaccgagatttagcggcgcagtgcttgcatacagcgggcagtattcattcaacaggccgca

SEQ ID NO: 14624 - DNA, 579 bp, Muscodor strobelii
  misc_feature: SGI cDNA ID NO. 564822
  misc_feature: Encodes the peptide sequence at SEQ ID NO 14625
atgatcaacgcagtgttggtcttcaatggccaaggccaaccccgtctgactaaattctatacccagctggaaacgagcatccaacagcgtcttctcgccgagatcttcagcctcgtgtcaaataggccaagcggcgcatgcaactttctccccctgcccccactactcgcggcagagggtacttcccactcgtcttctgagcagaccaacgacgtgccctcgcttgtaacctatcgcaactacgcaaccctttacttcatcgtcatatccacgtccaccgagtcacccctggctttgttagacctgatacaagtttacgttgaatcactggatagactcttcgagcaagtctgcgagctagacttgatcttcaacttcgagaccctccacgctaccctcagcgagatgattgtcggcggtgttgtgatcgagacgaatctcgacaagattgtggctggggtcaaggcacagggcactgttgcgaagagacctgtcaatgagtctcggggttctgcactcggttctggactcggtgctgggttatctatgggagggaactttgtatggcctggcaggtga

SEQ ID NO: 14625 - protein, 192 aa, Muscodor strobelii
  misc_feature: SGI Peptide ID NO. 564822
  misc_feature (1)..(161): Pfam Id: PF01217 Pfam Desc: Clathrin adaptor complex small chain
  misc_feature (76)..(161): Pfam Id: PF01217 Pfam Desc: Clathrin adaptor complex small chain
  misc_feature (1)..(50): Pfam Id: PF01217 Pfam Desc: Clathrin adaptor complex small chain
  misc_feature (1)..(192): NCBI GI: 46123259 Blast Desc: FG06007.1 [Gibberella zeae PH-1]
  misc_feature (1)..(192): NCBI GI: 256732549 Blast Desc: [Nectria haematococca mpVI 77-13-4]
  misc_feature (1)..(192): NCBI GI: 261357194 Blast Desc: AP-3 complex subunit sigma [Verticillium albo-atrum VaMs.102]
  misc_feature (1)..(167): NCBI GI: 39968683 Blast Desc: conserved [Magnaporthe grisea 70-15] gi|145013965|gb|EDJ98606.1| conserved [Magnaporthe grisea 70-15]
  misc_feature (1)..(179): NCBI GI: 116205299 Blast Desc: conserved [Chaetomium globosum CBS 148.51] gi|88176661|gb|EAQ84129.1| conserved [Chaetomium globosum CBS 148.51]
  misc_feature (1)..(192): NCBI GI: 85110058 Blast Desc: AP-3 complex subunit sigma [Neurospora crassa OR74A] gi|28924886|gb|EAA33980.1| AP-3 complex subunit sigma [Neurospora crassa OR74A] gi|38524244|emb|CAE75709.1| related to AP-3 complex
  misc_feature (1)..(192): NCBI GI: 171689800 Blast Desc: protein product [Podospora anserina] gi|170944862|emb|CAP70974.1| protein product [Podospora anserina]
  misc_feature (1)..(192): NCBI GI: 156043455 Blast Desc: SS1G_10731 [Sclerotinia sclerotiorum 1980] gi|154695118|gb|EDN94856.1| SS1G_10731 [Sclerotinia sclerotiorum 1980]
  misc_feature (1)..(192): NCBI GI: 189198592 Blast Desc: AP-2 complex subunit sigma-1 [Pyrenophora tritici-repentis Pt-1C-BFP] gi|187982732|gb|EDU48220.1| AP-2 complex subunit sigma-1 [Pyrenophora tritici-repentis Pt-1C-BFP]
  misc_feature (1)..(169): NCBI GI: 169624632 Blast Desc: SNOG_15576 [Phaeosphaeria nodorum SN15] gi|160705211|gb|EAT76951.2| SNOG_15576 [Phaeosphaeria nodorum SN15]
MINAVLVFNGQGQPRLTKFYTQLETSIQQRLLAEIFSLVSNRPSGACNFLPLPPLLAAEGTSHSSSEQTNDVPSLVTYRNYATLYFIVISTSTESPLALLDLIQVYVESLDRLFEQVCELDLIFNFETLHATLSEMIVGGVVIETNLDKIVAGVKAQGTVAKRPVNESRGSALGSGLGAGLSMGGNFVWPGR

SEQ ID NO: 14626 - DNA, 1088 bp, Muscodor strobelii
  misc_feature: SGI EST ID NO. CUFF.34953.2
  misc_feature: Variant of the nucleotide sequence at SEQ ID NO 14624
gctgtatgcaagcactgcgccgctaaatctcggtaaatgcccactgtcctccgctccgtatctacgcgtattcacttgcgatacttagcattccgtcttacagccctgtacctagagcatcaggtgcgaacagtgacctaatgccccgccatgcgaagcttgtaaccagtcgcgcaaccaccctgcgccatgatcaacgcagtgttggtcttcaatggccaaggccaaccccgtctgactaaattctatacccagctggaaacgagcatccaacagcgtcttctcgccgagatcttcagcctcgtgtcaaataggccaagcggcgcatgcaactttctccccctgcccccactactcgcggcagagggtacttcccactcgtcttctgagcagaccaacgacgtgccctcgcttgtaacctatcgcaactacgcaaccctttacttcatcgtcatatccacgtccaccgagtcacccctggctttgttagacctgatacaagtttacgttgaatcactggatagactcttcgagcaagtctgcgagctagacttgatcttcaacttcgagaccctccacgctaccctcagcgagatgattgtcggcggtgttgtgatcgagacgaatctcgacaagattgtggctggggtcaaggcacagggcactgttgcgaagagacctgtcaatgagtctcggggttctgcactcggttctggactcggtgctgggttatctatgggagggaactttgtatggcctggcaggtgaagagtctagcgaaacagatactatcatagtggagttcaacggcgtttcggcgagggcattcaagatggcataaaggcgatatgacatgatttcaccacggagaacgcatcttgggcaggaaatggtatatttttacacgttccaacacgttatggtatctccgtaatccgtaactccgtccatgctatgtgtgagtggtgctatatcgtacaaggcaacgtctctatttcttgctcgtggatgtcggcgcatcgggcgtacgtcgttcgtgtctctgtgaaggggagagggattcgatagtcccccagaatgcatttcgt

SEQ ID NO: 14627 - DNA, 801 bp, Muscodor strobelii
  misc_feature: SGI cDNA ID NO. 564823
  misc_feature: Encodes the peptide sequence at SEQ ID NO 14628
atggctcagaccaccgcaaccacattctacgcgctccagcagcctagtccgaccctcggctgggagagcttcgccgcctacgagcctgcgccggacctcttccagtcgtccttcggggcccagcagccgcagtcgtctgcgctggctcccctgacaaatgagtggctttacggactagaatttggtggcaacatcgacatcgactttttgggtttgggtgcagcgccagggacagcagcggcgactgggggtattcttttagacggttcatcaggagttggaggagttgaaagcggactagagtcgggtataaactgggcgcttccagatcttggggtgcagtcacatgagaccactccccttctcggaagcgaagtgtcaccacccgcaaatctagatgacatgctcccctctggcgatgaatcatcaaactttctcttcaactcgttgcaagacgccaccatgccgtcggctacttctatcacagcgggtcactcggaccaattccctatgtcatctccgtccgacacgtacgagcaaccacagtcgtctacctcgtcgtcaaacaaacggcggtctccccctgtcgaccacgccaccgctctcaagcgccagcgcaacaacgtcgccgctcgcaagtatcgtcagaagcgcatcgatcgcatcgccgagctcgaggcagagctggaggaagtgaagcaggaccgggacgaccttcgcctgcgcctcgcgcgccaggaagcagagacggctgctctgcggaccatgctagggatgaaatctggagaagccaagagttag

SEQ ID NO: 14628 - protein, 266 aa, Muscodor strobelii
  misc_feature: SGI Peptide ID NO. 564823
  misc_feature (202)..(263): NCBI GI: 48094181 Blast Desc: b-ZIP transcription factor IDI-4 [Podospora anserina]
  misc_feature (202)..(263): NCBI GI: 170940346 Blast Desc: protein product [Podospora anserina]
  misc_feature (199)..(260): NCBI GI: 256724542 Blast Desc: NECHADRAFT_102224 [Nectria haematococca mpVI 77-13-4]
  misc_feature (202)..(259): NCBI GI: 164423420 Blast Desc: NCU08055 [Neurospora crassa OR74A] gi|157070086|gb|EAA35950.2| [Neurospora crassa OR74A]
  misc_feature (203)..(262): NCBI GI: 145604947 Blast Desc: MGG_01990 [Magnaporthe grisea 70-15] gi|145012856|gb|EDJ97497.1| MGG_01990 [Magnaporthe grisea 70-15] gi|194338885|gb|ACF49359.1| IDI4 [Magnaporthe oryzae]
  misc_feature (181)..(257): NCBI GI: 238496399 Blast Desc: conserved [Aspergillus flavus NRRL3357] gi|220694315|gb|EED50659.1| conserved [Aspergillus flavus NRRL3357]
  misc_feature (181)..(257): NCBI GI: 169774965 Blast Desc: [Aspergillus oryzae RIB40] gi|83769813|dbj|BAE59948.1| protein product [Aspergillus oryzae]
  misc_feature (197)..(260): NCBI GI: 46126971 Blast Desc: FG07863.1 [Gibberella zeae PH-1]
  misc_feature (169)..(262): NCBI GI: 261199214 Blast Desc: [Ajellomyces dermatitidis SLH14081] gi|239594216|gb|EEQ76797.1| [Ajellomyces dermatitidis SLH14081] gi|239615379|gb|EEQ92366.1| [Ajellomyces dermatitidis ER-3]
  misc_feature (180)..(261): NCBI GI: 67522711 Blast Desc: AN1812.2 [Aspergillus nidulans FGSC A4] gi|19880101|gb|AAM00250.1|AF361222_1 JUN-like bZIP transcription factor [Emericella nidulans] gi|40745821|gb|EAA64977.1| AN1812.2
MAQTTATTFYALQQPSPTLGWESFAAYEPAPDLFQSSFGAQQPQSSALAPLTNEWLYGLEFGGNIDIDFLGLGAAPGTAAATGGILLDGSSGVGGVESGLESGINWALPDLGVQSHETTPLLGSEVSPPANLDDMLPSGDESSNFLFNSLQDATMPSATSITAGHSDQFPMSSPSDTYEQPQSSTSSSNKRRSPPVDHATALKRQRNNVAARKYRQKRIDRIAELEAELEEVKQDRDDLRLRLARQEAETAALRTMLGMKSGEAKS

SEQ ID NO: 14629 - DNA, 1444 bp, Muscodor strobelii
  misc_feature: SGI EST ID NO. CUFF.34860.0
  misc_feature: Variant of the nucleotide sequence at SEQ ID NO 14627
gcccagcgtctctttctagagtctgcatgggctgggactgcgcggtaagctgcagagcacttggagcacaaaacaccggctctcccccctccttcgcctcgctcttctctttcttctcctcaaccacttccgggaaccaaccccaacccctccttctccgccgttcgagacaaggagcggcgcgtctgtacaattaccctcaattgtctaagcagtgatctctcggcctcagacggaggccatcctattatatcatcatggctcagaccaccgcaaccacattctacgcgctccagcaggtcatcttcgccttctgtccaccgtgtcagtccagcgtcgtctacaacccagcctagtccgaccctcggctgggagagcttcgccgcctacgagcctgcgccggacctcttccagtcgtccttcggggcccagcagccgcagtcgtctgcgctggctcccctgacaaatgagtggctttacggactagaatttggtggcaacatcgacatcgactttttgggtttgggtgcagcgccagggacagcagcggcgactgggggtattcttttagacggttcatcaggagttggaggagttgaaagcggactagagtcgggtataaactgggcgcttccagatcttggggtgcagtcacatgagaccactccccttctcggaagcgaagtgtcaccacccgcaaatctagatgacatgctcccctctggcgatgaatcatcaaactttctcttcaactcgttgcaagacgccaccatgccgtcggctacttctatcacagcgggtcactcggaccaattccctatgtcatctccgtccgacacgtacgagcaaccacagtcgtctacctcgtcgtcaaacaaacggcggtctccccctgtcgaccacgccaccgctctcaagcgccagcgcaacaacgtcgccgctcgcaagtatcgtcagaagcgcatcgatcgcatcgccgagctcgaggcagagctggaggaagtgaagcaggaccgggacgaccttcgcctgcgcctcgcgcgccaggaagcagagacggctgctctgcggaccatgctagggatgaaatctggagaagccaagagttagcctttgcctgccagcgctgggaatagatgcattgtggagtttcgggtagctttgaaatttaatatctagccttgtttgcttttccactcagacgatgtcggctcacgtttctggtctcatatgtgaacgcatgttcatttgtaaccatcgatatagggaacgccttgtcatcatgtgtattatagctgttgtgatctcatgtgctcttctatcgaaccacttaccccagcttgctacgatgatgctcgcatactctacattttctgtttacatgaaaacccgtctctccggacattatatagtgcctggctttgaagcatttggtaagaaaggc

SEQ ID NO: 14630 - DNA, 2004 bp, Muscodor strobelii
  misc_feature: SGI cDNA ID NO. 564825
  misc_feature: Encodes the peptide sequence at SEQ ID NO 14631
atggcccattccggttatccaggcctaggtaggccgcttcgagcatactctttccagcctccaagttatggtgaagacagatacacatactacgcaatgggctgccacggcaactgttacggatctcattcagtgcttttacccgtgcgtgaggtcgcgatgatgaagctcatggatcagctgacggacaagcccgactggaataaaaaagtctttgatgaaaacatcgtaggcagatggcgagaagaggcactcaattaccccaacgatatcttatggaacgctgctacaaaagggaaatatgtcgatatgaagccattacaaggaatcatgactaataggatgattgatttctgtattcaagagctccgcagtaaggccaagtactttgaaaaaaccggcattatcccgactctcgatgcctcagcttgtatagtcaaatcagacaagctggttgactcggagcttcacaatgcactcgctcaagcatttgataaactaagagtcgaacaaagtgataatgcagattggcaccccggctctgacatgaaagtgcaagacctcgttcatccgtccctctaccctttggtttatggcgagaccaaggtcttgaaggacgaggtagttggtgttgcagatgccattggtaaatggactggcaaaggagaacccatcattctggagaaagaagaagaaccatccagatcagcctacgacttcgctgtcggcggctcaaggccgccagattcattttggtctcagacataccagtggcttcctgccaacctagctttccaggccagtggttccgtgaaattcacgagctatatcaataatctccatcctcacagacacgcggagatatacaagaccattgaaaatctcattgaaaaagcgcttccgatgtggaatcaatgcttgtcggccgtccaaggctacaatgactttattgccgcaggccgcaaaagatcgaggttctcccttcccgataaccccgatgacgagaacgaaagcctttggtctcctcccgtcgcagaggcggcggatattgaagccaagtgggatgagatcaatgaagcgaattcaggctggagtgacgaatccgttgaggaaaatcatcgcaaatgggaagcgatccggacacccatcgttcccgagcccaacgagtttgtagacattgattattcaccgcctgagagcctagcacgcaattttcgagattctggccttcaggttatcgtcaagatggccacaatagagctagcacccgagaaaccagaattcccagcagggtcttggcatgtcgaaggccaagtgaacgaattgatatgcgccactgcgctttactatgtagatagtgagaacatcactgatagcagtcttgcattccgcatgcagacggacgcctatctgcaggacaaggctcctttctcggaggttggccaagacagctacaattggctagaaagagttcacggcacacatcttggtaactcaggaagttgtctacaaaactacggaagcgtcgaaacgaaggcgggtcgactgctcgcatttcccaatgttttccagcattctgtatccccattccgtctttcagatccaaataagccaggaaggagaagtttcattgccttgtggctcgtggaccctcataggaggatcatctctacagcgaatgtccctccacagcagtgtgattggtggctagaatcattactaggcacgacaccaagctcacgtcaagatgcactctcaaagatgccgccggaaatcctccagcttcttaaagaaagaaatcttctagatggagacgcagtcacacctaaaggtaggctaccacctgaactgatgaatatgattcgagaacacttcgatgctccggtcatgacccgtgaagaggccgaattgcatcgagagaaactcatgaaagctcgaacaaacttccacggcgaaacaaacgggcattggaataatcacaactacaatttctgcgagcattag

SEQ ID NO: 14631 - protein, 667 aa, Muscodor strobelii
  misc_feature: SGI Peptide ID NO. 564825
  misc_feature (55)..(667): NCBI GI: 154305657 Blast Desc: BC1G_07643 [Botryotinia fuckeliana B05.10] gi|150853162|gb|EDN28354.1| BC1G_07643 [Botryotinia fuckeliana B05.10]
  misc_feature (6)..(667): NCBI GI: 46126697 Blast Desc: FG07726.1 [Gibberella zeae PH-1]
  misc_feature (4)..(667): NCBI GI: 169615332 Blast Desc: SNOG_10824 [Phaeosphaeria nodorum SN15] gi|160702938|gb|EAT82218.2| SNOG_10824 [Phaeosphaeria nodorum SN15]
  misc_feature (1)..(667): NCBI GI: 256728217 Blast Desc: NECHADRAFT_54318 [Nectria haematococca mpVI 77-13-4]
  misc_feature (31)..(667): NCBI GI: 171678443 Blast Desc: protein product [Podospora anserina] gi|170937291|emb|CAP61948.1| protein product [Podospora anserina]
  misc_feature (2)..(667): NCBI GI: 256734989 Blast Desc: NECHADRAFT_90594 [Nectria haematococca mpVI 77-13-4]
  misc_feature (6)..(667): NCBI GI: 145602219 Blast Desc: MGG_05090 [Magnaporthe grisea 70-15] gi|145010656|gb|EDJ95312.1| MGG_05090 [Magnaporthe grisea 70-15]
  misc_feature (6)..(667): NCBI GI: 171680980 Blast Desc: protein product [Podospora anserina] gi|170940448|emb|CAP65675.1| protein product [Podospora anserina]
  misc_feature (6)..(664): NCBI GI: 116191489 Blast Desc: CHGG_05462 [Chaetomium globosum CBS 148.51] gi|88181375|gb|EAQ88843.1| CHGG_05462 [Chaetomium globosum CBS 148.51]
  misc_feature (6)..(523): NCBI GI: 169622477 Blast Desc: SNOG_14463 [Phaeosphaeria nodorum SN15] gi|160704784|gb|EAT78003.2| SNOG_14463 [Phaeosphaeria nodorum SN15]
MAHSGYPGLGRPLRAYSFQPPSYGEDRYTYYAMGCHGNCYGSHSVLLPVREVAMMKLMDQLTDKPDWNKKVFDENIVGRWREEALNYPNDILWNAATKGKYVDMKPLQGIMTNRMIDFCIQELRSKAKYFEKTGIIPTLDASACIVKSDKLVDSELHNALAQAFDKLRVEQSDNADWHPGSDMKVQDLVHPSLYPLVYGETKVLKDEVVGVADAIGKWTGKGEPIILEKEEEPSRSAYDFAVGGSRPPDSFWSQTYQWLPANLAFQASGSVKFTSYINNLHPHRHAEIYKTIENLIEKALPMWNQCLSAVQGYNDFIAAGRKRSRFSLPDNPDDENESLWSPPVAEAADIEAKWDEINEANSGWSDESVEENHRKWEAIRTPIVPEPNEFVDIDYSPPESLARNFRDSGLQVIVKMATIELAPEKPEFPAGSWHVEGQVNELICATALYYVDSENITDSSLAFRMQTDAYLQDKAPFSEVGQDSYNWLERVHGTHLGNSGSCLQNYGSVETKAGRLLAFPNVFQHSVSPFRLSDPNKPGRRSFIALWLVDPHRRIISTANVPPQQCDWWLESLLGTTPSSRQDALSKMPPEILQLLKERNLLDGDAVTPKGRLPPELMNMIREHFDAPVMTREEAELHREKLMKARTNFHGETNGHWNNHNYNFCEH

SEQ ID NO: 14632 - DNA, 1762 bp, Muscodor strobelii
  misc_feature: SGI EST ID NO. CUFF.34799.0
  misc_feature: Variant of the nucleotide sequence at SEQ ID NO 14630
caaagtgataatgcagattggcaccccggctctgacatgaaagtgcaagacctcgttcatccgtccctctaccctttggtttatggcgagaccaaggtcttgaaggacgaggtagttggtgttgcagatgccattggtaaatggactggcaaaggagaacccatcattctggagaaagaagaagaaccatccagatcagcctacgacttcgctgtcggcggctcaaggccgccagattcattttggtctcagacataccagtggcttcctgccaacctagctttccaggccagtggttccgtgaaattcacgagctatatcaataatctccatcctcacagacacgcggagatatacaagaccattgaaaatctcattgaaaaagcgcttccgatgtggaatcaatgcttgtcggccgtccaaggctacaatgactttattgccgcaggccgcaaaagatcgaggttctcccttcccgataaccccgatgacgagaacgaaagcctttggtctcctcccgtcgcagaggcggcggatattgaagccaagtgggatgagatcaatgaagcgaattcaggctggagtgacgaatccgttgaggaaaatcatcgcaaatgggaagcgatccggacacccatcgttcccgagcccaacgagtttgtagacattgattattcaccgcctgagagcctagcacgcaattttcgagattctggccttcaggttatcgtcaagatggccacaatagagctagcacccgagaaaccagaattcccagcagggtcttggcatgtcgaaggccaagtgaacgaattgatatgcgccactgcgctttactatgtagatagtgagaacatcactgatagcagtcttgcattccgcatgcagacggacgcctatctgcaggacaaggctcctttctcggaggttggccaagacagctacaattggctagaaagagttcacggcacacatcttggtaactcaggaagttgtctacaaaactacggaagcgtcgaaacgaaggcgggtcgactgctcgcatttcccaatgttttccagcattctgtatccccattccgtctttcagatccaaataagccaggaaggagaagtttcattgccttgtggctcgtggaccctcataggaggatcatctctacagcgaatgtccctccacagcagtgtgattggtggctagaatcattactaggcacgacaccaagctcacgtcaagatgcactctcaaagatgccgccggaaatcctccagcttcttaaagaaagaaatcttctagatggagacgcagtcacacctaaaggtaggctaccacctgaactgatgaatatgattcgagaacacttcgatgctccggtcatgacccgtgaagaggccgaattgcatcgagagaaactcatgaaagctcgaacaaacttccacggcgaaacaaacgggcattggaataatcacaactacaatttctgcgagcattagccccgcatgccttccttcataggttgcccacattgttgccattctcatcgttctcgcatgaatgatagggatgaacatgggcgagataggttactaggtgaccacgcgcaccctacgtagctaaggtatttgtagggaggctgtccaatagaggaggacattgacataagcggcgctcatctcagccatctatagttgacatcacagtacttgctccagactccagtgctttctatctacaagctccgtattaattatgatgctacca

SEQ ID NO: 14633 - DNA, 2433 bp, Muscodor strobelii
  misc_feature: SGI cDNA ID NO. 564826
  misc_feature: Encodes the peptide sequence at SEQ ID NO 14634
atggatgaacttgacaaatcacggaaccaatggcagaatgcgattgaatcgaatttcgacgaactcacaagggaagtgaatggtgaccccaacctcagcaagaccaaaaagcaaagagatctgcaggttttaagcagggctaagacagcaatccagaaaaggaaatcagtaaagtcctgtaaagatgaacaatcaggacaagaagatatatcatccccaggctttaagggatgtgttatgtacttcaagaaggatacttcgggcaaaagatggaaaggctataccgaccccagcatcaaaaatttgaaatatcctaatcagaaaatcaatatggaagatttgatgaagccaggcaaggacaacccactccgtcgcactcttggcgaagacaccttcaggtacttccattttccagccaacaacatgaaatggattgagacggcaatcgccattattcacaacgacattccgggcgagcttgatccccagaccaagacgggccagcttctggctcgcgaattctggcgtgctgacacaaatatatcccagatcaagatccctcatcactcgcaagcacaagtaccaagattgctaccttatctccactgggagacaagcagcaggcgcgcaaaaatggttcaaattgttgaggaggtgattccacccaaaaggaaaaggaaaagggcccaaaatatgataatcgaagtgatggaggagaggaaaaagagatttcagcctatccggaaaccaacaactcggcattatctcggttcatattttatgaatgcggccaaagtcgccgaggcaatggattacgaggacgacgagaaacttctacgcgaatctgtcaacgacaaaccccctttgcatgtccgacggacactggatcaatattacttcccaactctcgaagacacatctattcgagatagagatcaagtcgtcttcagagagactcgagataccagacaggtcacaaaagctagcgaaactagagaggccaggcagatcgaagagactaacgacaccggagacaccggagacaacggagagagtagaaagtggggaccccgggttgtcatggtagatcagctttggctttggattataaacgaaggtaatgttacaaggcggatgggtaggaacaaacctgatccatcaggtgttcataagagcctacgagagcggcttgaacacacaacgggagagatcaattcgatatacgacttggaagtcatggatatgtttcaatcagcaatcgggaccgttactgagcacacagcaatagcctacgacagcttttggaagaatgtggccatagtatcgaccgatctactttcagatagccaagcatattctcatcacagaaaattagacattaacccggaggggattctgcttcaggaagctcatgatatcgcagaagaattgaggatcatgaagagtgtcttcagtgatcaatggagagttactcgagatttcgaaaggtatctggccattccaggggaaaagagcacacgctcgttcccgaccgaagacttcgctactataatccagcaatcagtagcaatggcactagagcaacaggctatcaatcaaagacagccaccaactgatactcaatccctcgcaacacccgaagccataggagcacacaagaaacacgatacgcaacaagcagctcacaaggcagcgctgcttctggaacacattgaaagtcgtcaaacagaaattcaatacctagaagaatcagcgacaagaacatgtcaagagatcgagagactgctttccttgaagcaacagcaggcctcgatagtggaagcgaaggcggctctacgtagagccgacgtaagcgtcagacaaggacgtgcgatcatggcacttacgctcgtgaccattttcttccttccgcttggcttcatcgcgacgttttttggtatgaacaatcgcgagatcaacggagcagaatggatgacactcaatgaacaaattcgatatatattcatcgtatctacggtagctttcatagtgattataacagttgcattcagcgtagggtttcgggctttttttaaggccttttcgaagcttgctttccatgttcctttagtatggattggtgaatacacaggaatttacgaatggtggcgagccagtgcagttcatcatggaaacctagagcgacgcagtcaacgtattctaaggaaggttgagcaacataaggagaagaagaggaagcagcacacacctcacgacaatggtgtgaaagccggtgccgcgagcttggagacaacaatatccgccactggcacagattttggcactgcagctgttgaagggttggggcaggagaatggacatctcgcaccctcagaacgatggttctcgttcagattcggcaagcgaaaatcagagataccgagcttagcttag

SEQ ID NO: 14634 - protein, 810 aa, Muscodor strobelii
  misc_feature: SGI Peptide ID NO. 564826
  misc_feature (49)..(694): NCBI GI: 171678473 Blast Desc: protein product [Podospora anserina] gi|170937306|emb|CAP61963.1| protein product [Podospora anserina]
  misc_feature (104)..(729): NCBI GI: 116204025 Blast Desc: CHGG_09896 [Chaetomium globosum CBS 148.51] gi|88176024|gb|EAQ83492.1| CHGG_09896 [Chaetomium globosum CBS 148.51]
  misc_feature (74)..(653): NCBI GI: 85092656 Blast Desc: NCU09566 [Neurospora crassa OR74A] gi|28920924|gb|EAA30255.1| [Neurospora crassa OR74A]
  misc_feature (74)..(636): NCBI GI: 116204327 Blast Desc: CHGG_10047 [Chaetomium globosum CBS 148.51] gi|88176175|gb|EAQ83643.1| CHGG_10047 [Chaetomium globosum CBS 148.51]
  misc_feature (377)..(683): NCBI GI: 154292567 Blast Desc: BC1G_14807 [Botryotinia fuckeliana B05.10] gi|150845888|gb|EDN21081.1| BC1G_14807 [Botryotinia fuckeliana B05.10]
  misc_feature (153)..(685): NCBI GI: 145230782 Blast Desc: An01g12480 [Aspergillus niger] gi|134055776|emb|CAK37300.1| protein product [Aspergillus niger]
  misc_feature (235)..(697): NCBI GI: 212535284 Blast Desc: ankyrin repeat-containing protein, [Penicillium marneffei ATCC 18224] gi|210070197|gb|EEA24287.1| ankyrin repeat-containing protein, [Penicillium marneffei ATCC 18224]
  misc_feature (188)..(700): NCBI GI: 169783090 Blast Desc: [Aspergillus oryzae RIB40] gi|83774751|dbj|BAE64874.1| protein product [Aspergillus oryzae]
  misc_feature (188)..(700): NCBI GI: 238492835 Blast Desc: ankyrin repeat protein [Aspergillus flavus NRRL3357] gi|220696148|gb|EED52490.1| ankyrin repeat protein [Aspergillus flavus NRRL3357]
  misc_feature (187)..(685): NCBI GI: 121701093 Blast Desc: ankyrin repeat protein [Aspergillus clavatus NRRL 1] gi|119396954|gb|EAW07385.1| ankyrin repeat protein [Aspergillus clavatus NRRL 1]
MDELDKSRNQWQNAIESNFDELTREVNGDPNLSKTKKQRDLQVLSRAKTAIQKRKSVKSCKDEQSGQEDISSPGFKGCVMYFKKDTSGKRWKGYTDPSIKNLKYPNQKINMEDLMKPGKDNPLRRTLGEDTFRYFHFPANNMKWIETAIAIIHNDIPGELDPQTKTGQLLAREFWRADTNISQIKIPHHSQAQVPRLLPYLHWETSSRRAKMVQIVEEVIPPKRKRKRAQNMIIEVMEERKKRFQPIRKPTTRHYLGSYFMNAAKVAEAMDYEDDEKLLRESVNDKPPLHVRRTLDQYYFPTLEDTSIRDRDQVVFRETRDTRQVTKASETREARQIEETNDTGDTGDNGESRKWGPRVVMVDQLWLWIINEGNVTRRMGRNKPDPSGVHKSLRERLEHTTGEINSIYDLEVMDMFQSAIGTVTEHTAIAYDSFWKNVAIVSTDLLSDSQAYSHHRKLDINPEGILLQEAHDIAEELRIMKSVFSDQWRVTRDFERYLAIPGEKSTRSFPTEDFATIIQQSVAMALEQQAINQRQPPTDTQSLATPEAIGAHKKHDTQQAAHKAALLLEHIESRQTEIQYLEESATRTCQEIERLLSLKQQQASIVEAKAALRRADVSVRQGRAIMALTLVTIFFLPLGFIATFFGMNNREINGAEWMTLNEQIRYIFIVSTVAFIVIITVAFSVGFRAFFKAFSKLAFHVPLVWIGEYTGIYEWWRASAVHHGNLERRSQRILRKVEQHKEKKRKQHTPHDNGVKAGAASLETTISATGTDFGTAAVEGLGQENGHLAPSERWFSFRFGKRKSEIPSLA

SEQ ID NO: 14635 - DNA, 1604 bp, Muscodor strobelii
  misc_feature: SGI EST ID NO. CUFF.34821.0
  misc_feature: Variant of the nucleotide sequence at SEQ ID NO 14633
cgaccaatgctcacgcgtctttttcgatcgcactaaaccacttgaccagagaccagaagtcatggatatgtttcaatcagcaatcgggaccgttactgagcacacagcaatagcctacgacagcttttggaagaatgtggccatagtatcgaccgatctactttcagatagccaagcatattctcatcacagaaaattagacattaacccggaggggattctgcttcaggaagctcatgatatcgcagaagaattgaggatcatgaagagtgtcttcagtgatcaatggagagttactcgagatttcgaaaggtatctggccattccaggggaaaagagcacacgctcgttcccgaccgaagacttcgctactataatccagcaatcagtagcaatggcactagagcaacaggctatcaatcaaagacagccaccaactgatactcaatccctcgcaacacccgaagccataggagcacacaagaaacacgatacgcaacaagcagctcacaaggcagcgctgcttctggaacacattgaaagtcgtcaaacagaaattcaatacctagaagaatcagcgacaagaacatgtcaagagatcgagagactgctttccttgaagcaacagcaggcctcgatagtggaagcgaaggcggctctacgtagagccgacgtaagcgtcagacaaggacgtgcgatcatggcacttacgctcgtgaccattttcttccttccgcttggcttcatcgcgacgttttttggtatgaacaatcgcgagatcaacggagcagaatggatgacactcaatgaacaaattcgatatatatgttcgttatttggccttgctcaagaatcttcgtgttctcatgctgactcttttttgttttagtcatcgtatctacggtagctttcatagtgattataacagttgcattcagcgtagggtttcgggctttttttaaggccttttcgaagcttgctttccatgttcctttagtatggattggtgaatacacaggaatttacgaatggtggcgagccagtgcagttcatcatggaaacctagagcgacgcagtcaacgtattctaaggaaggttgagcaacataaggagaagaagaggaagcagcacacacctcacgacaatggtgtgaaagccggtgccgcgagcttggagacaacaatatccgccactggcacagattttggcactgcagctgttgaagggttggggcaggagaatggacatctcgcaccctcagaacgatggttctcgttcagattcggcaagcgaaaatcagagataccgagcttagcttagcaatttggtctttaaatgactccatgaaatgatagcttaatagtcatttgcgcatttgaacaataaaaataaaaaccgggagagctaaacctataggtgtatttgacccatccacgcaacattcctgggtgaccgggagaatgagaatgagaagtgcggcgaagtgaaggagagaaatttgggaaagggagaatgcagagtgtcacaacatcaaaataagtttgacaagtccacaatgcctcgcgctcgttgcctgtgtattcaaaattgtaatgaggtgctcc

SEQ ID NO: 14636 - DNA, 1737 bp, Muscodor strobelii
  misc_feature: SGI cDNA ID NO. 564827
  misc_feature: Encodes the peptide sequence at SEQ ID NO 14637
atgaggagtctaatagaactacccgcgagcttgctactactccttgcgtccgccgcggccgggagtatcatcccgccgtcggaatggctcccggagggacagactgtaattgcagcctccgactcgggctcgggacgcaagggagcagtcgcttgcgaaagcaaagtctgcagccagatcggcgttgatctcttggcgcaagggggaaatgcggttgacgcatggattggcactcaactctgtgtcggcgtcatcggcatgtaccattctggtcttggcggaggaggattcgctataattcgagaccagtcgggagaatatactgtcattgactaccgcgaagccgcgccggctgctgcttccaaggatatgtatagagataatgtgatgggtagtgtttggacgggactggctgccggtgtgcctggcgaactacgaggactcgaggatgcacacatcaagtttggctccctgccttggaaggacgttgttatgccggcggctctcgtagctcgcgatggattttccatcaccgaagatacagtgcgatacatggaatacggtattatgtctgcaggttggaacttcttggtagacgatccgtcctgggctctggacttcgcacctaatggatccctgttgaaattgggcgagacgatgtatagaaagcgctacgctgacacacttgaaaaggtcgcagagggtgctagcacattctacactggcgagatggcaaatgcaacaatagcaacaatccaaaaagacaacggcacaatgacactacaggacatgtccgaatacaaagccatcacccgccgctcggtgagcatttcataccgcgactataagctcttctcatccggagcaccaagcagcggtgcagtcgccctcagcacactcaagacaatggaaggctataacacagccgatacagcaaacactaatctcacactccaccgcttcgacgagtccatgcgttttgcctacggtgcccaccaagcactgggagatcccgattatctctcagatacagacatgctagaagataaaatgctctcagcctcggaaactgcatcaatccgcgggaaaatccaagataactccacgcagcccgtggagaactacaacccggataaagtctacgtgcccgatagccacggcacatcacacatcgtaaccgcggacgcctcaggaatggcagtaagcagcacaacgacgataaacctcttattcggcaatctccaaatggttccctccacaggcgtaatcctcaacaacgaaatgaacgatttctccatcccaggcgtacgcaatgaattcggttacgcgcctagcgaggcgaattacatccgccctggcaagcggccactatcttcaataacaccgatcatcattgaagattccgacggcaatttattcgcaaccgttggcgctgccggcggctcgcgaatcataagctcgacgacacaggttgtatggcatctactagagcacggcatgaccatgagacaatcgatccgtgaacccaggttccacgaccagcttatgccgaatactgcagtgtttgagtacacgtttgacaatgcgacggtcgcgagtatggcagagaagggccataacgttacgtgggtccgcgagggtgttagcgctgttcagggcattagaatagagtctgacgggtcgtttgaatctgtttctgagattagacagaagaatagcggtggtctgacgacttag

SEQ ID NO: 14637 - protein, 578 aa, Muscodor strobelii
  misc_feature: SGI Peptide ID NO. 564827
  misc_feature (62)..(572): Pfam Id: PF01019 Pfam Desc: Gamma-glutamyltranspeptidase
  misc_feature (34)..(577): NCBI GI: 261357022 Blast Desc: gamma-glutamyltranspeptidase [Verticillium albo-atrum VaMs.102]
  misc_feature (44)..(577): NCBI GI: 46138689 Blast Desc: FG10859.1 [Gibberella zeae PH-1]
  misc_feature (9)..(576): NCBI GI: 212536580 Blast Desc: gamma-glutamyltranspeptidase [Penicillium marneffei ATCC 18224] gi|210070845|gb|EEA24935.1| gamma-glutamyltranspeptidase [Penicillium marneffei ATCC 18224]
  misc_feature (45)..(576): NCBI GI: 189193717 Blast Desc: gamma-glutamyltranspeptidase 1 precursor [Pyrenophora tritici-repentis Pt-1C-BFP] gi|187978761|gb|EDU45387.1| gamma-glutamyltranspeptidase 1 precursor [Pyrenophora Pt-1C-BFP]
  misc_feature (9)..(576): NCBI GI: 242796158 Blast Desc: gamma-glutamyltranspeptidase [Talaromyces stipitatus ATCC 10500] gi|218719329|gb|EED18749.1| gamma-glutamyltranspeptidase [Talaromyces stipitatus ATCC 10500]
  misc_feature (42)..(577): NCBI GI: 256729095 Blast Desc: NECHADRAFT_93304 [Nectria haematococca mpVI 77-13-4]
  misc_feature (43)..(575): NCBI GI: 261359351 Blast Desc: gamma-glutamyltranspeptidase [Verticillium albo-atrum VaMs.102]
  misc_feature (44)..(575): NCBI GI: 156043873 Blast Desc: SS1G_10940 [Sclerotinia sclerotiorum 1980] gi|154695327|gb|EDN95065.1| SS1G_10940 [Sclerotinia sclerotiorum 1980]
  misc_feature (43)..(577): NCBI GI: 255954433 Blast Desc: Pc21g09300 [Penicillium chrysogenum Wisconsin 54-1255] gi|211589680|emb|CAP95827.1| Pc21g09300 [Penicillium chrysogenum Wisconsin 54-1255]
  misc_feature (45)..(577): NCBI GI: 121711391 Blast Desc: gamma-glutamyltranspeptidase [Aspergillus clavatus NRRL 1] gi|119401462|gb|EAW11885.1| gamma-glutamyltranspeptidase [Aspergillus clavatus NRRL 1]
  misc_feature (29)..(570): SWISSPROT Homolog: EC 2.3.2.2 Gamma-glutamyltransferase
MRSLIELPASLLLLLASAAAGSIIPPSEWLPEGQTVIAASDSGSGRKGAVACESKVCSQIGVDLLAQGGNAVDAWIGTQLCVGVIGMYHSGLGGGGFAIIRDQSGEYTVIDYREAAPAAASKDMYRDNVMGSVWTGLAAGVPGELRGLEDAHIKFGSLPWKDVVMPAALVARDGFSITEDTVRYMEYGIMSAGWNFLVDDPSWALDFAPNGSLLKLGETMYRKRYADTLEKVAEGASTFYTGEMANATIATIQKDNGTMTLQDMSEYKAITRRSVSISYRDYKLFSSGAPSSGAVALSTLKTMEGYNTADTANTNLTLHRFDESMRFAYGAHQALGDPDYLSDTDMLEDKMLSASETASIRGKIQDNSTQPVENYNPDKVYVPDSHGTSHIVTADASGMAVSSTTTINLLFGNLQMVPSTGVILNNEMNDFSIPGVRNEFGYAPSEANYIRPGKRPLSSITPIIIEDSDGNLFATVGAAGGSRIISSTTQVVWHLLEHGMTMRQSIREPRFHDQLMPNTAVFEYTFDNATVASMAEKGHNVTWVREGVSAVQGIRIESDGSFESVSEIRQKNSGGLTT

SEQ ID NO: 14638 - DNA, 4483 bp, Muscodor strobelii
  misc_feature: SGI EST ID NO. CUFF.35136.0
  misc_feature: Variant of the nucleotide sequence at SEQ ID NO 14636
gtgatcctgtcaccaccatcttagtcgagtttatcttcgggacggctgggagtccgttacgagagacaatggattaataatcgtgatttcttactagctaaggttgctcttaattattgctctctttagactattctcactctcccgttcagccgcccattcaccatctcaggattaggttcaaaatgaggagtctaatagaactacccgcgagcttgctactactccttgcgtccgccgcggccgggagtatcatcccgccgtcggaatggctcccggagggacagactgtaattgcagcctccgactcgggctcgggacgcaagggagcagtcgcttgcgaaagcaaagtctgcagccagatcggcgttgatctcttggcgcaagggggaaatgcggttgacgcatggattggcactcaactctgtgtcggcgtcatcggcatgtaccattctggtcttggcggaggaggattcgctataattcgagaccagtcgggagaatatactgtcattgactaccgcgaagccgcgccggctgctgcttccaaggatatgtatagagataatgtgatgggtagtgtttggacgggactggctgccggtgtgcctggcgaactacgaggactcgaggatgcacacatcaagtttggctccctgccttggaaggacgttgttatgccggcggctctcgtagctcgcgatggattttccatcaccgaagatacagtgcgatacatggaatacggtattatgtctgcaggttggaacttcttggtagacgatccgtcctgggctctggacttcgcacctaatggatccctgttgaaattgggcgagacgatgtatagaaagcgctacgctgacacacttgaaaaggtcgcagagggtgctagcacattctacactggcgagatggcaaatgcaacaatagcaacaatccaaaaagacaacggcacaatgacactacaggacatgtccgaatacaaagccatcacccgccgctcggtgagcatttcataccgcgactataagctcttctcatccggagcaccaagcagcggtgcagtcgccctcagcacactcaagacaatggaaggctataacacagccgatacagcaaacactaatctcacactccaccgcttcgacgagtccatgcgttttgcctacggtgcccaccaagcactgggagatcccgattatctctcagatacagacatgctagaagataaaatgctctcagcctcggaaactgcatcaatccgcgggaaaatccaagataactccacgcagcccgtggagaactacaacccggataaagtctacgtgcccgatagccacggcacatcacacatcgtaaccgcggacgcctcaggaatggcagtaagcagcacaacgacgataaacctcttattcggcaatctccaaatggttccctccacaggcgtaatcctcaacaacgaaatgaacgatttctccatcccaggcgtacgcaatgaattcggttacgcgcctagcgaggcgaattacatccgccctggcaagcggccactatcttcaataacaccgatcatcattgaagattccgacggcaatttattcgcaaccgttggcgctgccggcggctcgcgaatcataagctcgacgacacaggttgtatggcatctactagagcacggcatgaccatgagacaatcgatccgtgaacccaggttccacgaccagcttatgccgaatactgcagtgtttgagtacacgtttgacaatgcgacggtcgcgagtatggcagagaagggccataacgttacgtgggtccgcgagggtgttagcgctgttcagggcattagaatagagtctgacgggtcgtttgaatctgtttctgagattagacagaagaatagcggtggtctgacgacttagaccggggtttcacgctttttctcccatatcaacatatataatacttttctacagctgtacataccttaaaggtgtatgcttagggaatgtcgatagatatagaagtgatcgtgcccatggcaaacggatcatgtaaagaaatagatcgcatagaagatccaaaagtagacacgtctcttatttcattctgctccatcgatagtaaagtgcgtagaataactcatacagccaaggcctatgaaagcactgtctattgttgtatggactacttacttatgcactgcaaatcatcgctcacctagtgacctgaacgccacatttaatgcacgcctcatcgagcgggcgacgttcatggtattgatacaccaccgaaagcaaagccaactccaaagcatcgtgtcatgctaacccaggggtatcgtatttgaatctattcgtccgatcatttccatcatcacatagtaccgatgagtttctgtaactctgttaaccatcgtcgcgagaactcttcatccgagaacctctgggatgatttgcgcgctctcaatcggacagccagtggatcaggaagcgagaaagctttctcgaatccttcagcgaattccttcgccgtggtcgcatgaaaccctattttacattagtcaattactgtgaaagaatttagtttcctgttttcaatagctccttaccggttggctcgccgtcgacctcggtcacgatgtccagtttgggtcctccactattatggacaacgccaattaggcccgctgcctggtattcgacgacaccgataccgaagtgctcattccacatgccattaacaccgatatatgccttgcccaaccatttgagaacgtcagaccaaggtgcgtcgagttggaatagcactcgatctttgatatgcaattcattcaccagaagtcgaagctgatatacgcggcgcgaatcgctgtcattcctgacactaccaataaggacaagcttggcgccttcagccgctttcgagccggttttgacaaattgggcaaacgaatcgacgatgagctgatgattcttctcggggcggaactgcgcgatatatactatgcacttttcacgtttcttctcaccctccggcgagaggtcgatggcatcctgtatgtcagtgacggcacaaggcggatagacaacggcgatcggatagtctcgtttctgtttctcgcgctttggaccccatagcgccttgatatgggattgcgtccaggatgagtttgtcatgaccacatctacagatgaccccatggaagcatatatactggcaaacaatttccagtagtgtttcttcacgaacccttttacacccacgccctttccggcattgactccctggcttccaactgcgcttgtcgggtcgagagagtcaagcatatcggtggagatggtcgggtaatgcacgtatcccacggttggcacatcggggaacaagatcttgctcatccagagggtgaaggcatatcccatggtgtcgatgaatatgtcggggacgagaagagagaaggcgtcccaacctaagatcatcgagcccagagactggaacagcagtgttgcgtatgggtacgtggacgcgagtacccagtggcgagtcgagaggtacatgaagtgtatcgtaggcggatggatatcgatgctgaaggtgttcttgaaagaggagtttagtattctttcgacactggatacttatcaaccacgtattccacatcaatttgcacttaccttgacgcgagaaagcatattctccttggtcacctcgtgatccccagtatagacgacaattttggcattgggccatctgcgttgggtagcccgtatggcagcccacagcacacgttcgccgccgccaccggcattgcagaatgggtggaagaagccgacaatgccatcccagtctctatttcccttctccccattgccagatgaccctgccacagcgccgtctatgttctcccactcatcgtcgctttgggtagcttgtgttgctgatttcttggcttgatacgcccgttcaccttcctcggtagctcgaatgacaagcgctctacgaccctcagtctttttccgcaagtaccagccggcgcatgaccctagaaccctgattaagacgaggctcagggcaggaatggcgaggacaccgcaagcgagagccgccacagtaatcaccaaggttgtgaattgcattttcatgtaaatgcgacgagcctgttgcacagaagacggcagagcggcgcgcagcgcggggagcaattagaggggaccaagcgccaagaaactggcgatggttacgggtggtggaagagggggacagaagtgatcagcctcaggttagcataatgggacaagaccacccgcgacgcgattgaagaggcgatggaaccgagttcggtaatcattcaggcaagaccgaagagcaaggaaagaacacggaacaaacaaaacgaaagacgctgaagaaacgatcgtgatggacacggttgcccttgatttctttgacgagtcacaagctgtagaggaacggggactttgtg

SEQ ID NO: 14639 - DNA, 1623 bp, Muscodor strobelii
  misc_feature: SGI cDNA ID NO. 564828
  misc_feature: Encodes the peptide sequence at SEQ ID NO 14640
atgcaattcacaaccttggtgattactgtggcggctctcgcttgcggtgtcctcgccattcctgccctgagcctcgtcttaatcagggttctagggtcatgcgccggctggtacttgcggaaaaagactgagggtcgtagagcgcttgtcattcgagctaccgaggaaggtgaacgggcgtatcaagccaagaaatcagcaacacaagctacccaaagcgacgatgagtgggagaacatagacggcgctgtggcagggtcatctggcaatggggagaagggaaatagagactgggatggcattgtcggcttcttccacccattctgcaatgccggtggcggcggcgaacgtgtgctgtgggctgccatacgggctacccaacgcagatggcccaatgccaaaattgtcgtctatactggggatcacgaggtgaccaaggagaatatgctttctcgcgtcaagaacaccttcagcatcgatatccatccgcctacgatacacttcatgtacctctcgactcgccactgggtactcgcgtccacgtacccatacgcaacactgctgttccagtctctgggctcgatgatcttaggttgggacgccttctctcttctcgtccccgacatattcatcgacaccatgggatatgccttcaccctctggatgagcaagatcttgttccccgatgtgccaaccgtgggatacgtgcattacccgaccatctccaccgatatgcttgactctctcgacccgacaagcgcagttggaagccagggagtcaatgccggaaagggcgtgggtgtaaaagggttcgtgaagaaacactactggaaattgtttgccagtatatatgcttccatggggtcatctgtagatgtggtcatgacaaactcatcctggacgcaatcccatatcaaggcgctatggggtccaaagcgcgagaaacagaaacgagactatccgatcgccgttgtctatccgccttgtgccgtcactgacatacaggatgccatcgacctctcgccggagggtgagaagaaacgtgaaaagtgcatagtatatatcgcgcagttccgccccgagaagaatcatcagctcatcgtcgattcgtttgcccaatttgtcaaaaccggctcgaaagcggctgaaggcgccaagcttgtccttattggtagtgtcaggaatgacagcgattcgcgccgcgtatatcagcttcgacttctggtgaatgaattgcatatcaaagatcgagtgctattccaactcgacgcaccttggtctgacgttctcaaatggttgggcaaggcatatatcggtgttaatggcatgtggaatgagcacttcggtatcggtgtcgtcgaataccaggcagcgggcctaattggcgttgtccataatagtggaggacccaaactggacatcgtgaccgaggtcgacggcgagccaaccgggtttcatgcgaccacggcgaaggaattcgctgaaggattcgagaaagctttctcgcttcctgatccactggctgtccgattgagagcgcgcaaatcatcccagaggttctcggatgaagagttctcgcgacgatggttaacagagttacagaaactcatcggtactatgtga

SEQ ID NO: 14640 - protein, 540 aa, Muscodor strobelii
  misc_feature: SGI Peptide ID NO. 564828
  misc_feature (336)..(518): Pfam Id: PF00534 Pfam Desc: Glycosyl transferases group 1
  misc_feature (13)..(538): NCBI GI: 85110764 Blast Desc: alpha-1,2-mannosyltransferase alg11 [Neurospora crassa OR74A] gi|74622660|sp|Q8X092.1|ALG11_NEUCR RecName: Full=Alpha-1,2-mannosyltransferase alg-11; AltName: glycosylation
  misc_feature (8)..(538): NCBI GI: 171689584 Blast Desc: protein product [Podospora anserina] gi|170944754|emb|CAP70865.1| protein product [Podospora anserina]
  misc_feature (17)..(538): NCBI GI: 145606957 Blast Desc: MGG_03883 [Magnaporthe grisea 70-15] gi|145014579|gb|EDJ99147.1| MGG_03883 [Magnaporthe grisea 70-15]
  misc_feature (17)..(537): NCBI GI: 256728912 Blast Desc: glycosyltransferase family 4 [Nectria haematococca mpVI 77-13-4]
  misc_feature (17)..(537): NCBI GI: 46138687 Blast Desc: FG10858.1 [Gibberella zeae PH-1]
  misc_feature (17)..(540): NCBI GI: 261357021 Blast Desc: alpha-1,2-mannosyltransferase alg-11 [Verticillium albo-atrum VaMs.102]
  misc_feature (18)..(538): NCBI GI: 169604774 Blast Desc: SNOG_05402 [Phaeosphaeria nodorum SN15] gi|111066673|gb|EAT87793.1| SNOG_05402 [Phaeosphaeria nodorum SN15]
  misc_feature (48)..(530): NCBI GI: 156043871 Blast Desc: SS1G_10939 [Sclerotinia sclerotiorum 1980] gi|154695326|gb|EDN95064.1| SS1G_10939 [Sclerotinia sclerotiorum 1980]
  misc_feature (21)..(538): NCBI GI: 189196592 Blast Desc: alpha-1,2-mannosyltransferase ALG11 [Pyrenophora tritici-repentis Pt-1C-BFP] gi|187980513|gb|EDU47139.1| alpha-1,2-mannosyltransferase ALG11 [Pyrenophora tritici-repentis
  misc_feature (26)..(484): NCBI GI: 116205101 Blast Desc: CHGG_10434 [Chaetomium globosum CBS 148.51] gi|88176562|gb|EAQ84030.1| CHGG_10434 [Chaetomium globosum CBS 148.51]
MQFTTLVITVAALACGVLAIPALSLVLIRVLGSCAGWYLRKKTEGRRALVIRATEEGERAYQAKKSATQATQSDDEWENIDGAVAGSSGNGEKGNRDWDGIVGFFHPFCNAGGGGERVLWAAIRATQRRWPNAKIVVYTGDHEVTKENMLSRVKNTFSIDIHPPTIHFMYLSTRHWVLASTYPYATLLFQSLGSMILGWDAFSLLVPDIFIDTMGYAFTLWMSKILFPDVPTVGYVHYPTISTDMLDSLDPTSAVGSQGVNAGKGVGVKGFVKKHYWKLFASIYASMGSSVDVVMTNSSWTQSHIKALWGPKREKQKRDYPIAVVYPPCAVTDIQDAIDLSPEGEKKREKCIVYIAQFRPEKNHQLIVDSFAQFVKTGSKAAEGAKLVLIGSVRNDSDSRRVYQLRLLVNELHIKDRVLFQLDAPWSDVLKWLGKAYIGVNGMWNEHFGIGVVEYQAAGLIGVVHNSGGPKLDIVTEVDGEPTGFHATTAKEFAEGFEKAFSLPDPLAVRLRARKSSQRFSDEEFSRRWLTELQKLIGTM

SEQ ID NO: 14641 - DNA, 3487 bp, Muscodor strobelii
  misc_feature: SGI EST ID NO. CUFF.35137.2
  misc_feature: Variant of the nucleotide sequence at SEQ ID NO 14639
cacaaagtccccgttcctctacagcttgtgactcgtcaaagaaatcaagggcaaccgtgtccatcacgatcgtttcttcagcgtctttcgttttgtttgttccgtgttctttccttgctcttcggtcttgcctgaatgattaccgaactcggttccatcgcctcttcaatcgcgtcgcgggtggtcttgtcccattatgctaacctgaggctgatcacttctgtccccctcttccaccacccgtaaccatcgccagtttcttggcgcttggtcccctctaattgctccccgcgctgcgcgccgctctgccgtcttctgtgcaacaggctcgtcgcatttacatgaaaatgcaattcacaaccttggtgattactgtggcggctctcgcttgcggtgtcctcgccattcctgccctgagcctcgtcttaatcagggttctagggtcatgcgccggctggtacttgcggaaaaagactgagggtcgtagagcgcttgtcattcgagctaccgaggaaggtgaacgggcgtatcaagccaagaaatcagcaacacaagctacccaaagcgacgatgagtgggagaacatagacggcgctgtggcagggtcatctggcaatggggagaagggaaatagagactgggatggcattgtcggcttcttccacccattctgcaatgccggtggcggcggcgaacgtgtgctgtgggctgccatacgggctacccaacgcagatggcccaatgccaaaattgtcgtctatactggggatcacgaggtgaccaaggagaatatgctttctcgcgtcaagaacaccttcagcatcgatatccatccgcctacgatacacttcatgtacctctcgactcgccactgggtactcgcgtccacgtacccatacgcaacactgctgttccagtctctgggctcgatgatcttaggttgggacgccttctctcttctcgtccccgacatattcatcgacaccatgggatatgccttcaccctctggatgagcaagatcttgttccccgatgtgccaaccgtgggatacgtgcattacccgaccatctccaccgatatgcttgactctctcgacccgacaagcgcagttggaagccagggagtcaatgccggaaagggcgtgggtgtaaaagggttcgtgaagaaacactactggaaattgtttgccagtatatatgcttccatggggtcatctgtagatgtggtcatgacaaactcatcctggacgcaatcccatatcaaggcgctatggggtccaaagcgcgagaaacagaaacgagactatccgatcgccgttgtctatccgccttgtgccgtcactgacatacaggatgccatcgacctctcgccggagggtgagaagaaacgtgaaaagtgcatagtatatatcgcgcagttccgccccgagaagaatcatcagctcatcgtcgattcgtttgcccaatttgtcaaaaccggctcgaaagcggctgaaggcgccaagcttgtccttattggtagtgtcaggaatgacagcgattcgcgccgcgtatatcagcttcgacttctggtgaatgaattgcatatcaaagatcgagtgctattccaactcgacgcaccttggtctgacgttctcaaatggttgggcaaggcatatatcggtgttaatggcatgtggaatgagcacttcggtatcggtgtcgtcgaataccaggcagcgggcctaattggcgttgtccataatagtggaggacccaaactggacatcgtgaccgaggtcgacggcgagccaaccgggtttcatgcgaccacggcgaaggaattcgctgaaggattcgagaaagctttctcgcttcctgatccactggctgtccgattgagagcgcgcaaatcatcccagaggttctcggatgaagagttctcgcgacgatggttaacagagttacagaaactcatcggtactatgtgatgatggaaatgatcggacgaatagattcaaatacgatacccctgggttagcatgacacgatgctttggagttggctttgctttcggtggtgtatcaataccatgaacgtcgcccgctcgatgaggcgtgcattaaatgtggcgttcaggtcactaggtgagcgatgatttgcagtgcataagtaagtagtccatacaacaatagacagtgctttcataggccttggctgtatgagttattctacgcactttactatcgatggagcagaatgaaataagagacgtgtctacttttggatcttctatgcgatctatttctttacatgatccgtttgccatgggcacgatcacttctatatctatcgacattccctaagcatacacctttaaggtatgtacagctgtagaaaagtattatatatgttgatatgggagaaaaagcgtgaaaccccggtctaagtcgtcagaccaccgctattcttctgtctaatctcagaaacagattcaaacgacccgtcagactctattctaatgccctgaacagcgctaacaccctcgcggacccacgtaacgttatggcccttctctgccatactcgcgaccgtcgcattgtcaaacgtgtactcaaacactgcagtattcggcataagctggtcgtggaacctgggttcacggatcgattgtctcatggtcatgccgtgctctagtagatgccatacaacctgtgtcgtcgagcttatgattcgcgagccgccggcagcgccaacggttgcgaataaattgccgtcggaatcttcaatgatgatcggtgttattgaagatagtggccgcttgccagggcggatgtaattcgcctcgctaggcgcgtaaccgaattcattgcgtacgcctgggatggagaaatcgttcatttcgttgttgaggattacgcctgtggagggaaccatttggagattgccgaataagaggtttatcgtcgttgtgctgcttactgccattcctgaggcgtccgcggttacgatgtgtgatgtgccgtggctatcgggcacgtagactttatccgggttgtagttctccacgggctgcgtggagttatcttggattttcccgcggattgatgcagtttccgaggctgagagcattttatcttctagcatgtctgtatctgagagataatcgggatctcccagtgcttggtgggcaccgtaggcaaaacgcatggactcgtcgaagcggtggagtgtgagattagtgtttgctgtatcggctgtgttatagccttccattgtcttgagtgtgctgagggcgactgcaccgctgcttggtgctccggatgagaagagcttatagtcgcggtatgaaatgctcaccgagcggcgggtgatggctttgtattcggacatgtcctgtagtgtcattgtgccgttgtctttttggattgttgctattgttgcatttgcttccacagtattagcaacgcgaataagaaaggctacaaatattagaagtacataccca

SEQ ID NO: 14642 - DNA, 942 bp, Muscodor strobelii
  misc_feature: SGI cDNA ID NO. 564829
  misc_feature: Encodes the peptide sequence at SEQ ID NO 14643
atgagcatccactccatcacacatctcccttggttcgtaacgattcccttgatagccttcaccgtgggcgcaaccactcgcctaccattcaccatacactcacggcgcgttgtgcaacgccgtacagagaccattcccctgaagcagatttgggtcgagcaaataaatcgaacagtgcggaaagacggaacaccacggaatcagatcatggaagagagcaagtccaggcacgaggaagtcgagaagaggatccatcagagactcgggctccagggttggagactgtacttgaattttctagggtttcccttctggctcctagccatcgacagtctacggcgactatgcggtggtccccaaggtctcctcagttctcttttcaccggctccgctaccaaagacggggcaacctcggaaatcagcacagcaattgattcatcgatactagatccaaataccatgtcttcagccatagaaacggcatcgaaggtcgtagaccccagcctaagcgtggaaggcttcctctggtttaccgatctcacagccgccgatccgtatcacatcctcccttttatcttatcgttcctactcctcaggaatctcgtacccaataaccaaatgttctgggacagacttgctctggctcgtggtcgtaagcccactggcgaaaaagcaaccctgaaagagagatctggtagcacgttattcatgagtttattgggtgtatctctcgtgattggacctgttactgctggtctgcctgctgcgctacacctctactggatttcatccaccatgtcaaatatgcttttcaagaaggttgtggacaaggcgatgcctattgaggcgaaacccgttgagaggtgtcagggcgtcgagactgatttaatattccctcagcgcggccaggctgtcggtgttaaaaacgagaaacgttcatga

SEQ ID NO: 14643 - protein, 313 aa, Muscodor strobelii
  misc_feature: SGI Peptide ID NO. 564829
  misc_feature (8)..(281): NCBI GI: 85110762 Blast Desc: NCU06778 [Neurospora crassa OR74A] gi|18376012|emb|CAB91746.2| conserved [Neurospora crassa] gi|28925305|gb|EAA34383.1| [Neurospora crassa OR74A]
  misc_feature (3)..(299): NCBI GI: 171689582 Blast Desc: protein product [Podospora anserina] gi|170944753|emb|CAP70864.1| protein product [Podospora anserina]
  misc_feature (3)..(291): NCBI GI: 154297723 Blast Desc: BC1G_12273 [Botryotinia fuckeliana B05.10] gi|150858402|gb|EDN33594.1| BC1G_12273 [Botryotinia fuckeliana B05.10]
  misc_feature (3)..(291): NCBI GI: 156043869 Blast Desc: SS1G_10938 [Sclerotinia sclerotiorum 1980] gi|154695325|gb|EDN95063.1| SS1G_10938 [Sclerotinia sclerotiorum 1980]
  misc_feature (2)..(286): NCBI GI: 145255673 Blast Desc: An18g05900 [Aspergillus niger] gi|134084633|emb|CAK97509.1| protein product [Aspergillus niger]
  misc_feature (3)..(277): NCBI GI: 121702411 Blast Desc: mitochondrial export translocase Oxa2, [Aspergillus clavatus NRRL 1] gi|119397613|gb|EAW08044.1| mitochondrial export translocase Oxa2, [Aspergillus clavatus NRRL 1]
  misc_feature (3)..(280): NCBI GI: 169604772 Blast Desc: SNOG_05401 [Phaeosphaeria nodorum SN15] gi|160706638|gb|EAT87792.2| SNOG_05401 [Phaeosphaeria nodorum SN15]
  misc_feature (2)..(303): NCBI GI: 159130911 Blast Desc: mitochondrial export translocase Oxa2, [Aspergillus fumigatus A1163]
  misc_feature (2)..(303): NCBI GI: 70991176 Blast Desc: mitochondrial export translocase Oxa2 [Aspergillus fumigatus Af293] gi|66848069|gb|EAL88399.1| mitochondrial export translocase Oxa2, [Aspergillus fumigatus Af293]
  misc_feature (3)..(200): NCBI GI: 256729094 Blast Desc: NECHADRAFT_93302 [Nectria haematococca mpVI 77-13-4]
MSIHSITHLPWFVTIPLIAFTVGATTRLPFTIHSRRVVQRRTETIPLKQIWVEQINRTVRKDGTPRNQIMEESKSRHEEVEKRIHQRLGLQGWRLYLNFLGFPFWLLAIDSLRRLCGGPQGLLSSLFTGSATKDGATSEISTAIDSSILDPNTMSSAIETASKVVDPSLSVEGFLWFTDLTAADPYHILPFILSFLLLRNLVPNNQMFWDRLALARGRKPTGEKATLKERSGSTLFMSLLGVSLVIGPVTAGLPAALHLYWISSTMSNMLFKKVVDKAMPIEAKPVERCQGVETDLIFPQRGQAVGVKNEKRS

SEQ ID NO: 14644 - DNA, 2999 bp, Muscodor strobelii
  misc_feature: SGI EST ID NO. CUFF.35436.0
  misc_feature: Variant of the nucleotide sequence at SEQ ID NO 14642
atcaattacgcttttcaaacgaatacattcttcagtacaggtcaattggttttcaagtctggggtggtatagaaaagatgtagtgcgacaaccagaacatgtagataggtaggcacatgtactgcatatcatgcaggtggctcatgtagggggcacgggccatgtattatcacataatctcaaaatgggtggttgacatgaacttttcaataagactcaaagcaatgtcacaacaatttgctcgcttcaccaccaacaatgcggtgatcttaaagaagaaggacatgccctgcggaatatctcaacattgatgacaggcacttaagctgctttgcaatcttaggatgagttccatccgtggcttatcctcactactaggattgcagcctacatctcaccctctttcatactcacaccgccatatatattttagacgtcatgccctcactcgtagctcattgctcaacggccggagagcgttttccctggctcaagctatcacaacgagcgttgaagcgactcaagatctcatgatgagcatccactccatcacacatctcccttggttcgtaacgattcccttgatagccttcaccgtgggcgcaaccactcgcctaccattcaccatacactcacggcgcgttgtgcaacgccgtacagagaccattcccctgaagcagatttgggtcgagcaaataaatcgaacagtgcggaaagacggaacaccacggaatcagatcatggaagagagcaagtccaggcacgaggaagtcgagaagaggatccatcagagactcgggctccagggttggagactgtacttgaattttctagggtttcccttctggctcctagccatcgacagtctacggcgactatgcggtggtccccaaggtctcctcagttctcttttcaccggctccgctaccaaagacggggcaacctcggaaatcagcacagcaattgattcatcgatactagatccaaataccatgtcttcagccatagaaacggcatcgaaggtcgtagaccccagcctaagcgtggaaggcttcctctggtttaccgatctcacagccgccgatccgtatcacatcctcccttttatcttatcgttcctactcctcaggaatctcgtacccaataaccaaatgttctgggacagacttgctctggctcgtggtcgtaagcccactggcgaaaaagcaaccctgaaagagagatctggtagcacgttattcatgagtttattgggtgtatctctcgtgattggacctgttactgctggtctgcctgctgcgctacacctctactggatttcatccaccatgtcaaatatgcttttcaagaaggttgtggacaaggcgatgcctattgaggcgaaacccgttgagaggtgtcagggcgtcgagactgatttaatattccctcagcgcggccaggctgtcggtgttaaaaacgagaaacgttcatgagcgtggatcatgaggtacttgcatctatgctaatgagaaaacattggcgagcttggagcagctggggcacttgacgtccatgaagaaggatgggggagcgggcaccagagtctgtggagctcacaaatgttgatgctggcttcactcaccgaaatgagtagcgtactagtgtgtagatagcttgagtcgctctgtatgattgacacctggggtatgagaagatatcgtgtatatactgtatatcaaatgtataataattacagcgactctgaaatggatcacaaggatgttgatcaaacataagaaatatattcgatattgcagttgctgaaagcgcagaatgtcctcgcccagtaacgcctaactccagactcccaaatatatgccatccactcttacaccaagatcgaaaacgtattcgcgcaacatcttcgatcaaccgagaagtacggccaggagcacaatagtgacaataacagcgatgaccaacagcaaacagcaagccttggtccgcgcattcttctgatatctcgcagcactccttaattcgatatcggcgccccgcgtgtcatcacgaacattcgtgacattctcatcgatgtaggtgatctgttcgccctgctcgtttacaatctgcgcaacctggtggaagaggacattgaggtcctgaacaccctcttcgatgtggcggatttcctcctctcgctcaacgatcagcgcatcctgaaagtctacttcgtcctgggcggcgagattgacttcctgtcgttcgagcagcaattgctgttcgccttcctggccttcgccatagcttgcttcgccggcttgctcctgttcgtgtgcggcctttgcggcggagacggaggcgcgttgcttgtcgatggctgttcgttggagggattggaattcggcgagtgctgctttgaattcgcgcgatagcttttgttgagagtatttctgcgtaggctgtgatgatgtatgtcagttagcaagagcgggtagcgcggagtgtgatgtgaaaaccgacagtgacatcttcctgagcctgtatctgtttaacgccctctccgacctctttgaactcagcggtagtctcctcgagagagccggcgacacgctcccgcaaccgtgggttatcccgcttggtgccgaggaggccaatgtcggatcgcagcttggagatgttgccttggagatggaagagcttgttcatcagacgttgagcattgcgcgagaactcaggatcgtcggagtatgcgccgctgtcctgtctccggccgccgccgccctcgccggactccatggaggagagctggtcgaaagacatggtgattgaacgtggggtgcgggatcacggaatggaacgaaacggattgtagcggtggatgtggtcggaataatctgattctattggccgacgcgacaacaaagatgtagaagtagaagagtccaagcgtacgagatcaatcgagagacaaaacctcagaaatagatgagtgaatcgacaaggaaaggaaggcaagc

SEQ ID NO: 14645 - DNA, 831 bp, Muscodor strobelii
  misc_feature: SGI cDNA ID NO. 564830
  misc_feature: Reduced expression when VOC is produced
  misc_feature: Encodes the peptide sequence at SEQ ID NO 14646
atgtctttcgaccagctctcctccatggagtccggcgagggcggcggcggccggagacaggacagcggcgcatactccgacgatcctgagttctcgcgcaatgctcaacgtctgatgaacaagctcttccatctccaaggcaacatctccaagctgcgatccgacattggcctcctcggcaccaagcgggataacccacggttgcgggagcgtgtcgccggctctctcgaggagactaccgctgagttcaaagaggtcggagagggcgttaaacagatacaggctcaggaagatgtcactcctacgcagaaatactctcaacaaaagctatcgcgcgaattcaaagcagcactcgccgaattccaatccctccaacgaacagccatcgacaagcaacgcgcctccgtctccgccgcaaaggccgcacacgaacaggagcaagccggcgaagcaagctatggcgaaggccaggaaggcgaacagcaattgctgctcgaacgacaggaagtcaatctcgccgcccaggacgaagtagactttcaggatgcgctgatcgttgagcgagaggaggaaatccgccacatcgaagagggtgttcaggacctcaatgtcctcttccaccaggttgcgcagattgtaaacgagcagggcgaacagatcacctacatcgatgagaatgtcacgaatgttcgtgatgacacgcggggcgccgatatcgaattaaggagtgctgcgagatatcagaagaatgcgcggaccaaggcttgctgtttgctgttggtcatcgctgttattgtcactattgtgctcctggccgtacttctcggttga

SEQ ID NO: 14646 - protein, 276 aa, Muscodor strobelii
  misc_feature: SGI Peptide ID NO. 564830
  misc_feature (187)..(249): Pfam Id: PF05739 Pfam Desc: SNARE domain
  misc_feature (1)..(276): NCBI GI: 85110760 Blast Desc: NCU06777 [Neurospora crassa OR74A] gi|18376013|emb|CAB91747.2| related to syntaxin 12 [Neurospora crassa] gi|28925304|gb|EAA34382.1| conserved [Neurospora crassa
  misc_feature (1)..(276): NCBI GI: 116205105 Blast Desc: CHGG_10436 [Chaetomium globosum CBS 148.51] gi|88176564|gb|EAQ84032.1| CHGG_10436 [Chaetomium globosum CBS 148.51]
  misc_feature (1)..(276): NCBI GI: 145606961 Blast Desc: MGG_03885 [Magnaporthe grisea 70-15] gi|145014581|gb|EDJ99149.1| MGG_03885 [Magnaporthe grisea 70-15]
  misc_feature (1)..(276): NCBI GI: 115398173 Blast Desc: conserved [Aspergillus terreus NIH2624] gi|114192869|gb|EAU34569.1| conserved [Aspergillus terreus NIH2624]
  misc_feature (1)..(276): NCBI GI: 169773793 Blast Desc: [Aspergillus oryzae RIB40] gi|238491812|ref|XP_002377143.1| SNARE domain protein [Aspergillus flavus NRRL3357] gi|73486681|dbj|BAE19750.1| oryzae]
  misc_feature (1)..(276): NCBI GI: 238838646 Blast Desc: syntaxin [Microsporum canis CBS 113480]
  misc_feature (1)..(276): NCBI GI: 255949936 Blast Desc: Pc22g18300 [Penicillium chrysogenum Wisconsin 54-1255] gi|211592752|emb|CAP99118.1| Pc22g18300 [Penicillium chrysogenum Wisconsin 54-1255]
  misc_feature (1)..(257): NCBI GI: 67528436 Blast Desc: AN4416.2 [Aspergillus nidulans FGSC A4] gi|40741143|gb|EAA60333.1| AN4416.2 [Aspergillus nidulans FGSC A4] gi|259482772|tpe|CBF77571.1| TPA: conserved , Syntaxin-like
  misc_feature (1)..(276): NCBI GI: 145256797 Blast Desc: An04g01530 [Aspergillus niger] gi|134058428|emb|CAK47915.1| protein product [Aspergillus niger]
  misc_feature (1)..(257): NCBI GI: 261357019 Blast Desc: SNARE domain-containing protein [Verticillium albo-atrum VaMs.102]
  misc_feature: Useful for introducing or modulating the production of volatile compounds
MSFDQLSSMESGEGGGGRRQDSGAYSDDPEFSRNAQRLMNKLFHLQGNISKLRSDIGLLGTKRDNPRLRERVAGSLEETTAEFKEVGEGVKQIQAQEDVTPTQKYSQQKLSREFKAALAEFQSLQRTAIDKQRASVSAAKAAHEQEQAGEASYGEGQEGEQQLLLERQEVNLAAQDEVDFQDALIVEREEEIRHIEEGVQDLNVLFHQVAQIVNEQGEQITYIDENVTNVRDDTRGADIELRSAARYQKNARTKACCLLLVIAVIVTIVLLAVLLG

SEQ ID NO: 14647 - DNA, 2990 bp, Muscodor strobelii
  misc_feature: SGI EST ID NO. CUFF.35437.1
  misc_feature: Variant of the nucleotide sequence at SEQ ID NO 14645
gcttgccttcctttccttgtcgattcactcatctatttctgaggttttgtctctcgattgatctcgtacgcttggactcttctacttctacatctttgttgtcgcgtcggccaatagaatcagattattccgaccacatccaccgctacaatccgtttcgttccattccgtgatcccgcaccccacgttcaatcaccatgtctttcgaccagctctcctccatggagtccggcgagggcggcggcggccggagacaggacagcggcgcatactccgacgatcctgagttctcgcgcaatgctcaacgtctgatgaacaagctcttccatctccaaggcaacatctccaagctgcgatccgacattggcctcctcggcaccaagcgggataacccacggttgcgggagcgtgtcgccggctctctcgaggagactaccgctgagttcaaagaggtcggagagggcgttaaacagatacaggctcaggaagatgtcactcctacgcagaaatactctcaacaaaagctatcgcgcgaattcaaagcagcactcgccgaattccaatccctccaacgaacagccatcgacaagcaacgcgcctccgtctccgccgcaaaggccgcacacgaacaggagcaagccggcgaagcaagctatggcgaaggccaggaaggcgaacagcaattgctgctcgaacgacaggaagtcaatctcgccgcccaggacgaagtagactttcaggatgcgctgatcgttgagcgagaggaggaaatccgccacatcgaagagggtgttcaggacctcaatgtcctcttccaccaggttgcgcagattgtaaacgagcagggcgaacagatcacctacatcgatgagaatgtcacgaatgttcgtgatgacacgcggggcgccgatatcgaattaaggagtgctgcgagatatcagaagaatgcgcggaccaaggcttgctgtttgctgttggtcatcgctgttattgtcactattgtgctcctggccgtacttctcggttgatcgaagatgttgcgcgaatacgttttcgatcttggtgtaagagtggatggcatatatttgggagtctggagttaggcgttactgggcgaggacattctgcgctttcagcaactgcaatatcgaatatatttcttatgtttgatcaacatccttgtgatccatttcagagtcgctgtaattattatacatttgatatacagtatatacacgatatcttctcataccccaggtgtcaatcatacagagcgactcaagctatctacacactagtacgctactcatttcggtgagtgaagccagcatcaacatttgtgagctccacagactctggtgcccgctcccccatccttcttcatggacgtcaagtgccccagctgctccaagctcgccaatgttttctcattagcatagatgcaagtacctcatgatccacgctcatgaacgtttctcgtttttaacaccgacagcctggccgcgctgagggaatattaaatcagtctcgacgccctgacacctctcaacgggtttcgcctcaataggcatcgccttgtccacaaccttcttgaaaagcatatttgacatggtggatgaaatccagtagaggtgtagcgcagcaggcagaccagcagtaacaggtccaatcacgagagatacacccaataaactcatgaataacgtgctaccagatctctctttcagggttgctttttcgccagtgggcttacgaccacgagccagagcaagtctgtcccagaacatttggttattgggtacgagattcctgaggagtaggaacgataagataaaagggaggatgtgatacggatcggcggctgtgagatcggtaaaccagaggaagccttccacgcttaggctggggtctacgaccttcgatgccgtttctatggctgaagacatggtatttggatctagtatcgatgaatcaattgctgtgctgatttccgaggttgccccgtctttggtagcggagccggtgaaaagagaactgaggagaccttggggaccaccgcatagtcgccgtagactgtcgatggctaggagccagaagggaaaccctagaaaattcaagtacagtctccaaccctggagcccgagtctctgatggatcctcttctcgacttcctcgtgcctggacttgctctcttccatgatctgattccgtggtgttccgtctttccgcactgttcgatttatttgctcgacccaaatctgcttcaggggaatggtctctgtacggcgttgcacaacgcgccgtgagtgtatggtgaatggtaggcgagtggttgcgcccacggtgaaggctatcaagggaatcgttacgaaccaagggagatgtgtgatggagtggatgctcatcatgagatcttgagtcgcttcaacgctcgttgtgatagcttgagccagggaaaacgctctccggccgttgagcaatgagctacgagtgagggcatgacgtctaaaatatatatggcggtgtgagtatgaaagagggtgagatgtaggctgcaatcctagtagtgaggataagccacggatggaactcatcctaagattgcaaagcagcttaagtgcctgtcatcaatgttgagatattccgcagggcatgtcctacttgcatcttcagtggcagcaggcatagaacataaagagcatctcacaccttcttctttaagatcaccgcattgttggtggtgaagcgagcaaattgttgtgacattgctttgagtcttattgaaaagttcatgtcaaccacccattttgagattatgtgataatacatggcccgtgccccctacatgagccacctgcatgatatgcagtacatgtgcctacctatctacatgttctggttgtcgcactacatcttttctataccaccccagacttgaaaaccaattgacctgtactgaagaatgtattcgtttgaaaagcgtaattgat

SEQ ID NO: 14648 - DNA, 1923 bp, Muscodor strobelii
  misc_feature: SGI cDNA ID NO. 564831
  misc_feature: Reduced expression when VOC is produced
  misc_feature: Encodes the peptide sequence at SEQ ID NO 14649
atgccgcctgcagtggctgcgcgacgggcgccctacaaggacttccttcagccagctctccagagacgatttgccggaaccgccgccctcatactcgcccttgcatatcttgaggctctaacactgtcttcttggcagtcctatttctcgccatgggtccctgtgggtgtccctggcttgcgagctcttgccatcttcacatccgtccttcccattctcattctccgaatcgcgcattcccatatgggcactcgatcgtctgcatccccttttgagaccatcgtcgacagcgcccttcctttccgcaacttccaaactgtcatcacctacggcgcatctgcctgggggttcagccaggcatatcttttttccactcccgaggaatccgacctgcgatggatcacacacgccagcgggcgcgcacgccttaatgagcaggctgtcttctacactgtgtccttgactgttttaggtgccatttatggcgtcctccacattattcaagaccggaaccgcatgattctagggactgtggaggccaaaactacggatggtggtgctaaaccggctcactgggccgcggatttgggcgggtgggcacctctcatggttcttcgctccgggatgaccgcaatagcctcgagccttttcaattacaccatcctttaccacttccttagaaagtcttcatgggcatggtcaatgtggctctgtcgatggcgctacagcgatcttccaaagtccaatttacctccctacagcggcggtccttggagcttctggatgcttctgcgcaccatttgggcatctttcctgctatgtctactttggcatgccgcagacgtcgccttccgggtgtcactctcgcaagcgcctctcaagaatgaccagccattgacggctgagtcgaaggacccgaacagcagcttacttaatggactaaagagcaagaagaaaagagtttctgctttcgcaatgtgggaacttgcgttcatcgcacgtgactatgaagcgaggaggaagaccattttcgatgatatcgaccgcaaagatgggcccatgtggtcccaggtctatggaatttgcatcgatgtcatcagagttctagagcgcagaattgacggctatggaaagccacccgcccctgctgcctctgcagcactggctgcagagaccatacaggcgcacgaacgcattgcgcagccaattagaacagacgacgtgttaatccctcgagccaactccaagactgcgtttgtgaagaggacggtctctaaagtagtcacatcgccaggcaggacacctgctgaagattacggaccagagctaaagaagagagccgctgttgttgccgaccggctgatgacgaaagagcaacaggccgcactcaagcccgaggcactgcagggtagactcggcgcactggcactgcaagctctcgccttacctgttattggccctctcttccagagcaccttcggacgacggttgatcaaagcagtgattggctcaccacacgcagagctcagtgtctacgtgaatgccgcgtttgctctttcccagttggctgtctgtagtttgactgaagacaagtacggcaacgtccaacgagatgtgccttctatcgtccgaacatttactgccgtgattaagaaactggagagattccgagatgatttcccggcacactggacagacgtgagcaagagtcgagattgtccagaagtggaaaagctcctggtggcattgaaggatgatctcaatgctctggtgacagcatttgcaccatatagtagtgatctgagattgactcgtgcagatatgagattggcacgggaggcagcggaaaagaaggaagagaagaaggaagaaaccgtcgtcaatcgagatgcagagaggcctgagatgcagtttgtcaactag

SEQ ID NO: 14649 - protein, 640 aa, Muscodor strobelii
  misc_feature: SGI Peptide ID NO. 564831
  misc_feature (17)..(612): Pfam Id: PF09531 Pfam Desc: Nucleoporin protein Ndc1-Nup
  misc_feature (4)..(615): NCBI GI: 46138701 Blast Desc: FG10865.1 [Gibberella zeae PH-1]
  misc_feature (4)..(639): NCBI GI: 261357018 Blast Desc: nuclear envelope protein [Verticillium albo-atrum VaMs.102]
  misc_feature (2)..(637): NCBI GI: 39943750 Blast Desc: MGG_03886 [Magnaporthe grisea 70-15] gi|145014582|gb|EDJ99150.1| MGG_03886 [Magnaporthe grisea 70-15]
  misc_feature (4)..(623): NCBI GI: 256729093 Blast Desc: NECHADRAFT_60775 [Nectria haematococca mpVI 77-13-4]
  misc_feature (4)..(619): NCBI GI: 85110758 Blast Desc: NCU06776 [Neurospora crassa OR74A] gi|18376014|emb|CAB91748.2| related to nuclear envelope protein Cut11p [Neurospora crassa] gi|28925303|gb|EAA34381.1| [Neurospora
  misc_feature (1)..(615): NCBI GI: 116205107 Blast Desc: CHGG_10437 [Chaetomium globosum CBS 148.51] gi|88176565|gb|EAQ84033.1| CHGG_10437 [Chaetomium globosum CBS 148.51]
  misc_feature (4)..(615): NCBI GI: 171689578 Blast Desc: protein product [Podospora anserina] gi|170944751|emb|CAP70862.1| protein product [Podospora anserina]
  misc_feature (1)..(629): NCBI GI: 154292270 Blast Desc: nuclear envelope protein [Botryotinia fuckeliana B05.10] gi|150846238|gb|EDN21431.1| nuclear envelope protein [Botryotinia fuckeliana B05.10]
  misc_feature (1)..(624): NCBI GI: 156059926 Blast Desc: SS1G_03976 [Sclerotinia sclerotiorum 1980] gi|154701762|gb|EDO01501.1| SS1G_03976 [Sclerotinia sclerotiorum 1980]
  misc_feature (6)..(620): NCBI GI: 238491814 Blast Desc: nuclear envelope protein, [Aspergillus flavus NRRL3357] gi|220697557|gb|EED53898.1| nuclear envelope protein, [Aspergillus flavus NRRL3357]
  misc_feature: Useful for introducing or modulating the production of volatile compounds
MPPAVAARRAPYKDFLQPALQRRFAGTAALILALAYLEALTLSSWQSYFSPWVPVGVPGLRALAIFTSVLPILILRIAHSHMGTRSSASPFETIVDSALPFRNFQTVITYGASAWGFSQAYLFSTPEESDLRWITHASGRARLNEQAVFYTVSLTVLGAIYGVLHIIQDRNRMILGTVEAKTTDGGAKPAHWAADLGGWAPLMVLRSGMTAIASSLFNYTILYHFLRKSSWAWSMWLCRWRYSDLPKSNLPPYSGGPWSFWMLLRTIWASFLLCLLWHAADVAFRVSLSQAPLKNDQPLTAESKDPNSSLLNGLKSKKKRVSAFAMWELAFIARDYEARRKTIFDDIDRKDGPMWSQVYGICIDVIRVLERRIDGYGKPPAPAASAALAAETIQAHERIAQPIRTDDVLIPRANSKTAFVKRTVSKVVTSPGRTPAEDYGPELKKRAAVVADRLMTKEQQAALKPEALQGRLGALALQALALPVIGPLFQSTFGRRLIKAVIGSPHAELSVYVNAAFALSQLAVCSLTEDKYGNVQRDVPSIVRTFTAVIKKLERFRDDFPAHWTDVSKSRDCPEVEKLLVALKDDLNALVTAFAPYSSDLRLTRADMRLAREAAEKKEEKKEETVVNRDAERPEMQFVN

SEQ ID NO: 14650 - DNA, 2352 bp, Muscodor strobelii
  misc_feature: SGI EST ID NO. CUFF.35681.1
  misc_feature: Variant of the nucleotide sequence at SEQ ID NO 14648
cgcccctgctaatcctggccgttctacctggtagcgcgcccggcataggtagtggcagacgacaacgccgcgatgcagaagtgtgtcttctgaagcaacttttttatttactttggccattcgagcctagacaacgacacctctccctgcactcttcaccctccgctccaccatcccacggcgggcgtcgatgcgcattgctctgtcccaccatctcatgcatacaatgctctgatactcttccctttttatttttccaacctcctctccctcctcactgtccttggaggctatccgccatgccgcctgcagtggctgcgcgacgggcgccctacaaggacttccttcagccagctctccagagacgatttgccggaaccgccgccctcatactcgcccttgcatatcttgaggctctaacactgtcttcttggcagtcctatttctcgccatgggtccctgtgggtgtccctggcttgcgagctcttgccatcttcacatccgtccttcccattctcattctccgaatcgcgcattcccatatgggcactcgatcgtctgcatccccttttgagaccatcgtcgacagcgcccttcctttccgcaacttccaaactgtcatcacctacggcgcatctgcctgggggttcagccaggcatatcttttttccactcccgaggaatccgacctgcgatggatcacacacgccagcgggcgcgcacgccttaatgagcaggctgtcttctacactgtgtccttgactgttttaggtgccatttatggcgtcctccacattattcaagaccggaaccgcatgattctagggactgtggaggccaaaactacggatggtggtgctaaaccggctcactgggccgcggatttgggcgggtgggcacctctcatggttcttcgctccgggatgaccgcaatagcctcgagccttttcaattacaccatcctttaccacttccttagaaagtcttcatgggcatggtcaatgtggctctgtcgatggcgctacagcgatcttccaaagtccaatttacctccctacagcggcggtccttggagcttctggatgcttctgcgcaccatttgggcatctttcctgctatgtctactttggcatgccgcagacgtcgccttccgggtgtcactctcgcaagcgcctctcaagaatgaccagccattgacggctgagtcgaaggacccgaacagcagcttacttaatggactaaagagcaagaagaaaagagtttctgctttcgcaatgtgggaacttgcgttcatcgcacgtgactatgaagcgaggaggaagaccattttcgatgatatcgaccgcaaagatgggcccatgtggtcccaggtctatggaatttgcatcgatgtcatcagagttctagagcgcagaattgacggctatggaaagccacccgcccctgctgcctctgcagcactggctgcagagaccatacaggcgcacgaacgcattgcgcagccaattagaacagacgacgtgttaatccctcgagccaactccaagactgcgtttgtgaagaggacggtctctaaagtagtcacatcgccaggcaggacacctgctgaagattacggaccagagctaaagaagagagccgctgttgttgccgaccggctgatgacgaaagagcaacaggccgcactcaagcccgaggcactgcagggtagactcggcgcactggcactgcaagctctcgccttacctgttattggccctctcttccagagcaccttcggacgacggttgatcaaagcagtgattggctcaccacacgcagagctcagtgtctacgtgaatgccgcgtttgctctttcccagttggctgtctgtagtttgactgaagacaagtacggcaacgtccaacgagatgtgccttctatcgtccgaacatttactgccgtgattaagaaactggagagattccgagatgatttcccggcacactggacagacgtgagcaagagtcgagattgtccagaagtggaaaagctcctggtggcattgaaggatgatctcaatgctctggtgacagcatttgcaccatatagtagtgatctgagattgactcgtgcagatatgagattggcacgggaggcagcggaaaagaaggaagagaagaaggaagaaaccgtcgtcaatcgagatgcagagaggcctgagatgcagtttgtcaactagtgccgacagctgttctggcgatgcttcgatcttgacgatgatgttatgtaaactagaagcataggtgtaatatctggcattgttggcgcataatgaataaagggttgggaaatgaagatatggctcctat

SEQ ID NO: 14651 - DNA, 1353 bp, Muscodor strobelii
  misc_feature: SGI cDNA ID NO. 564832
  misc_feature: Reduced expression when VOC is produced
  misc_feature: Encodes the peptide sequence at SEQ ID NO 14652
atgccgaccagcctctttttccgcatcgcctacaactccatctataccttcttatgtctaatcctggcgatactgctccttgtcgttccggccgatttcgtccaacaagcgctcagcaccacccaccagatcatcaatgtcatcgtcatcggcattatctacgtcctcgcggttataattgttcttttcgtctacgccttacggctttatgtgacccgtagcgtactcgcaggaataccgagagcatggctgcccatcaagaaaggcgacgtcaccaacgacgtcaaagacatgatcgttgtcagtctgagccgaagtgccgccatcgcgctagaggctcgacccaaggtcatggccccagacgtgatcccgtcggacacaggtagcgttgccgacaaggagaagcccgacgatccggaagagagtgaccgacggaggtctcgacagctgttcaggtcgaaaccaccagctacggtagaggatcaaatgggtatcgctttaccgtctgttcgacctgtctggggatatatcgaacattcaggttggggttcaccagcgtctccagacctggcaaatttgcagtataccaccgtcatatcggaacttccaaatttaattgaggcgaaggccgtttcgctcgctccatctgacccagaacctgatccactctcagagatacctgcgctcaatgctgacgctattgagttactgcaacgtcttccgacgatgacgatgagacagtacatccaacgtctcattgagctagaggtgctgcctgaatctgaggacatcaccgactttttgaagctatacgagcaagaccggttttcgggtcgtcccatgtccaatgcgactttcagagagctcatgcacctctttgccgatctgctcagaaacatgcaaccgctggatccatctgttctatacgaaggtcacggccgcgatccgagtgatttcgggttcgatgggcacattgatgatgatgcaccacaggactcagctccgactacgccaacacgtagcattgccagttccctcagtattgagcgcgcgcattcgcagaggaggcaatctaggcttggattaggtattcggaactcgtcggcgaatacgaggaatcagtatcgcaccgcccccacgactcctaagagtaaagctggagggactgtggcatcacgatcgcctagcgcaagtagcgcgaatagctttgctcaaactagacagccgtaccccgcgagtctctcgtcgagttcgagtatgagatctgtatctcagggttcagttattcgacttgctacggcgcaggatcccagtgatttgccttatgtactacgacttacagatagcttatga

SEQ ID NO: 14652 - protein, 450 aa, Muscodor strobelii
  misc_feature: SGI Peptide ID NO. 564832
  misc_feature (4)..(444): NCBI GI: 116205109 Blast Desc: CHGG_10438 [Chaetomium globosum CBS 148.51] gi|88176566|gb|EAQ84034.1| CHGG_10438 [Chaetomium globosum CBS 148.51]
  misc_feature (4)..(444): NCBI GI: 171689634 Blast Desc: protein product [Podospora anserina] gi|170944779|emb|CAP70890.1| protein product [Podospora anserina]
  misc_feature (7)..(449): NCBI GI: 261357017 Blast Desc: sucrase/ferredoxin domain-containing protein [Verticillium albo-atrum VaMs.102]
  misc_feature (9)..(449): NCBI GI: 256729092 Blast Desc: NECHADRAFT_93299 [Nectria haematococca mpVI 77-13-4]
  misc_feature (29)..(449): NCBI GI: 46138703 Blast Desc: FG10866.1 [Gibberella zeae PH-1]
  misc_feature (11)..(328): NCBI GI: 18376015 Blast Desc: conserved [Neurospora crassa]
  misc_feature (11)..(328): NCBI GI: 85110756 Blast Desc: NCU06775 [Neurospora crassa OR74A] gi|28925302|gb|EAA34380.1| [Neurospora crassa OR74A]
  misc_feature (7)..(337): NCBI GI: 39943752 Blast Desc: MGG_03887 [Magnaporthe grisea 70-15] gi|145014583|gb|EDJ99151.1| MGG_03887 [Magnaporthe grisea 70-15]
  misc_feature (8)..(444): NCBI GI: 255947734 Blast Desc: Pc22g06020 [Penicillium chrysogenum Wisconsin 54-1255] gi|211591651|emb|CAP97890.1| Pc22g06020 [Penicillium chrysogenum Wisconsin 54-1255]
  misc_feature (9)..(359): NCBI GI: 156040357 Blast Desc: SS1G_12195 [Sclerotinia sclerotiorum 1980] gi|154696251|gb|EDN95989.1| SS1G_12195 [Sclerotinia sclerotiorum 1980]
  misc_feature: Useful for introducing or modulating the production of volatile compounds
MPTSLFFRIAYNSIYTFLCLILAILLLVVPADFVQQALSTTHQIINVIVIGIIYVLAVIIVLFVYALRLYVTRSVLAGIPRAWLPIKKGDVTNDVKDMIVVSLSRSAAIALEARPKVMAPDVIPSDTGSVADKEKPDDPEESDRRRSRQLFRSKPPATVEDQMGIALPSVRPVWGYIEHSGWGSPASPDLANLQYTTVISELPNLIEAKAVSLAPSDPEPDPLSEIPALNADAIELLQRLPTMTMRQYIQRLIELEVLPESEDITDFLKLYEQDRFSGRPMSNATFRELMHLFADLLRNMQPLDPSVLYEGHGRDPSDFGFDGHIDDDAPQDSAPTTPTRSIASSLSIERAHSQRRQSRLGLGIRNSSANTRNQYRTAPTTPKSKAGGTVASRSPSASSANSFAQTRQPYPASLSSSSSMRSVSQGSVIRLATAQDPSDLPYVLRLTDSL

SEQ ID NO: 14653 - DNA, 3535 bp, Muscodor strobelii
  misc_feature: SGI EST ID NO. CUFF.34824.0
  misc_feature: Variant of the nucleotide sequence at SEQ ID NO 14651
ccagcatcctattgttctcctaggtgcgcgcctcaaccatgcgatgacccatgagctcttgtttcttgcatgagaacatcagaatgggaaactatctttatgtcgacgtcagggccatacgaccgacttcgagacgtcgatcgaccgtccgactttgtcaaacgacctgcagtccgcaaatcgtaactccctaaccattatgcgactcgaacagatactctactacgataatatccgattgccctcgatcgcatcatgccgaccagcctctttttccgcatcgcctacaactccatctataccttcttatgtctaatcctggcgatactgctccttgtcgttccggccgatttcgtccaacaagcgctcagcaccacccaccagatcatcaatgtcatcgtcatcggcattatctacgtcctcgcggttataattgttcttttcgtctacgccttacggctttatgtgacccgtagcgtactcgcaggaataccgagagcatggctgcccatcaagaaaggcgacgtcaccaacgacgtcaaagacatgatcgttgtcagtctgagccgaagtgccgccatcgcgctagaggctcgacccaaggtcatggccccagacgtgatcccgtcggacacaggtagcgttgccgacaaggagaagcccgacgatccggaagagagtgaccgacggaggtctcgacagctgttcaggtcgaaaccaccagctacggtagaggatcaaatgggtatcgctttaccgtctgttcgacctgtctggggatatatcgaacattcaggttggggttcaccagcgtctccagacctggcaaatttgcagtataccaccgtcatatcggaacttccaaatttaattgaggcgaaggccgtttcgctcgctccatctgacccagaacctgatccactctcagagatacctgcgctcaatgctgacgctattgagttactgcaacgtcttccgacgatgacgatgagacagtacatccaacgtctcattgagctagaggtgctgcctgaatctgaggacatcaccgactttttgaagctatacgagcaagaccggttttcgggtcgtcccatgtccaatgcgactttcagagagctcatgcacctctttgccgatctgctcagaaacatgcaaccgctggatccatctgttctatacgaaggtcacggccgcgatccgagtgatttcgggttcgatgggcacattgatgatgatgcaccacaggactcagctccgactacgccaacacgtagcattgccagttccctcagtattgagcgcgcgcattcgcagaggaggcaatctaggcttggattaggtattcggaactcgtcggcgaatacgaggaatcagtatcgcaccgcccccacgactcctaagagtaaagctggagggactgtggcatcacgatcgcctagcgcaagtagcgcgaatagctttgctcaaactagacagccgtaccccgcgagtctctcgtcgagttcgagtatgagatctgtatctcagggttcagttattcgacttgctacggcgcaggatcccagtgatttgccttatgtactacgacttacagatagcttatgatacaacagaccggcgttaatttcaatatcagacttcatacgaatacggacccgtgggatgcattgggctggcgtttgggatcaacgagaccctaggcagagggatgcaagggaaaagtggggcgcccagaaatggttggtttaccgcaacttcatactatccgctaatgtaatgcaatgagagtctgccactgctcatctcaatgaggccttactcgcaaacggtgacgaagcaattgaaggaagctgtggatgccgtgacgccacatcctcgcgggcatggcatacttagacgctaaacatctcaaagcttgactcgcggacggatgttgagatgctaaaaagaaatcatgatgttcgtgcagcagagtccgatgtaatgctataagagcctgggagatgactgggcattatcgacttcgatgcacttgggtttgaccatgacattatcaagatcttttgacgagtggcacatcatttaccttgcaattggtcaccttaatactaacagacagatgatcacagtcatttctatattcaggccgagccacgagcgctgccactgctcattattcaacttagcactactttcagatgattgagcattatcaacctcaatgcaattcggctcaaccatgatgagaccaagtccgccatgtccattttcaaaatgaaagttatccttacgccattgcgccttcgcttatacccgagagatcctataccaccaaatatatgacccaatcccatgtgagaagaaagctattgaaccatagccacgctctcattaacatacattcatccaatcatgactacctacaatgtcagcatctgataatggaacgtcaggtacggagacatcaacgtacccatcatcgacagcagtgagctaggcgccggagtgtctgccagtctggtattgtaccatgctgccttggacactcttctctagctctgccaagcgcttgctagaggaactgccttgggtcgagtaggaagtataggggtcacttccatggcgatttgacgtataccagtgaagtcgatcatcggcgattgtcttcttgtcggccgacgaggagtacttgtgggagtgcttcttgggtgtcaccctgttgtggtgtgtgttaggctgcgatatgattcacatctcgtcgagtgactgtggaaaaaaggcgggagaaggacaaggtggtacggagaaagtggcatgaatggagtcatcagagcagaaatgcatagctgtatcatgtacagcggaagatgagaaagcggagcgtcattacggcgaagagcaatgccagtttgggaccactagggaggatgagaccgaaggggggaaactcacccatatgtcaaggaggcattggtgctgggcatgttggtgcttaatgaatactaagacgagaaccgtattgcgaagggaaatcgagcttgaagagtgcttgtccaacttttcattcttgtgagaactggcgggaaaagctcagtatttgtaggcattttaaagagcgttgaccgaaaaattgaaggaaagccgcgacttttctaaccctctcgctctccctcttcccactcttcactcgctgaggagaccactatcaaaatgcagggtgtcaagagatccgcgtccgcgaccatttcatcttgtcctgtcttgctacggtcacgcctaagccgctgctgcaacaccacacaccacggctactcgtttgagcctagcccgctatatccattgagactaatcttcaaatggaagtgcaaaactatctaaatcagtccttggcacaatcctatttacactgttcacacgcaactcgtcagggcgctgcaccgtcacctgtgagagttgcccgcccgtttttggtctgtttcttcgcatacaaaacaagataacggtactcggtacaggcacgagtacaccgcgc

SEQ ID NO: 14654 - DNA, 255 bp, Muscodor strobelii
  misc_feature: SGI cDNA ID NO. 564833
  misc_feature: Reduced expression when VOC is produced
  misc_feature: Encodes the peptide sequence at SEQ ID NO 14655
atgcccagcaccaatgcctccttgacatatggggtgacacccaagaagcactcccacaagtactcctcgtcggccgacaagaagacaatcgccgatgatcgacttcactggtatacgtcaaatcgccatggaagtgacccctatacttcctactcgacccaaggcagttcctctagcaagcgcttggcagagctagagaagagtgtccaaggcagcatggtacaataccagactggcagacactccggcgcctag

SEQ ID NO: 14655 - protein, 84 aa, Muscodor strobelii
  misc_feature: SGI Peptide ID NO. 564833
  misc_feature: Useful for introducing or modulating the production of volatile compounds
MPSTNASLTYGVTPKKHSHKYSSSADKKTIADDRLHWYTSNRHGSDPYTSYSTQGSSSSKRLAELEKSVQGSMVQYQTGRHSGA

SEQ ID NO: 14656 - DNA, 1827 bp, Muscodor strobelii
  misc_feature: SGI cDNA ID NO. 564834
  misc_feature: Encodes the peptide sequence at SEQ ID NO 14657
atggccgccgtcagacgtcgtatcttgcttcccttgagtgtcgcgattatcctcactcttggtttctctacttcgtggttcgatcaatggcgctctcgaaatgaaccttacaattttgtgcagtctttcgacgacccggagtacttctggagaaggattcctacacgctatccagtatccgttcgcccactgccagcaggacgacccttgaatcttcccacaatccaacatcaatttacaggcaaagagaatgaagaggcaaaggtagttcggcttcaaaggcaagcctcggtgaagcaggcattcacgcgttgttggaatgcatatcgcgatcattcgtggcttcaagatgagcttgctccgataagtggtggctcgaagaataccttcggcggctgggccgctacgctggttgatagtctagatacgttatggataatgggtatgcacgaagaatttgaaagggcggtggcagcgtcggtgaacatcagctttgagaagagctctttagagcaagtcaatgccttcgagactaccatccggtatctcggaggttttctgggtgcttacgatttgagtggcgacacgcgactgctacacaaagcgcgacaagtaggagagatgctctacgtcgctttcgatacaccgaatcgtatgcccatcacacgctgggattttaacaacgctgctcaaggaggaaagcaggaggctcacgaatgggctcttgtggccgagatagggtcgctgtgcatggagttcactcgactgtctatgataaccggagattccaagtggttcgatgccacggagcgcatcgctgaggtgcttcacacgcagcagagtatgacgaagctgcctggaatgtggccaattagtgtgaaccctagagatacgagattctacgatgacaatgcgtttgggctcggcgcaatggcggactctgtctttgaatatttgcccaagatgacagctctgactggtggattgttgccagcctacgatgagatgtaccgttatgccatggataccgctaagacgcataatttctatcgtcctttgacccccgagaacgcagatatcctcatttctgccaccatccgcgtcgagactcttgatggcgatgaggtgccgttgcttgacctcggcggacaacatctcgtctgctttgtaggtggcatgcttgccataggcgcaaagctctacggacgctcaggagatatgactaccgcgcgccagataaccgatggctgtatctatacataccaggcgatgccgcatggcatcatgcccgagacattcaacatggcaccttgtccgtcgacatccgtttcatcgtcgcctatggcgtcaacgtgtctatggaacgagactctgtggaaacaagcagtacttgctcgagctaaagtggacacaaccggtttcgatcaagcggcagttgaagaacatgcaaatcgtataatagctgaaaagagattgcccaagggtttcaccgcaatacctgatacacggtatatactacgacccgaggcgattgagagtgtgtttgtgatgtaccgcgtcacaggcgatccatcctaccttgagcatggctggtccatgttcgaggccatacagtcgatgacgcagaccaagttagcaaatgcagcgctgtcagacgtaactgtcagagagggagagaagccagcacagatagactccatggagagcttctggatgggtgagacattaaagtacttttatttgctttttagtgagccggagctggtcagcttagacgagtttgtattcaacactgaggcacatccgcttaggcgactgacgcgctga

SEQ ID NO: 14657 - protein, 608 aa, Muscodor strobelii
  misc_feature: SGI Peptide ID NO. 564834
  misc_feature (101)..(605): Pfam Id: PF01532 Pfam Desc: Glycosyl hydrolase family 47
  misc_feature (101)..(347): Pfam Id: PF01532 Pfam Desc: Glycosyl hydrolase family 47
  misc_feature (500)..(605): Pfam Id: PF01532 Pfam Desc: Glycosyl hydrolase family 47
  misc_feature (45)..(605): NCBI GI: 119474483 Blast Desc: glycosyl hydrolase family 47 protein [Neosartorya fischeri NRRL 181] gi|119407270|gb|EAW17220.1| glycosyl hydrolase family 47 protein [Neosartorya fischeri NRRL 181]
  misc_feature (45)..(607): NCBI GI: 256735446 Blast Desc: NECHADRAFT_31115 [Nectria haematococca mpVI 77-13-4]
  misc_feature (54)..(606): NCBI GI: 85104114 Blast Desc: NCU01059 [Neurospora crassa OR74A] gi|18376217|emb|CAD21333.1| class I alpha-mannosidase [Neurospora crassa] gi|28923219|gb|EAA32435.1| conserved [Neurospora crassa
  misc_feature (50)..(607): NCBI GI: 171692653 Blast Desc: protein product [Podospora anserina] gi|170946275|emb|CAP73076.1| protein product [Podospora anserina]
  misc_feature (9)..(593): NCBI GI: 46107552 Blast Desc: FG00659.1 [Gibberella zeae PH-1]
  misc_feature (47)..(606): NCBI GI: 116195506 Blast Desc: CHGG_04351 [Chaetomium globosum CBS 148.51] gi|88180264|gb|EAQ87732.1| CHGG_04351 [Chaetomium globosum CBS 148.51]
  misc_feature (42)..(606): NCBI GI: 261193625 Blast Desc: glycosyl hydrolase family 47 protein [Ajellomyces dermatitidis SLH14081] gi|239588823|gb|EEQ71466.1| glycosyl hydrolase family 47 protein [Ajellomyces dermatitidis SLH14081]
  misc_feature (50)..(606): NCBI GI: 116198617 Blast Desc: CHGG_07464 [Chaetomium globosum CBS 148.51] gi|88178743|gb|EAQ86211.1| CHGG_07464 [Chaetomium globosum CBS 148.51]
  misc_feature (47)..(606): NCBI GI: 225558770 Blast Desc: glycosyl hydrolase [Ajellomyces capsulatus G186AR]
  misc_feature (1)..(604): NCBI GI: 238838377 Blast Desc: class I alpha-mannosidase [Microsporum canis CBS 113480]
  misc_feature (94)..(603): SWISSPROT Homolog: EC 3.2.1.113 Mannosyl-oligosaccharide 1,2-alpha-mannosidase
MAAVRRRILLPLSVAIILTLGFSTSWFDQWRSRNEPYNFVQSFDDPEYFWRRIPTRYPVSVRPLPAGRPLNLPTIQHQFTGKENEEAKVVRLQRQASVKQAFTRCWNAYRDHSWLQDELAPISGGSKNTFGGWAATLVDSLDTLWIMGMHEEFERAVAASVNISFEKSSLEQVNAFETTIRYLGGFLGAYDLSGDTRLLHKARQVGEMLYVAFDTPNRMPITRWDFNNAAQGGKQEAHEWALVAEIGSLCMEFTRLSMITGDSKWFDATERIAEVLHTQQSMTKLPGMWPISVNPRDTRFYDDNAFGLGAMADSVFEYLPKMTALTGGLLPAYDEMYRYAMDTAKTHNFYRPLTPENADILISATIRVETLDGDEVPLLDLGGQHLVCFVGGMLAIGAKLYGRSGDMTTARQITDGCIYTYQAMPHGIMPETFNMAPCPSTSVSSSPMASTCLWNETLWKQAVLARAKVDTTGFDQAAVEEHANRIIAEKRLPKGFTAIPDTRYILRPEAIESVFVMYRVTGDPSYLEHGWSMFEAIQSMTQTKLANAALSDVTVREGEKPAQIDSMESFWMGETLKYFYLLFSEPELVSLDEFVFNTEAHPLRRLTR

SEQ ID NO: 14658 - DNA, 2810 bp, Muscodor strobelii
  misc_feature: SGI EST ID NO. CUFF.34867.0
  misc_feature: Variant of the nucleotide sequence at SEQ ID NO 14656
ccgaactgcgcgaacaaatttcaagccgatggacaagcaattcctttcgcaacatacttcatgcaaagcagctatgtctacatggccaatattacaatatggccgccgtcagacgtcgtatcttgcttcccttgagtgtcgcgattatcctcactcttggtttctctacttcgtggttcgatcaatggcgctctcgaaatgaaccttacaattttgtgcagtctttcgacgacccggagtacttctggagaaggattcctacacgctatccagtatccgttcgcccactgccagcaggacgacccttgaatcttcccacaatccaacatcaatttacaggcaaagagaatgaagaggcaaaggtagttcggcttcaaaggcaagcctcggtgaagcaggcattcacgcgttgttggaatgcatatcgcgatcattcgtggcttcaagatgagcttgctccgataagtggtggctcgaagaataccttcggcggctgggccgctacgctggttgatagtctagatacgttatggataatgggtatgcacgaagaatttgaaagggcggtggcagcgtcggtgaacatcagctttgagaagagctctttagagcaagtcaatgccttcgagactaccatccggtatctcggaggttttctgggtgcttacgatttgagtggcgacacgcgactgctacacaaagcgcgacaagtaggagagatgctctacgtcgctttcgatacaccgaatcgtatgcccatcacacgctgggattttaacaacgctgctcaaggaggaaagcaggaggctcacgaatgggctcttgtggccgagatagggtcgctgtgcatggagttcactcgactgtctatgataaccggagattccaagtggttcgatgccacggagcgcatcgctgaggtgcttcacacgcagcagagtatgacgaagctgcctggaatgtggccaattagtgtgaaccctagagatacgagattctacgatgacaatgcgtttgggctcggcgcaatggcggactctgtctttgaatatttgcccaagatgacagctctgactggtggattgttgccagcctacgatgagatgtaccgttatgccatggataccgctaagacgcataatttctatcgtcctttgacccccgagaacgcagatatcctcatttctgccaccatccgcgtcgagactcttgatggcgatgaggtgccgttgcttgacctcggcggacaacatctcgtctgctttgtaggtggcatgcttgccataggcgcaaagctctacggacgctcaggagatatgactaccgcgcgccagataaccgatggctgtatctatacataccaggcgatgccgcatggcatcatgcccgagacattcaacatggcaccttgtccgtcgacatccgtttcatcgtcgcctatggcgtcaacgtgtctatggaacgagactctgtggaaacaagcagtacttgctcgagctaaagtggacacaaccggtttcgatcaagcggcagttgaagaacatgcaaatcgtataatagctgaaaagagattgcccaagggtttcaccgcaatacctgatacacggtatatactacgacccgaggcgattgagagtgtgtttgtgatgtaccgcgtcacaggcgatccatcctaccttgagcatggctggtccatgttcgaggccatacagtcgatgacgcagaccaagttagcaaatgcagcgctgtcagacgtaactgtcagagagggagagaagccagcacagatagactccatggagagcttctggatgggtgagacattaaagtacttttatttgctttttagtgagccggagctggtcagcttagacgagtttgtattcaacactgaggcacatccgcttaggcgactgacgcgctgaggacggcacgggcatcgaagaaggccgaatagagatggcgctcagaaattttgatataacacgtaattttaaccatatttagcaaggactcatacggatttcagcgatattgctcggtaaattcgtcagggatacttttcttcaatcgccgtcccaaggtgccgaaacgcttgttttcatttttaacttgcagtcgtatattcatttctcccccatcgtcactagaatagagaggaaacaaatcccccactaatcagggccgcttttcgaatcggttcgccctgcgggtggctgcgctggtggcaacatcgtttcggtgcacttccgacgaaagcctgttgagttcttcgtatcgaatcaaacgagaaagctgggtcggacgctacgagtacgcctcgaactacctgccagcagataaccatggttggcgtgtgatttgcactgggacatatatacatctctgaactccgagaaaaacccgcatcgaagtgtgtccagtgtaggcccttcgctacatgcagcatcacctcggcagcccgtactagtcttggcgaaacatagatgggcatgtttcagaacaccgaaagagggccgcgtagaacatgccgtaaaagtacagctcgtcacctacagtaatttgtcacagatgaagaatcatctgaaatacaatttcttaccgcgatcgattgtacgttttatctcatatttaaaatgatggctatgcatacaagcccgttatttagatatacacatttattgtattcgacgctctgtgctttgatgtgcttgagtgttgtggcagaactaagtcaatgacatggaactggcacttcgatcatgtagtagatgacagcaggaaggggctgtaatacttcaacctctacg

SEQ ID NO: 14659 - DNA, 354 bp, Muscodor strobelii
  misc_feature: SGI cDNA ID NO. 564835
  misc_feature: Encodes the peptide sequence at SEQ ID NO 14660
atgaagtcctttcaactcgtggtagccgccctcatggcaactatcaccagtgcgatgcccaccgagaccgcggagaacgctatcctgtcgaagcggtccgatgctcagttcactaactggcaatccactaactgcggtggtagcgatctcattgtgaccgccacgggtaatggccagaagggcaacttcgcaccagggcaaaatagtgtcattcttaactctataaacccgggctttcaccttactctgtatgctggtacgaatcaggccaaccctgtcctgagacttaactccgagaatgtgggagagtgccacaccgtttcttaccagagctggggtatcttcaacacctaa

SEQ ID NO: 14660 - protein, 117 aa, Muscodor strobelii
  misc_feature: SGI Peptide ID NO. 564835
  misc_feature (7)..(116): NCBI GI: 156032535 Blast Desc: SS1G_13965 [Sclerotinia sclerotiorum 1980] gi|154699367|gb|EDN99105.1| SS1G_13965 [Sclerotinia sclerotiorum 1980]
  misc_feature (29)..(116): NCBI GI: 154292433 Blast Desc: [Botryotinia fuckeliana B05.10] gi|150846121|gb|EDN21314.1| [Botryotinia fuckeliana B05.10]
MKSFQLVVAALMATITSAMPTETAENAILSKRSDAQFTNWQSTNCGGSDLIVTATGNGQKGNFAPGQNSVILNSINPGFHLTLYAGTNQANPVLRLNSENVGECHTVSYQSWGIFNT

SEQ ID NO: 14661 - DNA, 2493 bp, Muscodor strobelii
  misc_feature: SGI cDNA ID NO. 564836
  misc_feature: Encodes the peptide sequence at SEQ ID NO 14662
atgagctggcaacaggttaccaacatgggccccggtgctaacggcatcggcccaggcatgggtcaagaactatccggaggtccctccatgcatcaatctcacgtgccccatgccaccgagtataccttgcaaggtgttatgcgatttctgcaaactgaatggcatcgtcacgagcgagaccggaattcgtgggagatcgagcgccaggagatgaaagccaggatagctgcactggagggagctgccagacgcgccgactcgacacaaaaggccttgaagcgctatgtcacaattctggaggggaagatcaaagatcagcctgccagccacgatgagaacactgctgagagcgatcattctgttaagaagcctccgaaactggacagggcagctttgattcaggagaaactgaaatcagccacggagaaatcgaaggatggtgtatctggcccggaaggactccagggacttcagggtgatgaggaacgcgatcgggatgagctgaggaacttcctggatcagtgccaggccgaattctcctacttgctaataacacctgcaaatcctctgccacctcgagagtctcccccactacccatgatggaggacttgcgtgagggcgattttgctgtgcccattggccaacagcctctggattcagcatttcaagccctcaggctgaacccaaaccacgctaaagaacccccgtctcgcctgcctgcaaattctaatcacaacgtaccatctacgcaacaactgggaaagggcaatgagctccaatcagcccctatgattcggtccagcgagagctctgccggcatgtactcgcaggccaatgagtggcaacagactgccggaaatgcacctcctatccggtcccaagatgaacagctccccaaaatccctcaagtgactcctttttccaaagctgagaatgccgaaagctctgccgacaagcgaagcactgactccgaaggatgggatttcaatgacgcggcgtttccagatcctgcgccttctcaacccctacagccatcgacacaacggcctgatactgacgtcttcccctctgctgaaaacttaccaaaatcaccaaaccggggcccgacctcgcatcgcaggaaaacctccatgtcacgccggagaagtgccgaacatgacctatctttgaactctacgtcgcagaagatggacaataccttcaaacttcgctatggacttcgtgggcatctcaactccgttcgtactgttatcttttcgggcggtggaagccctggcgaacccgagatttgtactgcgggtgacgatggcctgattaagagattccatctaccccgggacaatcctagccatctcggaaaccagcccaatgatcttgacgtgccggctgatttcacgcatcgtgggcatgcgggcgctgttctatgtctcacgtcctggtcaccggctcctaatttctccaccggcggcagagctcagggcgatggttggatattctcaggaggccaagacgccaccattcgtgtgtgggaacgcggcaggacagaccctaaagctactctagatggccacaccgatgctgtgtgggccatctgcgtactacctgctacgttaggttccatcttcggacaatcgaaccagtatgggcctccagatcgaattcttgtagcatctggcggcgcggatggtgcagtcaaaatctgggcggtgagcgctcctccccagctgacgtccccacaaccagcaccgactggacgacgtgctacggcgggtgggagagtgagaggtaattcgatgagttctggttcacaattcccaagttcgccacagcctagcatggctaccaactctccgttccactccacactagtacatgacatccgccgatcaaatggttccaaagcgtctccaacctgtatcacccctctatcaacaacgggagatgccttcgttgttagcttctctgacgcttccatcattgtctacgacacgagaactggtgaggaggttggttccatggccagtttggagacttacgacaacactatggctactgcagtcaatgccattgtcgctactacagctggtctcgagcagacttcaggcacgggaatgggcgatgaagatgctggtggcccaactggtagcagtggctcatcgggcagcggtgtcgaaggcgtcattatttcagggcacgaagaccgttacatcaggttcttcgatgccaacagtggacaatgcacatacaacatgctcgcgcaccctgctgcgatttctagtctatcactaagtcccgacggtcgagagcttgtctctgctggccatgacgcgagccttcgtttctggtccttggaaaagagaacttgtactcaagagataacaaatcaccgcaccatgagaggcgagggcgtatgctctgtggtctggagtcaagatggccgatgggtcgttagtgcaggaggcgacgggctcgttaaagtcttcactcgatga

SEQ ID NO: 14662 - protein, 830 aa, Muscodor strobelii
  misc_feature: SGI Peptide ID NO. 564836
  misc_feature (745)..(783): Pfam Id: PF00400 Pfam Desc: WD domain, G-beta repeat
  misc_feature (515)..(569): Pfam Id: PF00400 Pfam Desc: WD domain, G-beta repeat
  misc_feature (791)..(829): Pfam Id: PF00400 Pfam Desc: WD domain, G-beta repeat
  misc_feature (42)..(187): Pfam Id: PF08232 Pfam Desc: Striatin family
  misc_feature (42)..(126): Pfam Id: PF08232 Pfam Desc: Striatin family
  misc_feature (803)..(829): Pfam Id: PF00400 Pfam Desc: WD domain, G-beta repeat
  misc_feature (466)..(511): Pfam Id: PF00400 Pfam Desc: WD domain, G-beta repeat
  misc_feature (9)..(826): NCBI GI: 46109566 Blast Desc: FG01665.1 [Gibberella zeae PH-1]
  misc_feature (9)..(830): NCBI GI: 61744137 Blast Desc: stalk rot protein [Gibberella moniliformis]
  misc_feature (36)..(830): NCBI GI: 116200249 Blast Desc: CHGG_08280 [Chaetomium globosum CBS 148.51] gi|88179559|gb|EAQ87027.1| CHGG_08280 [Chaetomium globosum CBS 148.51]
  misc_feature (36)..(830): NCBI GI: 261356913 Blast Desc: striatin Pro11 [Verticillium albo-atrum VaMs.102]
  misc_feature (9)..(830): NCBI GI: 73621961 Blast Desc: STRN_SORMA RecName: Full=Striatin Pro11 gi|42517030|emb|CAD91916.1| Pro11 protein [Sordaria macrospora]
  misc_feature (47)..(830): NCBI GI: 171683820 Blast Desc: protein product [Podospora anserina] gi|170941870|emb|CAP67523.1| protein product [Podospora anserina]
  misc_feature (31)..(815): NCBI GI: 145603184 Blast Desc: MGG_06211 [Magnaporthe grisea 70-15] gi|145011471|gb|EDJ96127.1| MGG_06211 [Magnaporthe grisea 70-15]
  misc_feature (32)..(830): NCBI GI: 154318798 Blast Desc: BC1G_02788 [Botryotinia fuckeliana B05.10] gi|150857918|gb|EDN33110.1| BC1G_02788 [Botryotinia fuckeliana B05.10]
  misc_feature (32)..(830): NCBI GI: 156063836 Blast Desc: SS1G_02036 [Sclerotinia sclerotiorum 1980] gi|154697370|gb|EDN97108.1| SS1G_02036 [Sclerotinia sclerotiorum 1980]
  misc_feature (36)..(830): NCBI GI: 238485524 Blast Desc: cell differentiation and development protein Fsr1/Pro11 [Aspergillus flavus NRRL3357] gi|220698879|gb|EED55218.1| cell differentiation and development
MSWQQVTNMGPGANGIGPGMGQELSGGPSMHQSHVPHATEYTLQGVMRFLQTEWHRHERDRNSWEIERQEMKARIAALEGAARRADSTQKALKRYVTILEGKIKDQPASHDENTAESDHSVKKPPKLDRAALIQEKLKSATEKSKDGVSGPEGLQGLQGDEERDRDELRNFLDQCQAEFSYLLITPANPLPPRESPPLPMMEDLREGDFAVPIGQQPLDSAFQALRLNPNHAKEPPSRLPANSNHNVPSTQQLGKGNELQSAPMIRSSESSAGMYSQANEWQQTAGNAPPIRSQDEQLPKIPQVTPFSKAENAESSADKRSTDSEGWDFNDAAFPDPAPSQPLQPSTQRPDTDVFPSAENLPKSPNRGPTSHRRKTSMSRRRSAEHDLSLNSTSQKMDNTFKLRYGLRGHLNSVRTVIFSGGGSPGEPEICTAGDDGLIKRFHLPRDNPSHLGNQPNDLDVPADFTHRGHAGAVLCLTSWSPAPNFSTGGRAQGDGWIFSGGQDATIRVWERGRTDPKATLDGHTDAVWAICVLPATLGSIFGQSNQYGPPDRILVASGGADGAVKIWAVSAPPQLTSPQPAPTGRRATAGGRVRGNSMSSGSQFPSSPQPSMATNSPFHSTLVHDIRRSNGSKASPTCITPLSTTGDAFVVSFSDASIIVYDTRTGEEVGSMASLETYDNTMATAVNAIVATTAGLEQTSGTGMGDEDAGGPTGSSGSSGSGVEGVIISGHEDRYIRFFDANSGQCTYNMLAHPAAISSLSLSPDGRELVSAGHDASLRFWSLEKRTCTQEITNHRTMRGEGVCSVVWSQDGRWVVSAGGDGLVKVFTR

SEQ ID NO: 14663 - DNA, 3913 bp, Muscodor strobelii
  misc_feature: SGI EST ID NO. CUFF.35081.0
  misc_feature: Variant of the nucleotide sequence at SEQ ID NO 14661
cagcagcatacctagacctacctaggttgggacttgcaggtgcttgctcgttgggctggttggtccttctgtcgcccatctcatacgtatcctctcatcgaccaggcgagtgtgcatcggcaaagacgtctgctgtaggactgtacaacatctctggttcgcatttttgttagtatttgcttgtgcatcggaccttcacttgatcttgcctgccgcccccgacgaccacgacgacatcacgagataagacggagaaacgccatcgacgaagcttagaccctgccctgcgcttctgcttcagctgtcacataatttcaacatcgcgtcgacacgggcaccgacatagcttcgataccacccacgtcactcattatcatcgccaatagaacccggcttcggttgcaactgcctctgattctgcatttcctgcgacttgcattgctattgcgccgtcccgctctcccagatcatctccaaccctgtccaaacctcgaccgacctgcatccacgagcccctttcgtctcctcgccggtgatcttggccgaaccatcacacgcgcctttgatccgttccgagacgcatcatctatccgcttttttcgcatcgttgactcgtgcgcatgccgattttaaccggccttgcccatactcgatggtgaagacggctgtgcggcccaataccgtcccttcccgccgcaaagagctcaacccaacgactctgccactatgagctggcaacaggttaccaacatgggccccggtgctaacggcatcggcccaggcatgggtcaagaactatccggaggtccctccatgcatcaatctcacgtgccccatgccaccgagtataccttgcaaggcaagtgacccgggaaaactgaagagtgtccgaggctgtggacggatcatctaacacacatataggtgttatgcgatttctgcaaactgaatggcatcgtcacgagcgagaccggaattcgtgggagatcgagcgccaggagatgaaagccaggatagctgcactggagggagctgccagacgcgccgactcgacacaaaaggccttgaagcgctatgtcacaattctggaggggaagatcaaagatcagcctgccagccacgatgagaacactgctgagagcgatcattctgttaagaagcctccgaaactggacagggcagctttgattcaggagaaactgaaatcagccacggagaaatcgaaggatggtgtatctggcccggaaggactccagggacttcagggtgatgaggaacgcgatcgggatgagctgaggaacttcctggatcagtgccaggccgaattctcctacttgctaataacacctgcaaatcctctgccacctcgagagtctcccccactacccatgatggaggacttgcgtgagggcgattttgctgtgcccattggccaacagcctctggattcagcatttcaagccctcaggctgaacccaaaccacgctaaagaacccccgtctcgcctgcctgcaaattctaatcacaacgtaccatctacgcaacaactgggaaagggcaatgagctccaatcagcccctatgattcggtccagcgagagctctgccggcatgtactcgcaggccaatgagtggcaacagactgccggaaatgcacctcctatccggtcccaagatgaacagctccccaaaatccctcaagtgactcctttttccaaagctgagaatgccgaaagctctgccgacaagcgaagcactgactccgaaggatgggatttcaatgacgcggcgtttccagatcctgcgccttctcaacccctacagccatcgacacaacggcctgatactgacgtcttcccctctgctgaaaacttaccaaaatcaccaaaccggggcccgacctcgcatcgcaggaaaacctccatgtcacgccggagaagtgccgaacatgacctatctttgaactctacgtcgcagaagatggacaataccttcaaacttcgctatggacttcgtgggcatctcaactccgttcgtactgttatcttttcgggcggtggaagccctggcgaacccgagatttgtactgcgggtgacgatggcctgattaagagattccatctaccccgggacaatcctagccatctcggaaaccagcccaatgatcttgacgtgccggctgatttcacgcatcgtgggcatgcgggcgctgttctatgtctcacgtcctggtcaccggctcctaatttctccaccggcggcagagctcagggcgatggttggatattctcaggaggccaagacgccaccattcgtgtgtgggaacgcggcaggacagaccctaaagctactctagatggccacaccgatgctgtgtgggccatctgcgtactacctgctacgttaggttccatcttcggacaatcgaaccagtatgggcctccagatcgaattcttgtagcatctggcggcgcggatggtgcagtcaaaatctgggcggtgagcgctcctccccagctgacgtccccacaaccagcaccgactggacgacgtgctacggcgggtgggagagtgagaggtaattcgatgagttctggttcacaattcccaagttcgccacagcctagcatggctaccaactctccgttccactccacactagtacatgacatccgccgatcaaatggttccaaagcgtctccaacctgtatcacccctctatcaacaacgggagatgccttcgttgttagcttctctgacgcttccatcattgtctacgacacgagaactggtgaggaggttggttccatggccagtttggagacttacgacaacactatggctactgcagtcaatgccattgtcgctactacagctggtctcgagcagacttcaggcacgggaatgggcgatgaagatgctggtggcccaactggtagcagtggctcatcgggcagcggtgtcgaaggcgtcattatttcagggcacgaagaccgttacatcaggttcttcgatgccaacagtggacaatgcacatacaacatgctcgcgcaccctgctgcgatttctagtctatcactaagtcccgacggtcgagagcttgtctctgctggccatgacgcgagccttcgtttctggtccttggaaaagagaacttgtactcaagagataacaaatcaccgcaccatgagaggcgagggcgtatgctctgtggtctggagtcaagatggccgatgggtcgttagtgcaggaggcgacgggctcgttaaagtcttcactcgatgaaccttcccatattcctcaacccatcgcaccatagacgagaaaaatgccaagtatcgcctggagtcaaagggatagatgccatcagttgctgcaatgtggcaaacatcccgttcgaattaatagcattactcaaaaacaccataaataatcacagaagcggaaggcatattgcgatcaacggatatgagaaacgctcttaagcctccgagcgacaagattccaagtatacactatctgagtctagtgagaaatgactcatgtacaaagcgacgagaagtaacgtgtagaagaatcaagctctcatgaggaaatacccctttaatatactaggattcgagtcgccctacttgggggacagattacgacacgaaagagatctgcgattcagcattctggctctttgagatcagtgtagaagaataccattgtagattattagcatggtcagaatgcggcctgtgtacaatatcgattgatacccagatttgtgtcttttactaccagtgcgtagcttcagatatgctgtcggccaagtagcacgatgaacggcaggttcgacctaaggggcatcacgtaattgtagatacacacagtattgatgttattcaatccgaataacagcccattcc

SEQ ID NO: 14664 - DNA, 2973 bp, Muscodor strobelii
  misc_feature: SGI cDNA ID NO. 564837
  misc_feature: Encodes the peptide sequence at SEQ ID NO 14665
atgtacgcacgacatattgatcatggggttcagactccatcacaggtctggcagtctccacgttatggccgtttggaacgcccaagcaccgagaagacttacatgaaagacactattgagtactccgcaacttgggactctcaagactccgatgacatattgttcgaagccgggaaaacagagtacaagcctacagcactaagatggcctttcttgatggctcttgcgttcgctttattagctaccctgggatctcttgcctatgccattgctactctgccggttatgggctcgaacaccgacccgacaaatgcccatgccatagaagccagaaactttggcacatctggagcaaaatcaaaacgtgtcatctatgtgcaggagactatcattgtaaccatcaatccagctatggtggctgggaggggactaggagatggaacgagaaacgaagataactcggctatagtgcctccaaaagatactttcaataccgacagtatagtcgactcaaagactagctcacatagtagttgggttatcgcaccacatagtagctttgctagtattggcgagcaaaccgtaacaatgtcaaactcgccggataccactccaggcatcacatcaactagaacaattacgaaacccaaatccgatttcaacgatattggggtgcaaactgtcacggaaactatctcatcagatccaaatctgtcatcgtctcgacccagaagcgactttggaggtacgggagatgaaactgtaacggaatcgagttttccagatttgactgccacaccctctggtagaccgaagagtgattttggagatgtgggagatcaatcggtcaccgaatcaatttcaaccaccagcgaagcagaacaaggctccagctctagcatgatgattgcctcctcgaaagcgcaaagtgactttgggggagccggcggcgatcagacggttactgtttctgattcctccgttagtatcgcaacactcaccgcgatcacttcaaatttcggcgacgttggatcgaagacagtcactgatatttccgaaccaacgagcacacacaccacacctaccaccatcatcgaaacaaacatcctgacagatgcacaaggaacacctacggcaacgtcaataataacaaaaacaacagttttctcaaaaccggcatcagattttggtgaaacagaggagacgacagtgacattaggcatcacgacagtgacggacgctcaaggccttatagtagcgacttcaacattaacgcctagtgccttatcctcattgagccttaccacactgacggactcagcaggtaggccgacatcaacgtcgacctcgacaatcgttatcacgccatctctcataacggtaacggatagctcaggtcatcccacagccactctcgcaagctatccagacccgtcctcaggttcagattcgggcggtacgcatgtcgtggtatatcatatttcagatgggcagtacttctctggcatgtttttaccaacactcattgccagtcttctcgccatcgtcgtacgaatccttgacgcaaatgcgaagatattccagccttggcatgcgttgatgcacgagcgcggggcttttggccgcgagtcaatttgcctggagactggtgggctaaattcattcgtcatgagttttagatcactacttggcggacaagcagttgtttttctcacgagtactttactgctcttatccgcagtgctcgtcccgctctcgtctgaagctattggactcgatttaagaggtatggactgcaagaagggcggaagcacaggaagagtctgcgcgtttgttctcagtgcttccaaaccagctgcagatgcttctttagcaattattgcagtcatggtcgtcacagcggtattgttgattgtgttgttgggaagatggagattaggtgtatatgcaaatccttggagtatttgtaccctcgcatcactatctctgaaccaggagctccgagaccttatcgtcagtgctgctgtcgctgagccaaatgatcgacagagcaagagtatgatagaagaccgcaacttcaaattgggttatttccgccgcaatggagccacagagtatggaatcactgccatggacaatatgggccatgttcagtatcatggtccgcacggagattatcacgaagttggtgcaatcaacgatcagtcgctctacgaagctagaaaagcgagacggagtatgcccttcttcatcctgactttcgcaggtcgcctagttctcctaattcctattgccggagtccttggagtcgtgctgtattactcacaaagcggcggggacacggggttcgagaatttcattgacagtgataccttcggagtacgatttctgttcgcgagttttggtgttattattagcttcttttggtctacatttcacgatgcaatctcaataatgagcccctatcagctccttgcccggcgtccgcagcccgccacacgctccatccttctcgcaccacctacaaacgccttctcgggtgtactattcgcgttccgcactaggcgcatctaccttggcttagtgagcttcgcatcaattctctccgaattcctaggaatattccttagcaacgttccattccaagtgacgcaaacctttcttgtgtcacaaatcagcatctggacctccgtatcagtccttgctttgatgctattcttgggtctactatcctttttcatcaagtggcctcatatgccagtggacccaagtaccatcgctggcgcgatgtactacattgccgactcgcctgtacttcaaaatcttgaaggaatgagtgtgatggataagaaagaccgggatctggtaatagcagagcgcggtgatttatatgaatttggggaaattgagactccgactggcagcacgaggacaggtgtgaatgttatacatactaatggctttatgtcctaa

SEQ ID NO: 14665 - protein, 990 aa, Muscodor strobelii
  misc_feature: SGI Peptide ID NO. 564837
  misc_feature (151)..(981): NCBI GI: 171691236 Blast Desc: protein product [Podospora anserina] gi|170945566|emb|CAP71679.1| protein product [Podospora anserina]
  misc_feature (400)..(969): NCBI GI: 116195274 Blast Desc: CHGG_04235 [Chaetomium globosum CBS 148.51] gi|88180148|gb|EAQ87616.1| CHGG_04235 [Chaetomium globosum CBS 148.51]
  misc_feature (402)..(981): NCBI GI: 256725755 Blast Desc: NECHADRAFT_43287 [Nectria haematococca mpVI 77-13-4]
  misc_feature (492)..(981): NCBI GI: 46116628 Blast Desc: FG04156.1 [Gibberella zeae PH-1]
  misc_feature (59)..(975): NCBI GI: 46123099 Blast Desc: FG05927.1 [Gibberella zeae PH-1]
  misc_feature (404)..(987): NCBI GI: 39945810 Blast Desc: MGG_08025 [Magnaporthe grisea 70-15] gi|145019260|gb|EDK03488.1| MGG_08025 [Magnaporthe grisea 70-15]
  misc_feature (411)..(981): NCBI GI: 171678505 Blast Desc: protein product [Podospora anserina] gi|170937322|emb|CAP61980.1| protein product [Podospora anserina]
  misc_feature (487)..(975): NCBI GI: 171695510 Blast Desc: protein product [Podospora anserina] gi|170947997|emb|CAP60161.1| protein product [Podospora anserina]
  misc_feature (495)..(970): NCBI GI: 171679900 Blast Desc: protein product [Podospora anserina] gi|170939576|emb|CAP64803.1| protein product [Podospora anserina]
  misc_feature (407)..(981): NCBI GI: 171695872 Blast Desc: protein product [Podospora anserina] gi|170948178|emb|CAP60342.1| protein product [Podospora anserina]
MYARHIDHGVQTPSQVWQSPRYGRLERPSTEKTYMKDTIEYSATWDSQDSDDILFEAGKTEYKPTALRWPFLMALAFALLATLGSLAYAIATLPVMGSNTDPTNAHAIEARNFGTSGAKSKRVIYVQETIIVTINPAMVAGRGLGDGTRNEDNSAIVPPKDTFNTDSIVDSKTSSHSSWVIAPHSSFASIGEQTVTMSNSPDTTPGITSTRTITKPKSDFNDIGVQTVTETISSDPNLSSSRPRSDFGGTGDETVTESSFPDLTATPSGRPKSDFGDVGDQSVTESISTTSEAEQGSSSSMMIASSKAQSDFGGAGGDQTVTVSDSSVSIATLTAITSNFGDVGSKTVTDISEPTSTHTTPTTIIETNILTDAQGTPTATSIITKTTVFSKPASDFGETEETTVTLGITTVTDAQGLIVATSTLTPSALSSLSLTTLTDSAGRPTSTSTSTIVITPSLITVTDSSGHPTATLASYPDPSSGSDSGGTHVVVYHISDGQYFSGMFLPTLIASLLAIVVRILDANAKIFQPWHALMHERGAFGRESICLETGGLNSFVMSFRSLLGGQAVVFLTSTLLLLSAVLVPLSSEAIGLDLRGMDCKKGGSTGRVCAFVLSASKPAADASLAIIAVMVVTAVLLIVLLGRWRLGVYANPWSICTLASLSLNQELRDLIVSAAVAEPNDRQSKSMIEDRNFKLGYFRRNGATEYGITAMDNMGHVQYHGPHGDYHEVGAINDQSLYEARKARRSMPFFILTFAGRLVLLIPIAGVLGVVLYYSQSGGDTGFENFIDSDTFGVRFLFASFGVIISFFWSTFHDAISIMSPYQLLARRPQPATRSILLAPPTNAFSGVLFAFRTRRIYLGLVSFASILSEFLGIFLSNVPFQVTQTFLVSQISIWTSVSVLALMLFLGLLSFFIKWPHMPVDPSTIAGAMYYIADSPVLQNLEGMSVMDKKDRDLVIAERGDLYEFGEIETPTGSTRTGVNVIHTNGFMS

SEQ ID NO: 14666 - DNA, 3443 bp, Muscodor strobelii
  misc_feature: SGI EST ID NO. CUFF.34885.0
  misc_feature: Variant of the nucleotide sequence at SEQ ID NO 14664
ccttcatgagcagaaggctgagctgccgtgcgacggcatgtcaaaaacaggggcctcagcttgcaggggacttatgaggcaaagggcaaaagatctagcggcacatgccggaagttgtttaggcccccaaatactgaattatctacaacaacgaatgcgataacagcgaagtcctacatctcccttcgtagttcactggtcttatcattgagcacagctatatgacatccagctatctcagctccgacttaagtcgggagcgagaattgttatagcgctatgagtcgacctttcgtgagctatagcgaattgaggaatagcgattttgatggcgaccaagggacggagaacagtccaaatctgagcactgttgactccatgtacgcacgacatattgatcatggggttcagactccatcacaggtctggcagtctccacgttatggccgtttggaacgcccaagcaccgagaagacttacatgaaagacactattgagtactccgcaacttgggactctcaagactccgatgacatattgttcgaagccgggaaaacagagtacaagcctacagcactaagatggcctttcttgatggctcttgcgttcgctttattagctaccctgggatctcttgcctatgccattgctactctgccggttatgggctcgaacaccgacccgacaaatgcccatgccatagaagccagaaactttggcacatctggagcaaaatcaaaacgtgtcatctatgtgcaggagactatcattgtaaccatcaatccagctatggtggctgggaggggactaggagatggaacgagaaacgaagataactcggctatagtgcctccaaaagatactttcaataccgacagtatagtcgactcaaagactagctcacatagtagttgggttatcgcaccacatagtagctttgctagtattggcgagcaaaccgtaacaatgtcaaactcgccggataccactccaggcatcacatcaactagaacaattacgaaacccaaatccgatttcaacgatattggggtgcaaactgtcacggaaactatctcatcagatccaaatctgtcatcgtctcgacccagaagcgactttggaggtacgggagatgaaactgtaacggaatcgagttttccagatttgactgccacaccctctggtagaccgaagagtgattttggagatgtgggagatcaatcggtcaccgaatcaatttcaaccaccagcgaagcagaacaaggctccagctctagcatgatgattgcctcctcgaaagcgcaaagtgactttgggggagccggcggcgatcagacggttactgtttctgattcctccgttagtatcgcaacactcaccgcgatcacttcaaatttcggcgacgttggatcgaagacagtcactgatatttccgaaccaacgagcacacacaccacacctaccaccatcatcgaaacaaacatcctgacagatgcacaaggaacacctacggcaacgtcaataataacaaaaacaacagttttctcaaaaccggcatcagattttggtgaaacagaggagacgacagtgacattaggcatcacgacagtgacggacgctcaaggccttatagtagcgacttcaacattaacgcctagtgccttatcctcattgagccttaccacactgacggactcagcaggtaggccgacatcaacgtcgacctcgacaatcgttatcacgccatctctcataacggtaacggatagctcaggtcatcccacagccactctcgcaagctatccagacccgtcctcaggttcagattcgggcggtacgcatgtcgtggtatatcatatttcagatgggcagtacttctctggcatgtttttaccaacactcattgccagtcttctcgccatcgtcgtacgaatccttgacgcaaatgcgaagatattccagccttggcatgcgttgatgcacgagcgcggggcttttggccgcgagtcaatttgcctggagactggtgggctaaattcattcgtcatgagttttagatcactacttggcggacaagcagttgtttttctcacgagtactttactgctcttatccgcagtgctcgtcccgctctcgtctgaagctattggactcgatttaagaggtatggactgcaagaagggcggaagcacaggaagagtctgcgcgtttgttctcagtgcttccaaaccagctgcagatgcttctttagcaattattgcagtcatggtcgtcacagcggtattgttgattgtgttgttgggaagatggagattaggtgtatatgcaaatccttggagtatttgtaccctcgcatcactatctctgaaccaggagctccgagaccttatcgtcagtgctgctgtcgctgagccaaatgatcgacagagcaagagtatgatagaagaccgcaacttcaaattgggttatttccgccgcaatggagccacagagtatggaatcactgccatggacaatatgggccatgttcagtatcatggtccgcacggagattatcacgaagttggtgcaatcaacgatcagtcgctctacgaagctagaaaagcgagacggagtatgcccttcttcatcctgactttcgcaggtcgcctagttctcctaattcctattgccggagtccttggagtcgtgctgtattactcacaaagcggcggggacacggggttcgagaatttcattgacagtgataccttcggagtacgatttctgttcgcgagttttggtgttattattagcttcttttggtctacatttcacgatgcaatctcaataatgagcccctatcagctccttgcccggcgtccgcagcccgccacacgctccatccttctcgcaccacctacaaacgccttctcgggtgtactattcgcgttccgcactaggcgcatctaccttggcttagtgagcttcgcatcaattctctccgaattcctaggaatattccttagcaacgttccattccaagtgacgcaaacctttcttgtgtcacaaatcagcatctggacctccgtatcagtccttgctttgatgctattcttgggtctactatcctttttcatcaagtggcctcatatgccagtggacccaagtaccatcgctggcgcgatgtactacattgccgactcgcctgtacttcaaaatcttgaaggaatgagtgtgatggataagaaagaccgggatctggtaatagcagagcgcggtgatttatatgaatttggggaaattgagactccgactggcagcacgaggacaggtgtgaatgttatacatactaatggctttatgtcctaatgattttattggaagaatggaatattaaaataaaccgagatacccacagtccttagatacaataggagcttccactacggtagcaactgaaa

SEQ ID NO: 14667 - DNA, 1380 bp, Muscodor strobelii
  misc_feature: SGI cDNA ID NO. 564838
  misc_feature: Encodes the peptide sequence at SEQ ID NO 14668
atgaagaccctcgcactcttcgttctagcccttgccgaatcggcagctgcctactcgtggcctctcaccggcgcagttggcccgaccacgacgacagcctcgaaggcggccattaaggtatgcaacatcctgagctatggcggtgtcgcctcagcgtcgtcggacaacggagcagcgatcgcggccgcatgggcggcatgcaagtcgggcggcgaggtgtacatcccgccgggaagctatgggctcagtacgttcgtcactctgagcggcggcacccacatcagcattaacctcgagggcacgatctaccggaccgggagcacatcgagcggcaacatgatcgccatcacggacacgacggatttcgagttctacagcgccacttccaagggcgccattcaggggtacgggtatcagttcttgaagtcgaatacgtacggcccgcggatcctgcgcttgacgaaggtcaccagcttcagcgtccacgacatcatgcttgttgactcgcccgcgtttcattttaccattgacacgggcacgaacggcgaggtctataacatgattattcgcggtgcgagtcggggcggtctcgacggcgtggatgtctggggcaccaacatttggatccatgatgtcgaggtgacgaacaaggatgagtgcgtcacggtcaagagtccagcaagtaacatcctgatcgagtccatcttctgcaactggtccggcggttcggccattggttctctcggcgccggcacggcgatcagcagcatctactataaccacgtctactcgcagaactgcaaccagatgctcatgatcaagagtaatggcgggagcgggtatctccgagatgctacatttaacaacttcatgggtcacacgaacgcctacgttctcgacctcgactcagcctggtcaagccaatcagtcgcggccggcagcggcgtgcagtactcgaacctgacgttctcgaactggcatggcacgtcggccaacggtgccacaaggccgcctttgcgtctgatctgcccgccctccgtgccctgtacatcgctcaacgtcaactcgttttacatctggaccgaggggtcgagctacgagaagtacctgtgcgagaacgcctacggcactgggccctgcctggcttcgggatcgtctcatacgacgacgacgtacagcgcaacagtgacgaccatgactggttactcctacacgtcgatgcccggcgagctctcatccggtctcggactctccgtgtcgatcgcgataccgacagcgatccccacgtccttctaccccggcctcgcgccttacagcaagctgctcgccggcacgatgcaggcggccggtcccgttcagacggccgcgccgacattgtga

SEQ ID NO: 14668 - protein, 459 aa, Muscodor strobelii
  misc_feature: SGI Peptide ID NO. 564838
  misc_feature (67)..(381): Pfam Id: PF00295 Pfam Desc: Glycosyl hydrolases family 28
  misc_feature (148)..(237): Pfam Id: PF00295 Pfam Desc: Glycosyl hydrolases family 28
  misc_feature (1)..(441): NCBI GI: 156049045 Blast Desc: SS1G_08229 [Sclerotinia sclerotiorum 1980] gi|154692628|gb|EDN92366.1| SS1G_08229 [Sclerotinia sclerotiorum 1980]
  misc_feature (22)..(441): NCBI GI: 154317124 Blast Desc: BC1G_03464 [Botryotinia fuckeliana B05.10] gi|150844881|gb|EDN20074.1| BC1G_03464 [Botryotinia fuckeliana B05.10]
  misc_feature (5)..(441): NCBI GI: 2499718 Blast Desc: RHGA_ASPAC RecName: Full=Rhamnogalacturonase A; Short=RGase A; Short=RHG A; Flags: Precursor gi|1245746|gb|AAB35485.1| rhamnogalacturonase [Aspergillus
  misc_feature (6)..(441): NCBI GI: 558313 Blast Desc: rhamnogalacturonase A [Aspergillus aculeatus]
  misc_feature (22)..(441): NCBI GI: 157833703 Blast Desc: rhamnogalacturonase A [Aspergillus aculeatus]
  misc_feature (5)..(459): NCBI GI: 256723762 Blast Desc: NECHADRAFT_86762 [Nectria haematococca mpVI 77-13-4]
  misc_feature (6)..(443): NCBI GI: 159126678 Blast Desc: extracellular rhamnogalacturonase, [Aspergillus fumigatus A1163]
  misc_feature (6)..(443): NCBI GI: 70997709 Blast Desc: extracellular rhamnogalacturonase [Aspergillus fumigatus Af293] gi|66851227|gb|EAL91553.1| extracellular rhamnogalacturonase, [Aspergillus fumigatus Af293]
  misc_feature (6)..(443): NCBI GI: 119479213 Blast Desc: polygalacturonase (pectinase), [Neosartorya fischeri NRRL 181] gi|119407789|gb|EAW17738.1| polygalacturonase (pectinase), [Neosartorya fischeri NRRL 181]
  misc_feature (4)..(445): NCBI GI: 242804608 Blast Desc: extracellular rhamnogalacturonase, [Talaromyces stipitatus ATCC 10500] gi|218717754|gb|EED17175.1| extracellular rhamnogalacturonase, [Talaromyces stipitatus ATCC 10500]
  misc_feature (4)..(364): SWISSPROT Homolog: EC 3.2.1.15 Polygalacturonase
MKTLALFVLALAESAAAYSWPLTGAVGPTTTTASKAAIKVCNILSYGGVASASSDNGAAIAAAWAACKSGGEVYIPPGSYGLSTFVTLSGGTHISINLEGTIYRTGSTSSGNMIAITDTTDFEFYSATSKGAIQGYGYQFLKSNTYGPRILRLTKVTSFSVHDIMLVDSPAFHFTIDTGTNGEVYNMIIRGASRGGLDGVDVWGTNIWIHDVEVTNKDECVTVKSPASNILIESIFCNWSGGSAIGSLGAGTAISSIYYNHVYSQNCNQMLMIKSNGGSGYLRDATFNNFMGHTNAYVLDLDSAWSSQSVAAGSGVQYSNLTFSNWHGTSANGATRPPLRLICPPSVPCTSLNVNSFYIWTEGSSYEKYLCENAYGTGPCLASGSSHTTTTYSATVTTMTGYSYTSMPGELSSGLGLSVSIAIPTAIPTSFYPGLAPYSKLLAGTMQAAGPVQTAAPTL

SEQ ID NO: 14669 - DNA, 1680 bp, Muscodor strobelii
  misc_feature: SGI EST ID NO. CUFF.34895.1
  misc_feature: Variant of the nucleotide sequence at SEQ ID NO 14667
cctcagcgtcgtcggacaacggagcagcgatcgcggccgcatggggtaggtcgccggtttcgatttgactcttgcatatcgtcgtctcacttctcgcactcgccagactaaccagtcgaccagcggcatgcaagtcgggcggcgaggtgtacatcccgccgggaagctatgggctcagtacgttcgtcactctgagcggcggcacccacatcagcattaacctcgagggcacgatctaccggaccgggagcacatcgagcggcaacatgatcgccatcacggacacgacggatttcgagttctacagcgccacttccaagggcgccattcaggggtacgggtatcagttcttgaagtcgaatacgtacggcccgcggatcctgcgcttgacgaaggtcaccagcttcagcgtccacgacatcatgcttgttgactcgcccgcgtttcattttaccattgacacgggcacgaacggcgaggtctataacatgattattcgcggtgcgagtcggggcggtctcgacggcgtggatgtctggggcaccaacatttggatccatgatgtcgaggtgacgaacaaggatgagtgcgtcacggtcaagagtccagcaagtaacatcctgatcgagtccatcttctgcaactggtccggcggttcggccattggttctctcggcgccggcacggcgatcagcagcatctactataaccacgtctactcgcagaactgcaaccagatgctcatgatcaagagtaatggcgggagcgggtatctccgagatgctacatttaacaacttcatgggtcacacgaacgcctacgttctcgacctcgactcagcctggtcaagccaatcagtcgcggccggcagcggcgtgcagtactcgaacctgacgttctcgaactggcatggcacgtcggccaacggtgccacaaggccgcctttgcgtctgatctgcccgccctccgtgccctgtacatcgctcaacgtcaactcgttttacatctggaccgaggggtcgagctacgagaagtacctgtgcgagaacgcctacggcactgggccctgcctggcttcgggatcgtctcatacgacgacgacgtacagcgcaacagtgacgaccatgactggttactcctacacgtcgatgcccggcgagctctcatccggtctcggactctccgtgtcgatcgcgataccgacagcgatccccacgtccttctaccccggcctcgcgccttacagcaagctgctcgccggcacgatgcaggcggccggtcccgttcagacggccgcgccgacattgtgagctagtgtatttggcttttggaagacgcgctaaagtgaaggaaggtggcgggcggtggggtcgattgggagcaagacactgttttgtataaggggctcgagagtctgtcttcttgaggtggccatacaaatctacaaatcaatggaattaagcctgtgcctgactcgtgtgctgtgtatttactttcgagcagttacgccttgtcatttcactgggctgtcagaacttgagtagatcgcaattgcgtcttcggcttttgcctgagatttatacccgcttacgccggccactaccttagttagataggtgcggcgcatgtctcgaaatgtggaggtgcctgttcaagctgtcttaatccggtgctgcacag

SEQ ID NO: 14670 - DNA, 1791 bp, Muscodor strobelii
  misc_feature: SGI cDNA ID NO. 564839
  misc_feature: Reduced expression when VOC is produced
  misc_feature: Encodes the peptide sequence at SEQ ID NO 14671
atgtactatgactacccgtcgacctctgcgcgctcgccaggctccatgagacagggctatgctaccgtcaacctacattcgggcctgggtggcagtcgcctaggccagcgcccgctagagtctcaaggccagcatctgggaaaccatggcgcttacgggcatgacgaacggctcggaggcgcgtccggctacgacaccatctctcggttcgatcgcatggctcccaacacaatgcattcaaactacatgcaagagaacagtcagacttggggctacaacggcggtattgccactatgaatgggcccatgaacggtaatggccggctgggtgccagaggaggagtcaacaggcgtgccgccatccccgccagctggacggatcaagcgaacgtaggaatgccatccatgcctccaatgtacgatcccagtctttctatgaacggaaacgagcacgacatggcggctatggcttccgatgcgcgtggcatgatgaccacacccggctcttccgatgccgagcagctcatccccaccgccatcgtcatcaagaacatccagtttcagtgcaggaaagagatattgcagggcttgatggtttccatgaatctcccgcagccttatgccttcaactaccatttcgacaagggtgtgttcaggggtctcgctttcgccaacttctccactgccgaagacacggctatcgtgatccagaagatgaacggcttcgaagtgatggggcgcaagctgcgcgttgaatataagaaaatgctcccacaggacgaacgtgaccggatcgatcgagagaagcgagagaagcgaggccaacttgaggagcagcaccgtgcgcctcttccgatggcccagcagagtgctctccaggcgcttggtgtgagtgtgaaacagcaaccaagtggctcaccgctacgcgatgttgatctgaacgatcccgctactctcgaattctacacacaactcgcggtcttcaagaacgaccccacacgtgaagccttcattttcccaccagacattaccccggaccaacgtcgacagcttcatatcctagctcacaatatgggtctggagcatcgatctgtcggtgaagccagcaaccgacagatccaagtgctcaagagggcccagaactcgccgcccgtgcacaatccgaatcagctcccgaacaatgtttcatgggatgatcacaagcgcggccttagtcgctcagcaactttcgacctaacgaatcctcgtatcgatccaggcgcttatcgcacgcaacgtagacaaggtccgacattggagctcccaagtggcagccccgacaatggagcgaccaacaatctgcgcgccgcgaaaagctttgcggacctacgacagaacagtcctagccctgcaccttcggtctctagctacggccttgggaacggtctgggagctcgctacggagatttcgctcaggcatccctgacgacgcctccaaacttgaccccgactactgcgcaaaatgccgcttccagcacggatgctctattgtccaacatgagctcgctgagcctcggcttcgatccgaacggttcgcacatgcggagtagagagacaccaggagctatcggaagccaaaggcctggtgcgaacggaagcaataaccggaacgcccctattcgtgaacctcgtgttccggaatggggagagtcaggccaaggcttcagcgcacgcaaccggggccatatgcagcggagcagtgactcgtcagacggcggtcggaattcaggcacctcgcggtttcacggatag

SEQ ID NO: 14671 - protein, 596 aa, Muscodor strobelii
  misc_feature: SGI Peptide ID NO. 564839
  misc_feature (322)..(378): Pfam Id: PF01424 Pfam Desc: R3H domain
  misc_feature (338)..(378): Pfam Id: PF01424 Pfam Desc: R3H domain
  misc_feature (215)..(251): Pfam Id: PF00076 Pfam Desc: RNA recognition motif. (a.k.a. RRM, RBD, or RNP domain)
  misc_feature (2)..(595): NCBI GI: 46109494 Blast Desc: FG01629.1 [Gibberella zeae PH-1]
  misc_feature (2)..(595): NCBI GI: 256730506 Blast Desc: [Nectria haematococca mpVI 77-13-4]
  misc_feature (7)..(594): NCBI GI: 116200313 Blast Desc: CHGG_08312 [Chaetomium globosum CBS 148.51] gi|88179591|gb|EAQ87059.1| CHGG_08312 [Chaetomium globosum CBS 148.51]
  misc_feature (1)..(589): NCBI GI: 261357152 Blast Desc: conserved [Verticillium albo-atrum VaMs.102]
  misc_feature (5)..(594): NCBI GI: 85068315 Blast Desc: NCU05343 [Neurospora crassa OR74A] gi|28925011|gb|EAA34098.1| NCU05343 [Neurospora crassa OR74A]
  misc_feature (81)..(580): NCBI GI: 171683814 Blast Desc: protein product [Podospora anserina] gi|170941867|emb|CAP67520.1| protein product [Podospora anserina]
  misc_feature (139)..(583): NCBI GI: 28881338 Blast Desc: conserved [Neurospora crassa]
  misc_feature (1)..(594): NCBI GI: 156063878 Blast Desc: SS1G_02057 [Sclerotinia sclerotiorum 1980] gi|154697391|gb|EDN97129.1| SS1G_02057 [Sclerotinia sclerotiorum 1980]
  misc_feature (8)..(580): NCBI GI: 145603170 Blast Desc: MGG_06218 [Magnaporthe grisea 70-15] gi|145011462|gb|EDJ96118.1| MGG_06218 [Magnaporthe grisea 70-15]
  misc_feature (1)..(581): NCBI GI: 212541891 Blast Desc: R3H domain protein, [Penicillium marneffei ATCC 18224] gi|210066007|gb|EEA20100.1| R3H domain protein, [Penicillium marneffei ATCC 18224]
  misc_feature: Useful for introducing or modulating the production of volatile compounds
MYYDYPSTSARSPGSMRQGYATVNLHSGLGGSRLGQRPLESQGQHLGNHGAYGHDERLGGASGYDTISRFDRMAPNTMHSNYMQENSQTWGYNGGIATMNGPMNGNGRLGARGGVNRRAAIPASWTDQANVGMPSMPPMYDPSLSMNGNEHDMAAMASDARGMMTTPGSSDAEQLIPTAIVIKNIQFQCRKEILQGLMVSMNLPQPYAFNYHFDKGVFRGLAFANFSTAEDTAIVIQKMNGFEVMGRKLRVEYKKMLPQDERDRIDREKREKRGQLEEQHRAPLPMAQQSALQALGVSVKQQPSGSPLRDVDLNDPATLEFYTQLAVFKNDPTREAFIFPPDITPDQRRQLHILAHNMGLEHRSVGEASNRQIQVLKRAQNSPPVHNPNQLPNNVSWDDHKRGLSRSATFDLTNPRIDPGAYRTQRRQGPTLELPSGSPDNGATNNLRAAKSFADLRQNSPSPAPSVSSYGLGNGLGARYGDFAQASLTTPPNLTPTTAQNAASSTDALLSNMSSLSLGFDPNGSHMRSRETPGAIGSQRPGANGSNNRNAPIREPRVPEWGESGQGFSARNRGHMQRSSDSSDGGRNSGTSRFHG

SEQ ID NO: 14672 - DNA, 5618 bp, Muscodor strobelii
  misc_feature: SGI EST ID NO. CUFF.35573.1
  misc_feature: Variant of the nucleotide sequence at SEQ ID NO 14670
gtttcctaccctgaccgaccacttagctgtttcgaacgccacgaaggcaggaaccacggaagctggcagggcgcattgggttgcagcgatgggttttgatgtctacagcaacctcagcttgcatgagcgaagtcgccttattgccacaagttgtctacagtagccaagcgttacgcagtccgtcattacacttctgacactgtttaggatgcggagctcggattggctcctttccatccttaggtacatttaccagtcgactgcacttattacactcgggattgtctaggccggaaagagcactgcacgggcgaagaggagggcgagaagagagaaaaagcaaagcagcggggaaacatgaaataaacacacccacaacatgatatgacacacacatatataacagagtaccaaactcgtagattcacggtaggattgcacgtgtacgcgtgcttcaaaggctacgagtctgatagagttgagattaacgagaatttgcgctacggtcccaaccgcactggacgaaacccagggaccccttccattgcttccaagccaaccttttctagtcgaagaagcctgcgcatctgctgtctgttcaagcctgtcaagcccgtcacccgaaaccttcgcaagcggtcgccctaaataatttttttcaccttgtctcccctttgcgcggccctcttctgcatgtaaaataataccttctccacacctgcaagccgcctagtcctggtcaaatttcgtgggaacaaattctcgactgacagagcttgactgagtagactttgactcgacttgacttgaatgtctgtcgtctctgtctcgtctctgctgtctgtcaagatctcgtgaccccttctcgtagggaagctgttctattggtgaggagctgtcccgtcttcatctgataaatccgtgtttcccacgtcagccttcactctgccgtctggaatggaagcttgagcccccgtgcagccctctacgttactcgtatacgggcagctggtggctttgcgatccctgctgcatgcacacctcctcctgcgtctctcacccaagcaatctgaggcttgtgatccgcgaacggcgtgataccacacacctacgcacacccaagctcaggtcttttcctgcatctgaccgcccaaccaatcctgcctgaccttctccaggcctctccgccagccaaccaccgcctctcaccatccatcccaccaaccccatccacgctctgctttacctgatcgaccctgttgttgcatctcttttatttttccttctcgtcgctttcacgtttctgctgcgcgaccaccaccgtctcctacccaccgcgctcctctcgactccctcccgccctgagccgagggcgctttgtcttggatctgacgctaccgaccaagagcggcccccttgctgcactcctgttcgtcatcgtcgaggcacattcctcccgacgacgacgttctcgccatagctcttgatcccgggtcctttgcacgagggagctgcagtctgctggtgacccgcagcagctgtgttcgcccacgttgacgtggacgagctgaccatgaatcaacaacacgacatgtactatgactacccgtcgacctctgcgcgctcgccaggctccatgagacagggctatgctaccgtcaacctacattcgggcctgggtggcagtcgcctaggccagcgcccgctagagtctcaaggccagcatctgggaaaccatggcgcttacgggcatgacgaacggctcggaggcgcgtccggctacgacaccatctctcggttcgatcgcatggctcccaacacaatgcattcaaactacatgcaagagaacagtcagacttggggctacaacggcggtattgccactatgaatgggcccatgaacggtaatggccggctgggtgccagaggaggagtcaacaggcgtgccgccatccccgccagctggacggatcaagcgaacgtaggaatgccatccatgcctccaatgtacgatcccagtctttctatgaacggaaacgagcacgacatggcggctatggcttccgatgcgcgtggcatgatgaccacacccggctcttccgatgccgagcagctcatccccaccgccatcgtcatcaagaacatccagtttcagtgcaggaaagagatattgcagggcttgatggtttccatgaatctcccgcagccttatgccttcaactaccatttcgacaagggtgtgttcaggggtctcgctttcgccaacttctccactgccgaagacacggctatcgtgatccagaagatgaacggcttcgaagtgatggggcgcaagctgcgcgttgaatataagaaaatgctcccacaggacgaacgtgaccggatcgatcgagagaagcgagagaagcgaggccaacttgaggagcagcaccgtgcgcctcttccgatggcccagcagagtgctctccaggcgcttggtgtgagtgtgaaacagcaaccaagtggctcaccgctacgcgatgttgatctgaacgatcccgctactctcgaattctacacacaactcgcggtcttcaagaacgaccccacacgtgaagccttcattttcccaccagacattaccccggaccaacgtcgacagcttcatatcctagctcacaatatgggtctggagcatcgatctgtcggtgaagccagcaaccgacagatccaagtgctcaagagggcccagaactcgccgcccgtgcacaatccgaatcagctcccgaacaatgtttcatgggatgatcacaagcgcggccttagtcgctcagcaactttcgacctaacgaatcctcgtatcgatccaggcgcttatcgcacgcaacgtagacaaggtccgacattggagctcccaagtggcagccccgacaatggagcgaccaacaatctgcgcgccgcgaaaagctttgcggacctacgacagaacagtcctagccctgcaccttcggtctctagctacggccttgggaacggtctgggagctcgctacggagatttcgctcaggcatccctgacgacgcctccaaacttgaccccgactactgcgcaaaatgccgcttccagcacggatgctctattgtccaacatgagctcgctgagcctcggcttcgatccgaacggttcgcacatgcggagtagagagacaccaggagctatcggaagccaaaggcctggtgcgaacggaagcaataaccggaacgcccctattcgtgaacctcgtgttccggaatggggagagtcaggccaaggcttcagcgcacgcaaccggggccatatgcagcggagcagtgactcgtcagacggcggtcggaattcaggcacctcgcggtttcacggatagcatccccaagctgcaaggcgtctctgtagaccgtcgacccagcccaacccatcggttacaaggctcgagcctgcccctcgacaaacacgaacttgacgagaagacgatttatgatatagatttattgcccctaccgtggaacacaggccatcccccatacaactcttgcatccatcatgatttggcacgcgttccacggccgcatgccattgattgttatccgtcggtgttggcttgatatgattttgtaatatgatatatgatttaccttgtttatctacccgtggacttcgctttcctctactctttcaactgctctggtccggtacggaatcgtatccacatgatcaacgatgccatggatggaagacgatcgtattaattcagagaaagaaaacacggaatggaaccggcgatctccaacaatgaactacattaaacccatatgacgaccagcaaacgaccatctctggatacaatatacagcaattcatgggcgaccatttacggcatgacgattccgacccctataccctctgggatgttcatcggttctctgtcttttgacggaggagcctggcgaaagatcctatagacctcactgacgacggctacgcctttatgatgcacatgcacatggcagacggaacaccagttggccagagctacactgtactaccctactaatgactggctcttgcggaccagaacctggggtcgtttctcagtgtcgaccagctcggtgttcgatcattggacacgaagaacgaaacgacgaaattgatggaaatattatcatggttttatcttttatgcggtgcttttgtgccctgagtagtgaccagtgtgagtggactggcgatgaatttgcagaaggcggtgagacgagtagctttgtatattctcgaccgtgtcctctgctttcctacgttactgctcaggatgtactaccaactggaaatatggcctttcactatgagtttttaaggcttccatgggtacagctcccagcacgaaaatgggatgagagctggggataagtgccgagagctgcgcaggggcctgtggtaacaatacacacactcgctttgagggatgtgctacagaaatacaaaagtaccgattgatttacacattactaaattgtgcgaccagcttgtacttttattcatccggcaacacaatctcaaacttttcgcattacagttgggtttaaacgctgtgcatcttgttcctattgtgatacttgatcgatccggaaattactgattatgctacacttcgaataatgcagatgtctgagaaagtatagatcatatagttgttgacgcatagtctcattgtggggtattttatacatgactcttatatcattcattcgaggtaaagtcttatgtaattcacatacaggatagtagtacatcaaatcgttcaactctataacgcagcgatcctccattgtacttctgctccaccacaagacatcgtgccctcaacgccgtctgcttgtcctgtggcgatggcagagcttaggaactcggtgatgtctgtactgcctatgtagatctggtcgctagatggcgcgacgacgggctggacttggagcgtgcaggtcgtgcctggttgtgtggtgtttgaggtgaggaagttgttgtattggttctctatccagtctgcgaggaagtaatctcctggattttggaggaggtttttgtggagggcttcgcagcttgagaggagggttgttgtgtgttttgatttagactttgatcggaatttagatgcggtgtgtttagtggtagtagtggtagtagtgactatgttgaggtttgtgcagtaatttgaggatgaggcgttgtcgaaccaggaccagcatgctggtgggtttattggtgttgttgggaaggcgatgattgcgcatgagggtgtggatgtggtgtatgaccgtgttgatatggggttggttatgagaggttggctgagaaccgttgaggggatgatgagcgggaggagtttgtgggatcgcatggtgagttctgagaatgaggtagtgactgtgagatttgagtggtattatgatactcttgttgctgagtggtgagaattgacttgtcctattttttacttgagtgaaggcatcgtaacgagagaaacacacaatggaacaagcgccgatcctcagttatatagaattctgctgagcgcgcaactataccagctcttgctataatacttc

SEQ ID NO: 14673 - DNA, 2397 bp, Muscodor strobelii
  misc_feature: SGI cDNA ID NO. 564840
  misc_feature: Encodes the peptide sequence at SEQ ID NO 14674
atggatccgttgtcggcgctgtcagttgccgctggagttgttcagttcgtagactttgcatttcgtctcattaatggcagccgtgagataatgagttcggggtctggaatggcaaaagaggccaccactctggacgccattgcgagggatgcgacagccttgactgacgctttcgctggatcaccagcgctggccgccactaatagtactttgcaatcacttgtagtcgagtgcaaaacgatcgccgactccttgctagcaatactagataagctacgcgctaataaggagaagaaagggacttgtttcgttgctgcatggcgaacgatatggtcaaaagcaaagattgccgattttgtcgaccagcttggcaaagtgcaaggtcaaatctcaacccatatgcacttcatcctcctaaactatatgaacatgcaatatatccagattcattctctggcggagaatgctcaacgacttggaatggaggatagggatcgagctgtgaagctccatggtgatgttgtcataagacttgaacagctatcgaacgaaaatcgcaagacacaggatgcagttcgccacttgagagaaagcttggagggggatagctcaaggccagttgccagtgacgcgacccctttcggactttcgctcgacatgaccagctatttctctgaagcgatcaaacgcctcgcagaagagcaatctctgatgaccgcaaatcaagaatttttggagagtctgtattttagcaagatcttagcacgacagcggaagattgaatcggcacattcaaagaccttccagtggatttttcggtcctctgtgtccgacggatcgaaaacaatttctttccaccagtggctcatcgagggtgatggtgtcttctggatacagggaaaggctggttctggcaaatcgactctgatgaaattcatctgctctcatccgacgaccgtcgtgtcgcttcgggaatgggccgctggcaagcggcttatcacggccaagtttttcttctggaacgcaggcactatgctgcagaaatcaagggatggcctccttcggtctctactgttcgaaatcctgcgacaatgcccagaactcattcctcgggtctcccagagtaatcagaaagcccagttccggcgtcgtggctctttgtcccattcagatgaagaagaattatggggccaagaggaactgatgggagcataccgcagtctcgtagcctgttgtgacgatataaatgtcaagttttgctttttcattgatggcctagacgagtttgaggagaagagtaaaacgcacagcgacttgattgcgacgctccgccttttaggcgagtcgcagaatattaaattttgtgtatcaagccgcccttggacggtgttttcagatgcatttggcgaggactcggaaagattactgaaactcgaggatctaacacgagacgacattcgccgctatgttcatgaaaagttcaacgagaacagtcaattccaactcatgagcactgataatccacaatacgtcgcgcttattgatgacatcgctcatcaggcgcaaggtgtcttcttgtgggtatttctcgtagtacgggacctccttgagggcttctctcatagcgatacgatacgcaccttgagaaaacgcctcgagaggtttccagctgaactcgaggacttcttccagcacatgatcgactcaatcccccccatataccaacctcacatggcacgcacactatggatggcaacatctgtgtcacagccgcaattcctaatggtgtattcgctgctggatgatgcaacggataccttagatgcgttcggagaagaggagtcccagggagtcatgtatgaccacgaagtgcgcacgcgcgctcagcagatgcgcaggcgtctcgacggccgttgcaaaggtttgctagaggtcgtgttagacgagccagatgctggattgtacttcgagtataaagtcgactttttgcatcgtactgttcgcgacttcttgctcggatccccgaaaatccggcaaatactagagaaagagcgtttctcggatctgagtgacgtgtgcgacaatagcaacaatgtttggctgttaccttgcctgagtattctcgaggcattcaagcgcgcgcctttcaggatcggatcagagaacgcagcggtcgatgcggagcttgctgcaaggttattggacggtctgatgatgtttgccaaggaggcagaaaccaatatgaccgatcgcgccgcgttgaatcgcttgcttcgtgatgctgaaaatacagccggatcactcctgattggttcacccgaccctcagactcagtcagtagcacggcgaagttcgctcgggcggaaccaacacgatccctcctcagctatgctctag

SEQ ID NO: 14674 - protein, 798 aa, Muscodor strobelii
  misc_feature: SGI Peptide ID NO. 564840
  misc_feature (1)..(671): NCBI GI: 256725921 Blast Desc: NECHADRAFT_82115 [Nectria haematococca mpVI 77-13-4]
  misc_feature (2)..(671): NCBI GI: 255956529 Blast Desc: Pc21g20270 [Penicillium chrysogenum Wisconsin 54-1255] gi|211590728|emb|CAP96924.1| Pc21g20270 [Penicillium chrysogenum Wisconsin 54-1255]
  misc_feature (205)..(674): NCBI GI: 256728066 Blast Desc: NECHADRAFT_83494 [Nectria haematococca mpVI 77-13-4]
  misc_feature (231)..(693): NCBI GI: 46111055 Blast Desc: FG02409.1 [Gibberella zeae PH-1]
  misc_feature (1)..(671): NCBI GI: 261190024 Blast Desc: conserved [Ajellomyces dermatitidis SLH14081] gi|239591250|gb|EEQ73831.1| conserved [Ajellomyces dermatitidis SLH14081]
  misc_feature (1)..(671): NCBI GI: 225684243 Blast Desc: conserved [Paracoccidioides brasiliensis Pb03]
  misc_feature (1)..(671): NCBI GI: 226293863 Blast Desc: conserved [Paracoccidioides brasiliensis Pb18]
  misc_feature (1)..(689): NCBI GI: 256730922 Blast Desc: NECHADRAFT_84637 [Nectria haematococca mpVI 77-13-4]
  misc_feature (1)..(715): NCBI GI: 145252046 Blast Desc: An16g02230 [Aspergillus niger] gi|134083079|emb|CAL00447.1| protein product [Aspergillus niger]
  misc_feature (7)..(671): NCBI GI: 256730066 Blast Desc: NECHADRAFT_82694 [Nectria haematococca mpVI 77-13-4]
MDPLSALSVAAGVVQFVDFAFRLINGSREIMSSGSGMAKEATTLDAIARDATALTDAFAGSPALAATNSTLQSLVVECKTIADSLLAILDKLRANKEKKGTCFVAAWRTIWSKAKIADFVDQLGKVQGQISTHMHFILLNYMNMQYIQIHSLAENAQRLGMEDRDRAVKLHGDVVIRLEQLSNENRKTQDAVRHLRESLEGDSSRPVASDATPFGLSLDMTSYFSEAIKRLAEEQSLMTANQEFLESLYFSKILARQRKIESAHSKTFQWIFRSSVSDGSKTISFHQWLIEGDGVFWIQGKAGSGKSTLMKFICSHPTTVVSLREWAAGKRLITAKFFFWNAGTMLQKSRDGLLRSLLFEILRQCPELIPRVSQSNQKAQFRRRGSLSHSDEEELWGQEELMGAYRSLVACCDDINVKFCFFIDGLDEFEEKSKTHSDLIATLRLLGESQNIKFCVSSRPWTVFSDAFGEDSERLLKLEDLTRDDIRRYVHEKFNENSQFQLMSTDNPQYVALIDDIAHQAQGVFLWVFLVVRDLLEGFSHSDTIRTLRKRLERFPAELEDFFQHMIDSIPPIYQPHMARTLWMATSVSQPQFLMVYSLLDDATDTLDAFGEEESQGVMYDHEVRTRAQQMRRRLDGRCKGLLEVVLDEPDAGLYFEYKVDFLHRTVRDFLLGSPKIRQILEKERFSDLSDVCDNSNNVWLLPCLSILEAFKRAPFRIGSENAAVDAELAARLLDGLMMFAKEAETNMTDRAALNRLLRDAENTAGSLLIGSPDPQTQSVARRSSLGRNQHDPSSAML

SEQ ID NO: 14675 - DNA, 1618 bp, Muscodor strobelii
  misc_feature: SGI EST ID NO. CUFF.34943.0
  misc_feature: Variant of the nucleotide sequence at SEQ ID NO 14673
cccccacttccttcattcaccgcgaagttggtgacaatatccttcaaagagacatagctcgagcctcgatcgctttgtcattcatgcattccctcgtacttactgatgaagaccagaacttaactgcccggcgcaattggtcgtggaccgagtctcaacgattatggatccgttgtcggcgctgtcagttgccgctggagttgttcagttcgtagactttgcatttcgtctcattaatggcagccgtgagataatgagttcggggtctggaatggcaaaagaggccaccactctggacgccattgcgagggatgcgacagccttgactgacgctttcgctggatcaccagcgctggccgccactaatagtactttgcaatcacttgtagtcgagtgcaaaacgatcgccgactccttgctagcaatactagataagctacgcgctaataaggagaagaaagggacttgtttcgttgctgcatggcgaacgatatggtcaaaagcaaagattgccgattttgtcgaccagcttggcaaagtgcaaggtcaaatctcaacccatatgcacttcatcctcctaaactatatgaacatgcaatatatccagattcattctctggcggagaatgctcaacgacttggaatggaggatagggatcgagctgtgaagctccatggtgatgttgtcataagacttgaacagctatcgaacgaaaatcgcaagacacaggatgcagttcgccacttgagagaaagcttggagggggatagctcaaggccagttgccagtgacgcgacccctttcggactttcgctcgacatgaccagctatttctctgaagcgatcaaacgcctcgcagaagagcaatctctgatgaccgcaaatcaagaatttttggagagtctgtattttagcaagatcttagcacgacagcggaagattgaatcggcacattcaaagaccttccagtggatttttcggtcctctgtgtccgacggatcgaaaacaatttctttccaccagtggctcatcgagggtgatggtgtcttctggatacagggaaaggctggttctggcaaatcgactctgatgaaattcatctgctctcatccgacgaccgtcgtgtcgcttcgggaatgggccgctggcaagcggcttatcacggccaagtttttcttctggaacgcaggcactatgctgcagaaatcaagggatggcctccttcggtctctactgttcgaaatcctgcgacaatgcccagaactcattcctcgggtctcccagagtaatcagaaagcccagttccggcgtcgtggctctttgtcccattcagatgaagaagaattatggggccaagaggaactgatgggagcataccgcagtctcgtagcctgttgtgacgatataaatgtcaagttttgctttttcattgatggcctagacgagtttgaggagaagagtaaaacgcacagcgacttgattgcgacgctccgccttttaggcgagtcgcagaatattaaattttgtgtatcaagccgcccttggacggtgttttcagatgcatttggcgaggactcggaaagattactgaaactcgaggatctaacacgagacgac

SEQ ID NO: 14676 - DNA, 429 bp, Muscodor strobelii
  misc_feature: SGI cDNA ID NO. 564841
  misc_feature: Encodes the peptide sequence at SEQ ID NO 14677
atggccggcggcaaaggcaagtcctctggcggaaagagctccggcggcaagacggccgtcgatggtcccaagaagcagcagagccattctgctcgtgctggtcttcagttcccttgcggtcgtgtcaagcgtttcctcaaggccaacacccagaacaagatgcgtgtcggagccaaggctgccgtgtacgtgactgccgtcctcgaatacctgactgctgaggttctcgagctcgcaggcaatgctgccaaggatctcaaggtcaagcgtatcactccccgccatctccagctggccatccgtggtgacgaagagcttgatactctgatccgcgccaccatcgctttcggtggtgttttgcctcacatcaaccgtgccctactcctcaaggtcgagcagaagaagaagagcaaggcgatcgaggcttga

SEQ ID NO: 14677 - protein, 142 aa, Muscodor strobelii
  misc_feature: SGI Peptide ID NO. 564841
  misc_feature (29)..(103): Pfam Id: PF00125 Pfam Desc: Core histone H2A/H2B/H3/H4
  misc_feature (20)..(142): NCBI GI: 116200317 Blast Desc: CHGG_08314 [Chaetomium globosum CBS 148.51] gi|121927550|sp|Q2GUP0.1|H2AZ_CHAGB RecName: Full=Histone H2A.Z gi|88179593|gb|EAQ87061.1| CHGG_08314 [Chaetomium globosum CBS
  misc_feature (20)..(142): NCBI GI: 85068323 Blast Desc: NCU05347 [Neurospora crassa OR74A] gi|74663599|sp|Q873G4.1|H2AZ_NEUCR RecName: Full=Histone H2A.Z gi|28881341|emb|CAD70344.1| histone H2A F/Z family member HTZ1
  misc_feature (21)..(142): NCBI GI: 39975721 Blast Desc: histone H2A [Magnaporthe grisea 70-15] gi|156630810|sp|A4QVR2.1|H2AZ_MAGGR RecName: Full=Histone H2A.Z gi|145011468|gb|EDJ96124.1| histone H2A [Magnaporthe grisea
  misc_feature (18)..(141): NCBI GI: 256730717 Blast Desc: histone 2A variant [Nectria haematococca mpVI 77-13-4]
  misc_feature (21)..(142): NCBI GI: 154318838 Blast Desc: histone H2A variant [Botryotinia fuckeliana B05.10] gi|150857938|gb|EDN33130.1| histone H2A variant [Botryotinia fuckeliana B05.10]
  misc_feature (21)..(139): NCBI GI: 156063868 Blast Desc: histone H2A [Sclerotinia sclerotiorum 1980] gi|154697386|gb|EDN97124.1| histone H2A [Sclerotinia sclerotiorum 1980]
  misc_feature (24)..(141): NCBI GI: 46109490 Blast Desc: FG01627.1 [Gibberella zeae PH-1] gi|84029299|sp|Q4IMD1.1|H2AZ_GIBZE RecName: Full=Histone H2A.Z
  misc_feature (20)..(133): NCBI GI: 171683810 Blast Desc: protein product [Podospora anserina] gi|170941865|emb|CAP67518.1| protein product [Podospora anserina]
  misc_feature (24)..(142): NCBI GI: 119182784 Blast Desc: CIMG_06401 [Coccidioides immitis RS] gi|121931736|sp|Q1DTG2.1|H2AZ_COCIM RecName: Full=Histone H2A.Z gi|240109399|gb|EER27568.1| Histone H2A variant, [Coccidioides
  misc_feature (24)..(139): NCBI GI: 121719291 Blast Desc: histone H2A [Aspergillus clavatus NRRL 1] gi|156630807|sp|A1C5F1.1|H2AZ_ASPCL RecName: Full=Histone H2A.Z gi|119404543|gb|EAW14919.1| histone H2A [Aspergillus clavatus 1]
MAGGKGKSSGGKSSGGKTAVDGPKKQQSHSARAGLQFPCGRVKRFLKANTQNKMRVGAKAAVYVTAVLEYLTAEVLELAGNAAKDLKVKRITPRHLQLAIRGDEELDTLIRATIAFGGVLPHINRALLLKVEQKKKSKAIEA

SEQ ID NO: 14678 - DNA, 1949 bp, Muscodor strobelii
  misc_feature: SGI EST ID NO. CUFF.35231.1
  misc_feature: Variant of the nucleotide sequence at SEQ ID NO 14676
gcaacattctcaacagagccgcaaagagtatacagatgccgtcctatatactcagcacctcactctgcattcctagagtatcagattgaagctccagaaatgcatatcaagctcgatgttttgaagtatcacttcagaaggcaaaagaacattgtttagcccatggctaactcccttaaggtcagtcagctctctcctgaagccaacggtaggttgtgttcccaatgtcttatgaggccaaaggactcccaaaaggtgacctggaaaggtgaacaagtcccttttgcatgattttgtttgcttttgccggatttctgtcagtccttgcacagccatggacgccaggactgcttggcttgacgatgtcgtctctcctccccaaggcatcagactccctcagcaaccgatgtttccccgaccccgacccgacgcagcctagcgcactctggaggctgcggggtttgtgacacgacttcacaggtaggctgcgccaaacatggccaaacatgatggtgactcagatgcctgccacaggcacagagctgtcgagcactggggggaggaagtgcactgaagctaggcggttgtcagtctgtaggagccgcccgggacagctttgggtagctcctaggtgcctgcaggtgaaccgcccagaaccattgtgcaggtggtggtgttttgcgccgcctctcgattttggctgggaggacaagagctggctggggcacgtaatgattccatcgccccaaaacacaacaacaacaattttcaccgccacccgacacgcgcgcaaatataatcctcgacaccaacatcgatcccaaaacacaagattcccaccttttcgccaacgaccacaaccagcattttccctgatccatccatcaatcgagcatcgattttcatcgcccgaacctccgaactcaccttttacgcgtctactcgatccccgtctccgactttaccatggccggcggcaaaggcaagtcctctggcggaaagagctccggcggcaagacggccgtcgatggtcccaagaagcagcagagccattctgctcgtgctggtcttcagttcccttgcggtcgtgtcaagcgtttcctcaaggccaacacccagaacaagatgcgtgtcggagccaaggctgccgtgtacgtgactgccgtcctcgaatacctgactgctgaggttctcgagctcgcaggcaatgctgccaaggatctcaaggtcaagcgtatcactccccgccatctccagctggccatccgtggtgacgaagagcttgatactctgatccgcgccaccatcgctttcggtggtgttttgcctcacatcaaccgtgccctactcctcaaggtcgagcagaagaagaagagcaaggcgatcgaggcttgagtttcctagttaattcatcttgcgggtggagttccgaacacgatgtcatgttacaatggccactatccggatcacgtgccagaaatcccccaagtcgcaaatgtcagaaaactatgtaaaagggttttgtgggagcaattcatcgcggtctatttttaatgcacatgggttgtgcatatcgttgcggtttacctgtctttgcgggaaatgtgggcatgggagatacgcgtgagacctcgtgtggtgcgaatctggtcactgttggactagatcaaacctcaataacatgagaaggtcgacgaactgctacattgaaatgggaagaccgaggactattctccgattatgaagcagtatgtaatatacacacacattcacttcacagcttttaatggctgtcgcactgtaattgacgcttctgctgcccaccacctacattgcaaacaacatatacgtactgacctcgctgtctaacgcccacgtttcctgcttatggcgatactaagtcgatggaccagtgtatttcaccccgttgcgcctcctccatctcacgc

SEQ ID NO: 14679 - DNA, 951 bp, Muscodor strobelii
  misc_feature: SGI cDNA ID NO. 564842
  misc_feature: Reduced expression when VOC is produced
  misc_feature: Encodes the peptide sequence at SEQ ID NO 14680
atgccttcccgtataagtctgccgaaactctcacttttctctccgcggaacacaaccaccggtatctccaccctaacatcacctaccaagaaatcgcttattagccctccgctcacgcctcccgcgcgccttcacctgcgcaatatcctccccgcgagtcccgaagaacccttcatcatgccgccgcctccgagaacgccacaggcctggacgtggcagtgccaccactgtcgaacattctatcgtcttggctgcacgaggcgctgtctccagtgctcacacatgttctgcgtccgacaggcgaacaaaccgaatctaaaccctggcaagaagcgcaggcgcgacagggaaatgtgccagtctcaattcgactacgaagggtgggcacaatggggctcctggcgacggaaagtcactggtcaagcccgcgatgacgaagagagagacaagcttttcacgacgagacgtcataattgtatgagggattgtgattgtcccagtaattgtatcaatcgacgacatgatcttgcgatgttggagatgtttcatattgggtcgattcaggaggaggaggagaggcctgcgttgagtggagatgatgacttggctttgaatgtgcctattcctgttgtggagattggggacgaggatacggaggcgcctagtagtcctgggagtgagagtagtttttattgggatgagattgagccgaagaagaagaggcgggtggaggaggaggagaaggagaaggtttggtgggttgaggatgaggatgagagtgaggaaagtgagaggcctgttactcggttgactgtcagaaatttgactgagcaggatgttttgggggactctgagagtgagagtgagagtgatgatgactttagtgatgagtgggatacagacagtgaggatgaggataagagtcagagtggtggtgccacgtctgactga

SEQ ID NO: 14680 - protein, 316 aa, Muscodor strobelii
  misc_feature: SGI Peptide ID NO. 564842
  misc_feature (51)..(177): NCBI GI: 145616707 Blast Desc: MGG_06219 [Magnaporthe grisea 70-15] gi|145023232|gb|EDK06715.1| [Magnaporthe grisea 70-15]
  misc_feature (13)..(169): NCBI GI: 189191484 Blast Desc: conserved [Pyrenophora tritici-repentis Pt-1C-BFP] gi|187973687|gb|EDU41186.1| conserved [Pyrenophora tritici-repentis Pt-1C-BFP]
  misc_feature (60)..(187): NCBI GI: 171683812 Blast Desc: protein product [Podospora anserina] gi|170941866|emb|CAP67519.1| protein product [Podospora anserina]
  misc_feature (37)..(169): NCBI GI: 169600871 Blast Desc: SNOG_03288 [Phaeosphaeria nodorum SN15] gi|111068899|gb|EAT90019.1| SNOG_03288 [Phaeosphaeria nodorum SN15]
  misc_feature (60)..(181): NCBI GI: 226282693 Blast Desc: [Paracoccidioides brasiliensis Pb01]
  misc_feature (60)..(222): NCBI GI: 226292139 Blast Desc: [Paracoccidioides brasiliensis Pb18]
  misc_feature (63)..(192): NCBI GI: 261357151 Blast Desc: [Verticillium albo-atrum VaMs.102]
  misc_feature (70)..(192): NCBI GI: 238846156 Blast Desc: conserved [Microsporum canis CBS 113480]
  misc_feature (65)..(181): NCBI GI: 225681155 Blast Desc: [Paracoccidioides brasiliensis Pb03]
  misc_feature (60)..(138): NCBI GI: 225557491 Blast Desc: [Ajellomyces capsulatus G186AR]
  misc_feature: Useful for introducing or modulating the production of volatile compounds
MPSRISLPKLSLFSPRNTTTGISTLTSPTKKSLISPPLTPPARLHLRNILPASPEEPFIMPPPPRTPQAWTWQCHHCRTFYRLGCTRRCLQCSHMFCVRQANKPNLNPGKKRRRDREMCQSQFDYEGWAQWGSWRRKVTGQARDDEERDKLFTTRRHNCMRDCDCPSNCINRRHDLAMLEMFHIGSIQEEEERPALSGDDDLALNVPIPVVEIGDEDTEAPSSPGSESSFYWDEIEPKKKRRVEEEEKEKVWWVEDEDESEESERPVTRLTVRNLTEQDVLGDSESESESDDDFSDEWDTDSEDEDKSQSGGATSD

SEQ ID NO: 14681 - DNA, 453 bp, Muscodor strobelii
  misc_feature: SGI cDNA ID NO. 564843
  misc_feature: Reduced expression when VOC is produced
  misc_feature: Encodes the peptide sequence at SEQ ID NO 14682
atgtcattccagacccgtcttgcaacctcaaatgacctacatctcgtgcaagatatcgtccgagccgcgtactcgccttacgagagcgtgatcggtcaaaagcccggcccaatgctggacgactacgaatctctaataagcgacggtcgagtctccgtcgtcgaagcagaaggaattatccaaggcatcctcgtcctgataccagaggaaaagaccatgctacttgacaacgttgcggtctcaccttcagcccaaggatctggccttggccgaaaactcatccaatatgcagagatatgcgcgaaagacgccggataccaatcaataagactctatactcatgagcttatgacgaggaatatcgcatattattctcgtattggctacaaagagacacatcgcgctaaggagaagggactaaagcgggtatacatgacgaagactttggagtga

SEQ ID NO: 14682 - protein, 150 aa, Muscodor strobelii
  misc_feature: SGI Peptide ID NO. 564843
  misc_feature (52)..(130): Pfam Id: PF00583 Pfam Desc: Acetyltransferase (GNAT) family
  misc_feature (4)..(149): NCBI GI: 238507658 Blast Desc: cysteine desulfurylase, [Aspergillus flavus NRRL3357] gi|220688549|gb|EED44901.1| cysteine desulfurylase, [Aspergillus flavus NRRL3357]
  misc_feature (1)..(149): NCBI GI: 158422041 Blast Desc: GCN5-related N-acetyltransferase [Azorhizobium caulinodans ORS 571] gi|158328930|dbj|BAF86415.1| GCN5-related N-acetyltransferase [Azorhizobium caulinodans ORS 571]
  misc_feature (1)..(150): NCBI GI: 145230437 Blast Desc: An01g11140 [Aspergillus niger] gi|134055645|emb|CAK44019.1| protein product [Aspergillus niger]
  misc_feature (2)..(149): NCBI GI: 119385117 Blast Desc: GCN5-related N-acetyltransferase [Paracoccus denitrificans PD1222] gi|119374884|gb|ABL70477.1| GCN5-related N-acetyltransferase [Paracoccus denitrificans PD1222]
  misc_feature (1)..(150): NCBI GI: 70731376 Blast Desc: acetyltransferase [Pseudomonas fluorescens Pf-5] gi|68345675|gb|AAY93281.1| acetyltransferase, GNAT family [Pseudomonas fluorescens Pf-5]
  misc_feature (6)..(150): NCBI GI: 229589611 Blast Desc: acetyltransferase [Pseudomonas fluorescens SBW25] gi|229361477|emb|CAY48353.1| acetyltransferase [Pseudomonas fluorescens SBW25]
  misc_feature (12)..(149): NCBI GI: 260425985 Blast Desc: acetyltransferase, gnat family [Citreicella sp. SE45] gi|260420477|gb|EEX13728.1| acetyltransferase, gnat family [Citreicella sp. SE45]
  misc_feature (4)..(149): NCBI GI: 114766679 Blast Desc: acetyltransferase, GNAT family protein [Roseovarius sp. HTCC2601] gi|114541142|gb|EAU44196.1| acetyltransferase, GNAT family protein [Roseovarius sp. HTCC2601]
  misc_feature (1)..(150): NCBI GI: 89056484 Blast Desc: GCN5-related N-acetyltransferase [Jannaschia sp. CCS1] gi|88866033|gb|ABD56910.1| GCN5-related N-acetyltransferase [Jannaschia sp. CCS1]
  misc_feature (1)..(149): NCBI GI: 158425600 Blast Desc: GCN5-related N-acetyltransferase [Azorhizobium caulinodans ORS 571] gi|158332489|dbj|BAF89974.1| GCN5-related N-acetyltransferase [Azorhizobium caulinodans ORS 571]
  misc_feature: Useful for introducing or modulating the production of volatile compounds
MSFQTRLATSNDLHLVQDIVRAAYSPYESVIGQKPGPMLDDYESLISDGRVSVVEAEGIIQGILVLIPEEKTMLLDNVAVSPSAQGSGLGRKLIQYAEICAKDAGYQSIRLYTHELMTRNIAYYSRIGYKETHRAKEKGLKRVYMTKTLE

SEQ ID NO: 14683 - DNA, 3806 bp, Muscodor strobelii
  misc_feature: SGI EST ID NO. CUFF.34984.0
  misc_feature: Variant of the nucleotide sequence at SEQ ID NO 14681
aaaaagcatatcatgcactgtctcctgtacgtgatcctttcttctggctttctgcttgagtctgaaccgggcgtcagtgtcgaaacatgctattccgtggaaccatccctaatttaacgaccgcctcgccatctccgaaggcaactaactaccattcgtggaggaaaggcagcacccacgccactagtggatgctaacctatcattcgatacccacatgccctttttaggcatttatgaacctccgcgtccgcccttattggctaactagcactggagacgattgcctcattgtcatcgcgtggcccgactatccgcaggtctcttgtgtcttgataacgtggacaggttgataaatagtatttaacagcagctactcgcatgccaaggggtagacgctgtgttccatctacaatccgacgaactccggtattgcatttcatagtcactcaagatgcggtcactgattcttggcgccgccttcgctggcagtgctctcgcccagggttcagcatatgctcagtgtggaggagttggctggaccggggcgactacttgcgtctcgggctacacttgcacatatggcaatgagtattatagtcaatgtctgccaggttccgctgcgacgactacgagggcgacgactactacaggcgccggatcgacgccaactggcgcagccggagctctaaaattcttcggaatcaacctctcctcggcggagtttggacagggcacgtacccgggggttgacggcaaagatttcatttttgctgacaattcatcaatatcgaccctcatcgctgatggctacaacatcttccgggttgcgttttctatggagcgtcttgtgccaaaccagctaaccggggcagccaacgcagcctacttggccaacctcactggtactgtcaactatatcacgagcaaaggcgcatatgccatcgtagacccccacaactttgggcgctactatggcaatatcatcacaagcaccactgatttcgctgccttctggaagacgttggcaaccccgttcaagtccaactccaaagtcatcttcgataccaacaatgagtatcatgatatggaccagaccttggttctcaacttgaaccaagccgctatcaacgcaatccgtgccactggtgccacatcgcagtacatctttgcagagggcaacagttactccggtgcctggacttggaacactaccaacaccaatcttgcagggcttaccgattcgggcaacaagcttgtctatgagatgcatcagtacctggactctgacggctcgggaacgagcgatgtttgcgtttctgcaaatattggagtccagcgtgttgtgggcgcgacagcatggctacgcgcaaacaaaaagattggtatcatcggagaattcgcaggaggtgccaacacgcagtgcaagtcagccattactggattactcgaccatcttaaagccaacagtgacgtctggctaggcgctctatggtgggctgctggtccatggtggggtgactacatctacagctttgagccaccatctggcacggcgtacagctactatgagtcgactttggttcagtacacgccttagatcgtcggggacgctatttgattcttgtatatacattcttactcttgtacacaaatatgaggtagcacgttatcagcctctcagaatggacccggcgtagcgtatagcttgccaagacttgaaacaaaacaggctagacgacccctgactttgaaaaaattatgaaaatggtcgtcccgtttgatggttgcgcatttttggacttcgcccgtgtcaagcttcttgaagctggcgatatcgcattttgaacatgagtcattcagctacaccggttcaacggatatcgtatcgcaagaactccaccatgaacatttgactgacccacgcccaccacacttcatcctcattcgtgctttatactcatcgtctcctatctcagacatcccattataattcatgaatgagaacggcgagtagagcaaaatgtcattccagacccgtcttgcaacctcaaatgacctacatctcgtgcaagatatcgtccgagccgcgtactcgccttacgagagcgtgatcggtcaaaagcccggcccaatgctggacgactacgaatctctaataagcgacggtcgagtctccgtcgtcgaagcagaaggaattatccaaggcatcctcgtcctgataccagaggaaaagaccatgctacttgacaacgttgcggtctcaccttcagcccaaggatctggccttggccgaaaactcatccaatatgcagagatatgcgcgaaagacgccggataccaatcaataagactctatactcatgagcttatgacgaggaatatcgcatattattctcgtattggctacaaagagacacatcgcgctaaggagaagggactaaagcgggtatacatgacgaagactttggagtgacgaataagcagatacgacaagtcgacatagccaacattcatcaatttcatgaaagatacaattgctccatgatcattatatacagcgatccgataaacagtatatatacagcgcatcctaatacccatgaacccaggttctttactcaaagaactaaattctcagtcagacgtggcaccaccactctgactcttatcctcatcctcactgcctctcactttcctcactctcatcctcatcctcaacccaccaaaccttctccttctcctcctcctccacccgcctcttcttcttcggctcaatctcatcccaataaaaactactctcactcccaggactactaggcgcctccgtatcctcgtccccaatctccacaacaggaataggcacattcaaagccaagtcatcatctccactcaacgcaggcctctcctcctcctcctgaatcgacccaatatgaaacatctccaacatcgcaagatcatgtcgtcgattgatacaattactgggacaatcacaatccctcatacaattatgacgtctcgtcgtgaaaagcttgtctctctcttcgtcatcgcgggcttgaccagtgactttccgtcgccaggagccccattgtgcccacccttcgtagtcgaattgagactggcacatttccctgtcgcgcctgcgcttcttgccagggtttagattcggtttgttcgcctgtcggacgcagaacatgtgtgagcactggagacagcgcctcgtgcagccaagacgatagaatgttcgacagtggtggcactgccacgtccaggcctgtggcgttctcggaggcggcggcatgatgaagggttcttcgggactcgcggggaggatattgcgcaggtgaaggcgcgcgggaggcgtgagcggagggctaataagcgatttcttggtaggtgatgttagggtggagataccggtggttgtgttccgcggagagaaaagtgagagtttcggcagacttatacgggaaggcattgtgacggtatcgcagtctgaaacagtggtagtcgattccgtggctctgactctgaagttgcggtgaagagtatttcgttctagaagatagggaaacaaagaccgatctcaaaccggtgcgttttggtgagtaatatgacacgcgtgggtgtccgtttcgatgggattcaagaatcagaaggagagtctggttgtgccaatatgttattccggactcggtgactcggtgaaaaatcgtgggatgaggccaggttggcgctgcgtgtatcctgctgctacgtagaatgaaagtagtgtagacgcaggcgatgcgtgaatcaaaggag

SEQ ID NO: 14684 - DNA, 1146 bp, Muscodor strobelii
  misc_feature: SGI cDNA ID NO. 564844
  misc_feature: Reduced expression when VOC is produced
  misc_feature: Encodes the peptide sequence at SEQ ID NO 14685
atgcggtcactgattcttggcgccgccttcgctggcagtgctctcgcccagggttcagcatatgctcagtgtggaggagttggctggaccggggcgactacttgcgtctcgggctacacttgcacatatggcaatgagtattatagtcaatgtctgccaggttccgctgcgacgactacgagggcgacgactactacaggcgccggatcgacgccaactggcgcagccggagctctaaaattcttcggaatcaacctctcctcggcggagtttggacagggcacgtacccgggggttgacggcaaagatttcatttttgctgacaattcatcaatatcgaccctcatcgctgatggctacaacatcttccgggttgcgttttctatggagcgtcttgtgccaaaccagctaaccggggcagccaacgcagcctacttggccaacctcactggtactgtcaactatatcacgagcaaaggcgcatatgccatcgtagacccccacaactttgggcgctactatggcaatatcatcacaagcaccactgatttcgctgccttctggaagacgttggcaaccccgttcaagtccaactccaaagtcatcttcgataccaacaatgagtatcatgatatggaccagaccttggttctcaacttgaaccaagccgctatcaacgcaatccgtgccactggtgccacatcgcagtacatctttgcagagggcaacagttactccggtgcctggacttggaacactaccaacaccaatcttgcagggcttaccgattcgggcaacaagcttgtctatgagatgcatcagtacctggactctgacggctcgggaacgagcgatgtttgcgtttctgcaaatattggagtccagcgtgttgtgggcgcgacagcatggctacgcgcaaacaaaaagattggtatcatcggagaattcgcaggaggtgccaacacgcagtgcaagtcagccattactggattactcgaccatcttaaagccaacagtgacgtctggctaggcgctctatggtgggctgctggtccatggtggggtgactacatctacagctttgagccaccatctggcacggcgtacagctactatgagtcgactttggttcagtacacgccttag

SEQ ID NO: 14685 - protein, 381 aa, Muscodor strobelii
  misc_feature: SGI Peptide ID NO. 564844
  misc_feature (20)..(48): Pfam Id: PF00734 Pfam Desc: Fungal cellulose binding domain
  misc_feature (86)..(358): Pfam Id: PF00150 Pfam Desc: Cellulase (glycosyl hydrolase family 5)
  misc_feature (103)..(358): Pfam Id: PF00150 Pfam Desc: Cellulase (glycosyl hydrolase family 5)
  misc_feature (1)..(381): NCBI GI: 85111901 Blast Desc: endoglucanase 3 precursor [Neurospora crassa OR74A] gi|28925928|gb|EAA34923.1| endoglucanase 3 precursor [Neurospora crassa OR74A] gi|38636418|emb|CAE81955.1| cellulase precursor
  misc_feature (1)..(381): NCBI GI: 1304102 Blast Desc: cellulase [Humicola grisea var. thermoidea]
  misc_feature (1)..(381): NCBI GI: 116181120 Blast Desc: CHGG_01188 [Chaetomium globosum CBS 148.51] gi|88185485|gb|EAQ92953.1| CHGG_01188 [Chaetomium globosum CBS 148.51]
  misc_feature (1)..(381): NCBI GI: 13959390 Blast Desc: GUN3_HUMIN RecName: Full=Endoglucanase 3; AltName: Full=Endo-1,4-beta-glucanase 3; AltName: Full=Cellulase 3; Flags: Precursor gi|505195|emb|CAA53631.1| beta-1,4 endoglucanase;
  misc_feature (73)..(381): NCBI GI: 283837548 Blast Desc: endoglucanase [Pestalotiopsis sp. AN 7]
  misc_feature (23)..(379): NCBI GI: 171695776 Blast Desc: protein product [Podospora anserina] gi|170948130|emb|CAP60294.1| protein product [Podospora anserina]
  misc_feature (1)..(379): NCBI GI: 256721762 Blast Desc: NECHADRAFT_97581 [Nectria haematococca mpVI 77-13-4]
  misc_feature (1)..(379): NCBI GI: 46115906 Blast Desc: FG03795.1 [Gibberella zeae PH-1]
  misc_feature (3)..(381): NCBI GI: 212539271 Blast Desc: endoglucanase, [Penicillium marneffei ATCC 18224] gi|210069533|gb|EEA23624.1| endoglucanase, [Penicillium marneffei ATCC 18224]
  misc_feature (16)..(381): NCBI GI: 242760467 Blast Desc: endoglucanase, [Talaromyces stipitatus ATCC 10500] gi|218723193|gb|EED22610.1| endoglucanase, [Talaromyces stipitatus ATCC 10500]
  misc_feature (1)..(381): SWISSPROT Homolog: EC 3.2.1.4 Cellulase
  misc_feature: Useful for introducing or modulating the production of volatile compounds
MRSLILGAAFAGSALAQGSAYAQCGGVGWTGATTCVSGYTCTYGNEYYSQCLPGSAATTTRATTTTGAGSTPTGAAGALKFFGINLSSAEFGQGTYPGVDGKDFIFADNSSISTLIADGYNIFRVAFSMERLVPNQLTGAANAAYLANLTGTVNYITSKGAYAIVDPHNFGRYYGNIITSTTDFAAFWKTLATPFKSNSKVIFDTNNEYHDMDQTLVLNLNQAAINAIRATGATSQYIFAEGNSYSGAWTWNTTNTNLAGLTDSGNKLVYEMHQYLDSDGSGTSDVCVSANIGVQRVVGATAWLRANKKIGIIGEFAGGANTQCKSAITGLLDHLKANSDVWLGALWWAAGPWWGDYIYSFEPPSGTAYSYYESTLVQYTP

SEQ ID NO: 14686 - DNA, 3806 bp, Muscodor strobelii; identical to SEQ ID NO: 14683
  misc_feature: SGI EST ID NO. CUFF.34984.0
  misc_feature: Variant of the nucleotide sequence at SEQ ID NO 14684

SEQ ID NO: 14687 - DNA, 513 bp, Muscodor strobelii
  misc_feature: SGI cDNA ID NO. 564845
  misc_feature: Encodes the peptide sequence at SEQ ID NO 14688
atggaccagaccttggttctcaacttgaaccaagccgctatcaacgcaatccgtgccactggtgccacatcgcagtacatctttgcagagggcaacagttactccggtgcctggacttggaacactaccaacaccaatcttgcagggcttaccgattcgggcaacaagcttgtctatgagatgcatcagtacctggactctgacggctcgggaacgagcgatgtttgcgtttctgcaaatattggagtccagcgtgttgtgggcgcgacagcatggctacgcgcaaacaaaaagattggtatcatcggagaattcgcaggaggtgccaacacgcagtgcaagtcagccattactggattactcgaccatcttaaagccaacagtgacgtctggctaggcgctctatggtgggctgctggtccatggtggggtgactacatctacagctttgagccaccatctggcacggcgtacagctactatgagtcgactttggttcagtacacgccttag

SEQ ID NO: 14688 - protein, 170 aa, Muscodor strobelii
  misc_feature: SGI Peptide ID NO. 564845
  misc_feature (2)..(147): Pfam Id: PF00150 Pfam Desc: Cellulase (glycosyl hydrolase family 5)
  misc_feature (1)..(170): NCBI GI: 283837548 Blast Desc: endoglucanase [Pestalotiopsis sp. AN 7]
  misc_feature (1)..(170): NCBI GI: 85111901 Blast Desc: endoglucanase 3 precursor [Neurospora crassa OR74A] gi|28925928|gb|EAA34923.1| endoglucanase 3 precursor [Neurospora crassa OR74A] gi|38636418|emb|CAE81955.1| cellulase precursor
  misc_feature (2)..(170): NCBI GI: 170083838 Blast Desc: endo-1,4-beta-D-glucanase [Penicillium brasilianum]
  misc_feature (1)..(170): NCBI GI: 116181120 Blast Desc: CHGG_01188 [Chaetomium globosum CBS 148.51] gi|88185485|gb|EAQ92953.1| CHGG_01188 [Chaetomium globosum CBS 148.51]
  misc_feature (1)..(170): NCBI GI: 1304102 Blast Desc: cellulase [Humicola grisea var. thermoidea]
  misc_feature (1)..(170): NCBI GI: 13959390 Blast Desc: GUN3_HUMIN RecName: Full=Endoglucanase 3; AltName: Full=Endo-1,4-beta-glucanase 3; AltName: Full=Cellulase 3; Flags: Precursor gi|505195|emb|CAA53631.1| beta-1,4 endoglucanase;
  misc_feature (1)..(168): NCBI GI: 171695776 Blast Desc: protein product [Podospora anserina] gi|170948130|emb|CAP60294.1| protein product [Podospora anserina]
  misc_feature (2)..(170): NCBI GI: 3242653 Blast Desc: FII-CMCase [Aspergillus aculeatus]
  misc_feature (1)..(170): NCBI GI: 212539271 Blast Desc: endoglucanase, [Penicillium marneffei ATCC 18224] gi|210069533|gb|EEA23624.1| endoglucanase, [Penicillium marneffei ATCC 18224]
  misc_feature (1)..(168): NCBI GI: 46115906 Blast Desc: FG03795.1 [Gibberella zeae PH-1]
  misc_feature (1)..(170): SWISSPROT Homolog: EC 3.2.1.4 Cellulase
MDQTLVLNLNQAAINAIRATGATSQYIFAEGNSYSGAWTWNTTNTNLAGLTDSGNKLVYEMHQYLDSDGSGTSDVCVSANIGVQRVVGATAWLRANKKIGIIGEFAGGANTQCKSAITGLLDHLKANSDVWLGALWWAAGPWWGDYIYSFEPPSGTAYSYYESTLVQYTP

SEQ ID NO: 14689 - DNA, 3806 bp, Muscodor strobelii; identical to SEQ ID NO: 14683
  misc_feature: SGI EST ID NO. CUFF.34984.0
  misc_feature: Variant of the nucleotide sequence at SEQ ID NO 14687

SEQ ID NO: 14690 - DNA, 1164 bp, Muscodor strobelii
  misc_feature: SGI cDNA ID NO. 564846
  misc_feature: Encodes the peptide sequence at SEQ ID NO 14691
atgcagcttttaaacccagcttctgccctcaaggttatactgggacaaacaaagctcgttggacatcatgaggtgactatgatgtccgattcctgtacaatcatcggtctaacctgggcactcactggcttgtgcatactcgcccttgctgctcgactttacacacgatggaagaccttatcaaaatggtattcagaagattggatcatgttacttggactactattccagatagttttccaggtaacagtgacgcttaattggtggtgggggctgggcagacctcaagccgatttggtttactttcctcagatcgagaacgtcgtgaagtggaactggattggttcgataccaggtgtcgtggctgctgtcatctcgcgagttggggccggtctgacacttgtacggatcttcgagactaagaaatacttcaaacgctttgtctataccgctacgattgctgaaacaattgccggtatccttgttctaggagcaattctttcccagactagcccattcgaggccatttggaatcccagagttaagaagaaacatgtgatgggcagatacttcgtgaaatacaccgcctacttcttcttttccatagcacttcttatggatctcacgtttgttgtgtggccagtcaagattatctggaagctcaacatgccgcttcgtcgccgaattggcctctgcattttattggcaatgtctctcgtaacgcttgcggctggtctggccaaagtagtatactactcgcggggcattgagctgacgactactgatattgacattgacggccagtcagtcatttggacctcgatcgaatcctctttcgttataatcatggcttgtctgcctataatacctggatttttgaagataatcatgcctcaattgaaggtttggggttcagagctcaaggaatcttttagctcaggccgcgagtacacacttcgcaaattgcctacaaacttctcgaagagttttgccggtagggagcccgatatagagaaacaagctgaggagacctacgcacgtctgagcgttgactcattgttgatggtcgacgagcccccgcaagttcacaaacagaatattagccttcaatatggcaatcatagcatctggagaacagaccgctttagtgttacttataattaa

SEQ ID NO: 14691 - protein, 387 aa, Muscodor strobelii
  misc_feature: SGI Peptide ID NO. 564846
  misc_feature (35)..(387): NCBI GI: 116206026 Blast Desc: CHGG_02306 [Chaetomium globosum CBS 148.51] gi|88182903|gb|EAQ90371.1| CHGG_02306 [Chaetomium globosum CBS 148.51]
  misc_feature (34)..(299): NCBI GI: 238841489 Blast Desc: conserved [Microsporum canis CBS 113480]
  misc_feature (35)..(328): NCBI GI: 171677648 Blast Desc: protein product [Podospora anserina] gi|170936892|emb|CAP61551.1| protein product [Podospora anserina]
  misc_feature (32)..(386): NCBI GI: 242783189 Blast Desc: conserved [Talaromyces stipitatus ATCC 10500] gi|218720293|gb|EED19712.1| conserved [Talaromyces stipitatus ATCC 10500]
  misc_feature (34)..(301): NCBI GI: 116191141 Blast Desc: CHGG_05288 [Chaetomium globosum CBS 148.51] gi|88181201|gb|EAQ88669.1| CHGG_05288 [Chaetomium globosum CBS 148.51]
  misc_feature (34)..(336): NCBI GI: 255943321 Blast Desc: Pc18g06020 [Penicillium chrysogenum Wisconsin 54-1255] gi|211587162|emb|CAP94826.1| Pc18g06020 [Penicillium chrysogenum Wisconsin 54-1255]
  misc_feature (36)..(328): NCBI GI: 212538323 Blast Desc: integral membrane protein [Penicillium marneffei ATCC 18224] gi|210069059|gb|EEA23150.1| integral membrane protein [Penicillium marneffei ATCC 18224]
  misc_feature (34)..(317): NCBI GI: 119175352 Blast Desc: CIMG_09540 [Coccidioides immitis RS]
  misc_feature (37)..(323): NCBI GI: 238844609 Blast Desc: integral membrane protein [Microsporum canis CBS 113480]
  misc_feature (34)..(317): NCBI GI: 240107097 Blast Desc: CPC735_018880 [Coccidioides posadasii C735 delta SOWgp]
MQLLNPASALKVILGQTKLVGHHEVTMMSDSCTIIGLTWALTGLCILALAARLYTRWKTLSKWYSEDWIMLLGLLFQIVFQVTVTLNWWWGLGRPQADLVYFPQIENVVKWNWIGSIPGVVAAVISRVGAGLTLVRIFETKKYFKRFVYTATIAETIAGILVLGAILSQTSPFEAIWNPRVKKKHVMGRYFVKYTAYFFFSIALLMDLTFVVWPVKIIWKLNMPLRRRIGLCILLAMSLVTLAAGLAKVVYYSRGIELTTTDIDIDGQSVIWTSIESSFVIIMACLPIIPGFLKIIMPQLKVWGSELKESFSSGREYTLRKLPTNFSKSFAGREPDIEKQAEETYARLSVDSLLMVDEPPQVHKQNISLQYGNHSIWRTDRFSVTYN

SEQ ID NO: 14692 - DNA, 3747 bp, Muscodor strobelii
  misc_feature: SGI EST ID NO. CUFF.34968.0
  misc_feature: Variant of the nucleotide sequence at SEQ ID NO 14690
tggcatactgtatctcaactcttttgccatgagttgtccgaaacgctggagacgtcgcactatatgggtgatagggctgtaagacggacattgaagacgcagggtaatatggtcgtgcttgataggtctcacattaacggccgggtcgaagttttacagatgaagataaatgaataatgaggagtgaaatctcttatggctgggacacatcgagaaaagaaatcgttattgaaaggaaccatttcgggaggggaccgggagaatttctaactacgatcaatatagaagattactggatacacctcacagaaaacagcggcttttgcttcaacgagtagaatttacgccatgactgtaagcttatgcaataatcaagtaataggtctagtatgaatgaagaaaacaaattaccttggctaccgtccacgccattccattccttcccgctgagaagctttagaaaacattgccccttcagctaagaaatcctgaaaatgtccctaaatacgctgttatagcacaatatagaaaagtaaatactcttagatgtattcgaaaactgtcgtaaatggccaaatacgcaatgatgaactcctcacaggtgtggggtcgtcgaaactatcatgatgttctggagattcttaattgaataaggtaggagctaattggcgtgggaaccttgaattaggagataaataccgaatgactaagaggagaagataaagaaaggaagaagaaggaaaagaagcgagatgggaggattaactttgtgttctgaggctgtcaccacgtggtctgcatgatcacgccttcgtcctgcttctgattgagcatccagagcggcatcgtccacttttttcggcccgtgtggcattgtggccttttgtatgttgcaccagtggcccaaacaagattttcagggtttcgcgcaaggtacacaaatcattttgtgaacgttttcgtttgaatcgcgttcagaacccatcagcttactgatcgatacagctgacatatggtaggttgctatcttcggaacgatcgtcagtcagcgcatgtaccattgaggcacggcatacacatggcagggcaaggaatataacgaactgcctccatcgcgcatcggtgagtggaacaggcaccaatcaaccttatccggagctgatctaggagttaccgcttgcattagatctggagttcagatggaagatggtatcaagcattgatcgtttgcttgcttaatcttgccaagaggatgtcatcggcgggccccaacaaagtggggataccactatttgagtacatcgaaacaccgagacattgctattcgcgagagagcgtagcaatacatcctggacaatcaataccgaaatggcaatgtgttcaaggtgatagcaatatctagattggctgcattcgatcgtcaaaggggcatgttcatctgaagctgaaggttttcaagcgacaggtactacggtgacacagccaacatggactcctgccgagctccagggctgatattacttggcgtactattaccatgccgcaagcatagatgatcctgggctgttgcgtgcaaatgcggctattcaactgggttcgaattcctccagcgccactgttactacttgtcttacgactcagtgaccatccacatttccgaaacctcattacatacccatttagcaggatgcaaatgagctagggcaacagataatgcagcttttaaacccagcttctgccctcaaggttatactgggacaaacaaagctcgttggacatcatgaggtacggttcttacgccaagtcggggatcaagggcttgggaccttaatggcaagacacacgtcagtggacaacacttcacccgaccaatgctcgatcaagcgcaaagcctaatgttttcatttaggtgactatgatgtccgattcctgtacaatcatcggtctaacctgggcactcactggcttgtgcatactcgcccttgctgctcgactttacacacgatggaagaccttatcaaaatggtattcagaagattggatcatgttacttggactactattccagatagttttccaggtaacagtgacgcttaattggtggtgggggctgggcagacctcaagccgatttggtttactttcctcagatcgagaacgtcgtgaagtggaactggattggttcgataccaggtgtcgtggctgctgtcatctcgcgagttggggccggtctgacacttgtacggatcttcgagactaagaaatacttcaaacgctttgtctataccgctacgattgctgaaacaattgccggtatccttgttctaggagcaattctttcccagactagcccattcgaggccatttggaatcccagagttaagaagaaacatgtgatgggcagatacttcgtgaaatacaccgcctacttcttcttttccatagcacttcttatggatctcacgtttgttgtgtggccagtcaagattatctggaagctcaacatgccgcttcgtcgccgaattggcctctgcattttattggcaatgtctctcgtaacgcttgcggctggtctggccaaagtagtatactactcgcggggcattgagctgacgactactgatattgacattgacggccagtcagtcatttggacctcgatcgaatcctctttcgttataatcatggcttgtctgcctataatacctggatttttgaagataatcatgcctcaattgaaggtttggggttcagagctcaaggaatcttttagctcaggccgcgagtacacacttcgcaaattgcctacaaacttctcgaagagttttgccggtagggagcccgatatagagaaacaagctgaggagacctacgcacgtctgagcgttgactcattgttgatggtcgacgagcccccgcaagttcacaaacagaatattagccttcaatatggcaatcatagcatctggagaacagaccgctttagtgttacttataattaaaatactgaatgatagcaggcattcaactcatcacacctggtcaataactgcagcagcagtcgagagctcagatgataagtcataacaggggctcaatttggacgcttatatccctatcgagaacgaagcaagatcacctggggattcgacaaccaccgattcggcaatcaccgtattagctcttgcggatctacttatgccgaaattgtcacagtgagagagtgctgagagacctatgtcgagtgccgaccaataccatattatccggaaccttgctgataggtcaatacagagacctctttcttccactaccaaccggatctcgtagcgattaaagatggttgtattgatctgtgataattatcgagtcaagtcaggtggtgcttgggtctcgcattttataaaggcattcgaccgtggcaccgtgcacttccatatattcttcccgatagcctggtcgccataaacccttcgagttccttttcacttaacaacgaaattgagtaaagcaaagatgtgggtcgtcacgaatcttctgcttttggctgcaatagcccaagctcattacactttcccaagattggttgtggatggaaaatccgaagctgcagattggtctgtgactaggaagacgaagaatgtcgacagcaaaacaggagttctgagcccgacgagcgcagatattcgatgctatcagatgcaaaccgctggcgatgtcaccgaagtccctgctggcgccactatcc

SEQ ID NO: 14693 - DNA, 1602 bp, Muscodor strobelii
  misc_feature: SGI cDNA ID NO. 564847
  misc_feature: Encodes the peptide sequence at SEQ ID NO 14694
atggcgaaccagaatcccccgccgggtgctaataatccgcagcaacggttgccccgcgatggtatttcacatggacctcttgtccgagaagatggcactttgagccagttgtcagacataattcatacgatgagcaatcgggatgcagcatctcgctataagaccgagaaggcagataatggagtaggaataagcagcggatcggcgtccgtctcgagccacgacgcaaacaataggatgattctatcatgggatatgaatgattcagaaaatccgtacaactggtcgagtagacgcaaggccttgatcttgataacgacaatgttgatcgtcatcaatagtacaatgggcaccacattgccgagtatggcggtactgggaccaatcttatggggtccgctatctgagcatatcgggcgccgaaacttgaccgttgtgacatttattgcattcaccgcgtggaccttaggctgcgctctggcgcccagctggtcagccttcctggtctttcggctgctctgtggtgcatttgccagctcacccattgccgtagtcaccggcatcattgctgatatctatgacgatccggctcagcgcggagccgcattgtcgtacttcatggcgatgacaataggtggcccgttgctggccccaatcatcagtggcttctgctcaacaacgctaggctggcgttggacattttgggtcgcccttatttacgccggggtcactctgattggcgctgtgctgttgccagaaacatacgggcctgttttattatcccgacgtgctcagaagattcgtaaggcagactccacgtctcaagtatacgctgcctttgaactcgaggataaagatctcaaacaagttgtgactcgagtcttgacacggccgattcatgcaatattctatatttcatttactactttccctattatcttccaagacctttatggcttgtcgcctggtgtcactggccttctctttttgcctattggtctcggctctcttatagctcttgcaatattctttgcttgggataattatcttcgtaaagctattgcggaaggtcgcccttggacaaagaaagaagaacatcttagaattcctctagcaacactaggtggcccagtattcgtcgcatcattgttctggttaggcttctctgctaaactgagtgttcattttatcgtcccatccttatcaggcattggcttcggaattggtttcatgctcgtatttattggaatgctgaattatctcaccgatgcctacgaaatatacgctgcatctgcgaatgccgccgcaagctcagcccgatcacttcttgccgttatattaccgctcgccagtacgccattgtttggccggctcggcattgctggtgcctgcagtctgcttgctggtcttagccttcttctcagtgtaattcccttcatattcatctggaagggtgaacgaatccgtgcaggatcgagcttctgcattgcgctcaaagaaagaaagcgggagatgcgactgaaagccgaggaggaaagcagccgaaatggacccgacaaaaccggcgtagttctggaaggtaaggaaaaggagacggtctaa

SEQ ID NO: 14694 - protein, 533 aa, Muscodor strobelii
  misc_feature: SGI Peptide ID NO. 564847
  misc_feature (102)..(448): Pfam Id: PF07690 Pfam Desc: Major Facilitator Superfamily
  misc_feature (124)..(448): Pfam Id: PF07690 Pfam Desc: Major Facilitator Superfamily
  misc_feature (11)..(533): NCBI GI: 46138617 Blast Desc: FG10823.1 [Gibberella zeae PH-1]
  misc_feature (68)..(528): NCBI GI: 171690104 Blast Desc: protein product [Podospora anserina] gi|170945007|emb|CAP71118.1| protein product [Podospora anserina]
  misc_feature (35)..(526): NCBI GI: 156043906 Blast Desc: SS1G_10056 [Sclerotinia sclerotiorum 1980] gi|154694445|gb|EDN94183.1| SS1G_10056 [Sclerotinia sclerotiorum 1980]
  misc_feature (35)..(523): NCBI GI: 154296818 Blast Desc: BC1G_12498 [Botryotinia fuckeliana B05.10] gi|150843152|gb|EDN18345.1| BC1G_12498 [Botryotinia fuckeliana B05.10]
  misc_feature (75)..(498): NCBI GI: 18376374 Blast Desc: related to fluconazole resistance protein (FLU1) [Neurospora crassa]
  misc_feature (78)..(531): NCBI GI: 261200975 Blast Desc: MFS multidrug transporter [Ajellomyces dermatitidis SLH14081] gi|239593960|gb|EEQ76541.1| MFS multidrug transporter [Ajellomyces dermatitidis SLH14081]
  misc_feature (42)..(521): NCBI GI: 255930313 Blast Desc: Pc06g01070 [Penicillium chrysogenum Wisconsin 54-1255] gi|211581329|emb|CAP79100.1| Pc06g01070 [Penicillium chrysogenum Wisconsin 54-1255]
  misc_feature (59)..(514): NCBI GI: 238844080 Blast Desc: polyamine transporter 3 [Microsporum canis CBS 113480]
  misc_feature (78)..(531): NCBI GI: 239607163 Blast Desc: MFS multidrug transporter [Ajellomyces dermatitidis ER-3]
  misc_feature (78)..(533): NCBI GI: 242773224 Blast Desc: bicyclomycin resistance protein, [Talaromyces stipitatus ATCC 10500] gi|218721816|gb|EED21234.1| bicyclomycin resistance protein, [Talaromyces stipitatus ATCC 10500]
MANQNPPPGANNPQQRLPRDGISHGPLVREDGTLSQLSDIIHTMSNRDAASRYKTEKADNGVGISSGSASVSSHDANNRMILSWDMNDSENPYNWSSRRKALILITTMLIVINSTMGTTLPSMAVLGPILWGPLSEHIGRRNLTVVTFIAFTAWTLGCALAPSWSAFLVFRLLCGAFASSPIAVVTGIIADIYDDPAQRGAALSYFMAMTIGGPLLAPIISGFCSTTLGWRWTFWVALIYAGVTLIGAVLLPETYGPVLLSRRAQKIRKADSTSQVYAAFELEDKDLKQVVTRVLTRPIHAIFYISFTTFPIIFQDLYGLSPGVTGLLFLPIGLGSLIALAIFFAWDNYLRKAIAEGRPWTKKEEHLRIPLATLGGPVFVASLFWLGFSAKLSVHFIVPSLSGIGFGIGFMLVFIGMLNYLTDAYEIYAASANAAASSARSLLAVILPLASTPLFGRLGIAGACSLLAGLSLLLSVIPFIFIWKGERIRAGSSFCIALKERKREMRLKAEEESSRNGPDKTGVVLEGKEKETV

SEQ ID NO: 14695 - DNA, 1349 bp, Muscodor strobelii
  misc_feature: SGI EST ID NO. CUFF.34980.0
  misc_feature: Variant of the nucleotide sequence at SEQ ID NO 14693
taccagatgcaatattctatatttcatttactactttccctattatcttccaagacctttatggcttgtcgcctggtgtcactggccttctctttttgcctattggtctcggctctcttatagctcttgcaatattctttgcttgggataattatcttcgtaaagctattgcggaaggtcgcccttggacaaagaaagaagaacatcttagaattcctctagcaacactaggtggcccagtattcgtcgcatcattgttctggttaggcttctctgctaaactgagtgttcattttatcgtcccatccttatcaggcattggcttcggaattggtttcatgctcgtatttattggaatgctgaattatctcaccgatgcctacgaaatatacgctgcatctgcgaatgccgccgcaagctcagcccgatcacttcttgccgttatattaccgctcgccagtacgccattgtttggccggctcggcattgctggtgcctgcagtctgcttgctggtcttagccttcttctcagtgtaattcccttcatattcatctggaagggtgaacgaatccgtgcaggatcgagcttctgcattgcgctcaaagaaagaaagcgggagatgcgactgaaagccgaggaggaaagcagccgaaatggacccgacaaaaccggcgtagttctggaaggtaaggaaaaggagacggtctaaatggatgtcacataacattatgattcatggccataggctcttgttttctagctattgtagagagttgcaaaacgatatcgagaattttttgatatttgacatgtgtacaataatactccgggtgaacgagattccacattaaataccctactcttaatccttaccctaacctgtttgactttgtacactcttcaacgagaagaattataagctaaggagatccaactgcgtttgcttcgacccttcccggttgatctatcatacagccgtattaattagatcccagaatctacttgcagctggataatatcagcatagagcggagataccgcccaattgtcgcagactctttgagtttcgttcagatcgccgttgaaatcgggcatgttctttggctggaccaaaatttggagtgcaagacccgaggaggcgtgccacgcaatgtgacaatgcaacaaccaggcgccagggttgtcgggacggaatgccatagcaagaaacccgccgtgttgcacaaatgctgtgtcgcgacgtggcggattatcaaaattgaataaacttgggcttgtcgtcgcattgaaaggctggtcactctgcgcgagtattacgaagtcactcccatgtaggtggatggggtgt

SEQ ID NO: 14696 - DNA, 1494 bp, Muscodor strobelii
  misc_feature: SGI cDNA ID NO. 564848
  misc_feature: Encodes the peptide sequence at SEQ ID NO 14697
atgaatggcacctatcccggacctcttatcgaggcatgttggggcgaccaacttgtggtccatgtgcgcaaccgcgatccggacaacggaaccacgatccactggcacggtatcagacaattgggctctaatgagatggacggtgtcaatggtattacgcaatgtcctatcacgcctggagacgaattcacgtacaattttaccctgacccagtacgggcacacatggtatcatagtcattattcgcttcaatacccggatggcgtcgctgcaccactggtcatttacggaccctctagcgataactggaacattgaccttggccatgtcctgattgctgactgggttcataatacagcgtatctggcttatgagagcgagatgcgcggaccaccacctacatccgatagcatcgtggtcaatggccatggccattacaacggcacacaggataagggctcttattacgagaccgtggtgacgccaggtaaaaagcatgtgttaaaattgatcaatgggggcataggcactagttttgtattctcaatcgacggacatagcttgactgtgatcgccaacgacctagtgcctgttgccccgttcactgttgactcgttggtcattggcattggacaacgatacaccgtcatagtggaagctaaccaggctgtctcgggctattggataaggacggttcccgcctccggctgctctgggtttcccacaccacctgataacagaacaggcatactgagatacgacggttctagcactacgcttccgacgacgcagacgcaggtcggcataaattacacttgtgctgaccttaacacgactctgctaaatcctatcgtcccttgggttgtggacatgcatccccagaacaatgtgaccgaagatacgtttcacgtggagcttcagaatgaaactgatacggctctgggacctccaaatttcccttacaagcattggtttcttggaagtcagccaatgtggcttgattttggcaaaccgacaattctaaacattgaatcttccattttgaatcctaactatacggttgtgcaagaggactttacggatggatatatctatctgatcgtcgacgccagccgtaatgtgcaagtaacacaccccatccacctacatgggagtgacttcgtaatactcgcgcagagtgaccagcctttcaatgcgacgacaagcccaagtttattcaattttgataatccgccacgtcgcgacacagcatttgtgcaacacggcgggtttcttgctatggcattccgtcccgacaaccctggcgcctggttgttgcattgtcacattgcgtggcacgcctcctcgggtcttgcactccaaattttggtccagccaaagaacatgcccgatttcaacggcgatctgaacgaaactcaaagagtctgcgacaattgggcggtatctccgctctatgctgatattatccagctgcaagtagattctgggatctaa

SEQ ID NO: 14697 - protein, 497 aa, Muscodor strobelii
  misc_feature: SGI Peptide ID NO. 564848
  misc_feature (106)..(256): Pfam Id: PF00394 Pfam Desc: Multicopper oxidase
  misc_feature (332)..(461): Pfam Id: PF07731 Pfam Desc: Multicopper oxidase
  misc_feature (1)..(100): Pfam Id: PF07732 Pfam Desc: Multicopper oxidase
  misc_feature (2)..(100): Pfam Id: PF07732 Pfam Desc: Multicopper oxidase
  misc_feature (1)..(497): NCBI GI: 116204283 Blast Desc: CHGG_10025 [Chaetomium globosum CBS 148.51] gi|88176153|gb|EAQ83621.1| CHGG_10025 [Chaetomium globosum CBS 148.51]
  misc_feature (1)..(497): NCBI GI: 171685436 Blast Desc: protein product [Podospora anserina] gi|170942679|emb|CAP68331.1| protein product [Podospora anserina]
  misc_feature (1)..(479): NCBI GI: 46139825 Blast Desc: FG11427.1 [Gibberella zeae PH-1]
  misc_feature (1)..(479): NCBI GI: 256723996 Blast Desc: NECHADRAFT_86298 [Nectria haematococca mpVI 77-13-4]
  misc_feature (1)..(479): NCBI GI: 119178309 Blast Desc: CIMG_08002 [Coccidioides immitis RS]
  misc_feature (1)..(479): NCBI GI: 240104820 Blast Desc: laccase precursor, [Coccidioides posadasii C735 delta SOWgp]
  misc_feature (1)..(479): NCBI GI: 152013642 Blast Desc: Lcc2 [Fusarium oxysporum]
  misc_feature (1)..(458): NCBI GI: 171680034 Blast Desc: protein product [Podospora anserina] gi|170939643|emb|CAP64870.1| protein product [Podospora anserina]
  misc_feature (1)..(457): NCBI GI: 85091578 Blast Desc: NCU09023 [Neurospora crassa OR74A] gi|28920364|gb|EAA29734.1| [Neurospora crassa OR74A]
  misc_feature (1)..(479): NCBI GI: 238840097 Blast Desc: Lcc2 [Microsporum canis CBS 113480]
  misc_feature (1)..(479): SWISSPROT Homolog: EC 1.10.3.2 Laccase
MNGTYPGPLIEACWGDQLVVHVRNRDPDNGTTIHWHGIRQLGSNEMDGVNGITQCPITPGDEFTYNFTLTQYGHTWYHSHYSLQYPDGVAAPLVIYGPSSDNWNIDLGHVLIADWVHNTAYLAYESEMRGPPPTSDSIVVNGHGHYNGTQDKGSYYETVVTPGKKHVLKLINGGIGTSFVFSIDGHSLTVIANDLVPVAPFTVDSLVIGIGQRYTVIVEANQAVSGYWIRTVPASGCSGFPTPPDNRTGILRYDGSSTTLPTTQTQVGINYTCADLNTTLLNPIVPWVVDMHPQNNVTEDTFHVELQNETDTALGPPNFPYKHWFLGSQPMWLDFGKPTILNIESSILNPNYTVVQEDFTDGYIYLIVDASRNVQVTHPIHLHGSDFVILAQSDQPFNATTSPSLFNFDNPPRRDTAFVQHGGFLAMAFRPDNPGAWLLHCHIAWHASSGLALQILVQPKNMPDFNGDLNETQRVCDNWAVSPLYADIIQLQVDSGI

SEQ ID NO: 14698 - DNA, 565 bp, Muscodor strobelii
  misc_feature: SGI EST ID NO. CUFF.34990.0
  misc_feature: Variant of the nucleotide sequence at SEQ ID NO 14696
acggacatagcttgactgtgatcgccaacgacctagtgcctgttgccccgttcactgttgactcgttggtcattggcattggacaacgatacaccgtcatagtggaagctaaccaggctgtctcgggctattggataaggacggttcccgcctccggctgctctgggtttcccacaccacctgataacagaacaggcatactgagatacgacggttctagcactacgcttccgacgacgcagacgcaggtcggcataaattacacttgtgctgaccttaacacgactctgctaaatcctatcgtcccttgggttgtggacatgcatccccagaacaatgtgaccgaagatacgtttcacgtggagcttcagaatgaaactgatacggctctgggacctccaaatttcccttacaagcattggtttcttggaagtcagccaatgtggcttgattttggcaaaccgacaattctaaacattgaatcttccattttgaatcctaactatacggttgtgcaagaggactttacggatggatatatctatctgatcgtcgacgccagccg

SEQ ID NO: 14699 - DNA, 543 bp, Muscodor strobelii
  misc_feature: SGI cDNA ID NO. 564849
  misc_feature: Encodes the peptide sequence at SEQ ID NO 14700
atggccaccgacagggactccgcgtccaaagctacgcctcaacagcctcaacccgtccccgtccacaaaccacaagaaacactccctccgccgccggaggaacccatgccctcagtcttctcgccgcgctcgctcaagcagctcggcctcttcttcggcggcgccggctttcttgtcctctcgaccatgatcaccagacggtccgtagccaggaagatgaaagcaacgatacctcgattctacaaccagagcaaccacgcagtgaaaaagatggacggcgacagctccctcatcgccctcgaggcactcaacctcgccaccctcaacgtcctaggcttcggcataatgatgacgggcggtgctgcgtgggccttcgatatctctagcgtcgacgacctgcggagacgcgcgcggaaacatattggtggcgtgggtggcaggactgacgaagaggcagagcaggagatagaggaatgggtcgccaaggtgctgctgcgcaaggaaaagaaagaagaggccaatgcaaccagacaaaaggactaa

SEQ ID NO: 14700 - protein, 180 aa, Muscodor strobelii
  misc_feature: SGI Peptide ID NO. 564849
  misc_feature (30)..(166): NCBI GI: 261353532 Blast Desc: conserved [Verticillium albo-atrum VaMs.102]
  misc_feature (23)..(166): NCBI GI: 156061435 Blast Desc: SS1G_02862 [Sclerotinia sclerotiorum 1980] gi|154700264|gb|EDO00003.1| SS1G_02862 [Sclerotinia sclerotiorum 1980]
  misc_feature (33)..(172): NCBI GI: 85074680 Blast Desc: NCU02177 [Neurospora crassa OR74A] gi|28926021|gb|EAA35011.1| [Neurospora crassa OR74A]
  misc_feature (30)..(166): NCBI GI: 154313843 Blast Desc: BC1G_05771 [Botryotinia fuckeliana B05.10] gi|150849353|gb|EDN24546.1| BC1G_05771 [Botryotinia fuckeliana B05.10]
  misc_feature (9)..(164): NCBI GI: 171685045 Blast Desc: protein product [Podospora anserina] gi|170942483|emb|CAP68135.1| protein product [Podospora anserina]
  misc_feature (34)..(176): NCBI GI: 145610052 Blast Desc: [Magnaporthe grisea 70-15] gi|145017439|gb|EDK01802.1| [Magnaporthe grisea 70-15]
  misc_feature (34)..(176): NCBI GI: 149210033 Blast Desc: MGCH7_ch7g498 [Magnaporthe grisea 70-15] gi|86196453|gb|EAQ71091.1| MGCH7_ch7g498 [Magnaporthe grisea 70-15]
  misc_feature (31)..(174): NCBI GI: 115385082 Blast Desc: conserved [Aspergillus terreus NIH2624] gi|114196780|gb|EAU38480.1| conserved [Aspergillus terreus NIH2624]
  misc_feature (11)..(171): NCBI GI: 145234160 Blast Desc: An02g13200 [Aspergillus niger] gi|134057395|emb|CAK47733.1| protein product [Aspergillus niger]
  misc_feature (43)..(170): NCBI GI: 46128681 Blast Desc: FG08718.1 [Gibberella zeae PH-1]
MATDRDSASKATPQQPQPVPVHKPQETLPPPPEEPMPSVFSPRSLKQLGLFFGGAGFLVLSTMITRRSVARKMKATIPRFYNQSNHAVKKMDGDSSLIALEALNLATLNVLGFGIMMTGGAAWAFDISSVDDLRRRARKHIGGVGGRTDEEAEQEIEEWVAKVLLRKEKKEEANATRQKD

SEQ ID NO: 14701 - DNA, 1965 bp, Muscodor strobelii
  misc_feature: SGI EST ID NO. CUFF.35029.0
  misc_feature: Variant of the nucleotide sequence at SEQ ID NO 14699
ctcggatccataacaaacggcatcgcaattgaaaagcaatagacaaattctgacgtcacaagccgagttctagctttggctgttctagactagcagatttgaaaatctcactaaagaggaatcatacgtggttccgcaaacaatacttgacaataccttgtgtacctgaagattggaacaaactatgatgcttgcagcagtgcgcaatggaaagatgagtgaccgaggggaagcagtggctccaaatgcactcttgaatattggggaaacaaaatcatcaaggtggcttcttatttacaggcggataggcgacaatcaatttactcatagaggcagttaaagtacaactttggccagctacagcaagtggtaatatgttcacagaaactcacgggatggaacgaagaccgggtgagttgaatagcgggaaagcggcgtatatgcagttagccctcggggatattagcgttatgtagcgatgtattcaactatcgcgtgagtccacagcgccccggaataaacctggggaaaggacccgcgattgcgaaagatgtcaattaatttcgctcctcgatttactaccgtacctgattttcatagacatctcgctccgctctctgcgccaattctagaagacaacccatttttgtgtatagactgcgcgctgctaccgtagactaccgcgacaaccacggtcattacgccttcactaaattcgtgcctgctctagacgaaaatcgcctagtaaactgtcaatagattcgctcgtcgaattcccccctcgacatgtggtccttcggcaccaccttcacgatggccaccgacagggactccgcgtccaaagctacgcctcaacagcctcaacccgtccccgtccacaaaccacaagaaacactccctccgccgccggaggaacccatgccctcagtcttctcgccgcgctcgctcaagcagctcggcctcttcttcggcggcgccggctttcttgtcctctcgaccatgatcaccagacggtccgtagccaggaagatgaaagcaacgatacctcgattctacaaccagagcaaccacgcagtgaaaaagatggacggcgacagctccctcatcgccctcgaggcactcaacctcgccaccctcaacgtcctaggcttcggcataatgatgacgggcggtgctgcgtgggccttcgatatctctagcgtcgacgacctgcggagacgcgcgcggaaacatattggtggcgtgggtggcaggactgacgaagaggcagagcaggagatagaggaatgggtcgccaaggtgctgctgcgcaaggaaaagaaagaagaggccaatgcaaccagacaaaaggactaatcttggaacccattgaccaatcccttacggcgacctcgtcttcactaccagggccctctaagggaaatccccaactgcgtctgatgctgacgccactgtctaatgtccccagacttatgtccatactggtgtactctcctgctctccagtctttggtctgcagaccttttctggggaaatcctgacgctagcggaccacgtgtagactgacggtaacctgcacagggcatcctcgcgagcccggcgctttcaagtgagttagccagatgcaatctccgatcacactcagcctgggatcgatctcgtgtttagaggaaccaatgacaggcggaatatgcatccaccatcccggaggctggaggacgttgcagatcgccgttactctttgtacgatagcattcgaaatctacccgcctcctcatcggccgtgaaatcctggtctcactttcaatctgtccctctaatttcacacccgcccgtgctgcctgcaagtgatcaccgatacggactagctgcctgtcccaatgcattaactgaaccctcaccacagccgccaccacctgtcagaattaagtgagatcattattgttatattgattattattatat

SEQ ID NO: 14702 - DNA, 744 bp, Muscodor strobelii
  misc_feature: SGI cDNA ID NO. 564850
  misc_feature: Encodes the peptide sequence at SEQ ID NO 14703
atgagccatttgaccgagtacacgctgttgctgacgcttgtcaaaaggctcctcggggaggagataaaaccgactgcaaaagagcacggacagttcggaggcacgacggtacagttcgccctctaccgaggcccgtcgacgaaagaagttgaagatttctatggccccctcactcttgaagttgagcagtcaagattaaggcctcgcagaaaatcactgtacagaaagttcgttcgatgtgcttatcaagcccactggtccttcaaggaaggacaaccagtagtgggcacaatttggcaccttcaagactgtatacacttcttgatccagtcattcaaggctatggaagaggcaaaagagtacgacgacgatgacaaaaatccagtccattggagcgaggtgtaccgagccgagggcgttgaccagcagactccacaggagtattggttgctcttcaagttagaaagcctcctgcctgtactacgcttgtccgtgatcgttttgcggcttgtgtttcccgattgcaaagatacctggaacgaatgggaagaggatttatgtcgcaaagaatggctgcaacaattcattctagattctcgaaagtcagcgttgtcagcaatgccaaactacgcgccgcgactaggcgatatagttggcagaggtgcttccaaaaaacgacctgggctgagttttgatagccaagttcagttacaacgtgatgcactgcaagactcggatccataa

SEQ ID NO: 14703 - protein, 247 aa, Muscodor strobelii
  misc_feature: SGI Peptide ID NO. 564850
MSHLTEYTLLLTLVKRLLGEEIKPTAKEHGQFGGTTVQFALYRGPSTKEVEDFYGPLTLEVEQSRLRPRRKSLYRKFVRCAYQAHWSFKEGQPVVGTIWHLQDCIHFLIQSFKAMEEAKEYDDDDKNPVHWSEVYRAEGVDQQTPQEYWLLFKLESLLPVLRLSVIVLRLVFPDCKDTWNEWEEDLCRKEWLQQFILDSRKSALSAMPNYAPRLGDIVGRGASKKRPGLSFDSQVQLQRDALQDSDP

SEQ ID NO: 14704 - DNA, 236 bp, Muscodor strobelii
  misc_feature: SGI EST ID NO. CUFF.35033.0
  misc_feature: Variant of the nucleotide sequence at SEQ ID NO 14702
gtattggttgctcttcaagttagaaagcctcctgcctgtactacgcttgtccgtgatcgttttgcggcttgtgtttcccgattgcaaagatacctggaacgaatgggaagaggatttatgtcgcaaagaatggctgcaacaattcattctagattctcgaaagtcagcgttgtcagcaatgccaaactacgcgccgcgactaggcgatatagttggcagaggtgcttccaaaaaac

SEQ ID NO: 14705 - DNA, 750 bp, Muscodor strobelii
  misc_feature: SGI cDNA ID NO. 564851
  misc_feature: Elevated expression when VOC is produced
  misc_feature: Encodes the peptide sequence at SEQ ID NO 14706
atgggtagtaggaaaaagcaactggcgactagcgtgagccgtgctgagcccccgaatgctactgtgagagctaccgtgccaacctggccaatcttcaagcctcatttgcctgtcgtccagctctctgttgatcacccatcaccaggattcgaggaccagattgttataattcggaatttctttcctaagtcactctgccgagactttgtggcttatctggcaggcctgccattgtcaactacccctggcaagccgaaacggggagacgctgttcgggttaacgatcggttccaagtcaacgacccccaatttgctcagagactctggctgcaaactgggctgaaagaggcggtgcaaggggaatccaagactttgtggggtggagaagttataggattgaattcgaacattcggatttatcgctattccccaggtcaatttttcgactgtcactatgatgattacaatctagtcagcgttccctccgaaaatggctctgaaacaatcaatgccaaaacaacgtggactgcgttactttatctgacgtctgccactgagggctgtcaaggtggcgaaacagtcttttatgccaatgatcgcaaattagcagcagaagaaatcgtcattggtcctgagacagggatgattctccttcacaaacatggtaacgactgtcttttgcatgaaggtcgcgaggtgatcgctggccaaaaatgggtaattcgaaccgatctttgtgtccgcagatga

SEQ ID NO: 14706 - protein, 249 aa, Muscodor strobelii
  misc_feature: SGI Peptide ID NO. 564851
  misc_feature (29)..(249): NCBI GI: 171685043 Blast Desc: protein product [Podospora anserina] gi|170942482|emb|CAP68134.1| protein product [Podospora anserina]
  misc_feature (29)..(249): NCBI GI: 85074678 Blast Desc: NCU02176 [Neurospora crassa OR74A] gi|28926020|gb|EAA35010.1| conserved [Neurospora crassa OR74A]
  misc_feature (20)..(244): NCBI GI: 154319790 Blast Desc: BC1G_02376 [Botryotinia fuckeliana B05.10] gi|150856034|gb|EDN31226.1| BC1G_02376 [Botryotinia fuckeliana B05.10]
  misc_feature (5)..(249): NCBI GI: 261206194 Blast Desc: conserved [Ajellomyces dermatitidis SLH14081] gi|239592893|gb|EEQ75474.1| conserved [Ajellomyces dermatitidis SLH14081]
  misc_feature (5)..(249): NCBI GI: 239610936 Blast Desc: conserved [Ajellomyces dermatitidis ER-3]
  misc_feature (3)..(249): NCBI GI: 240108057 Blast Desc: CPC735_004020 [Coccidioides posadasii C735 delta SOWgp]
  misc_feature (9)..(249): NCBI GI: 67537632 Blast Desc: AN4986.2 [Aspergillus nidulans FGSC A4] gi|40741874|gb|EAA61064.1| AN4986.2 [Aspergillus nidulans FGSC A4] gi|259482141|tpe|CBF76338.1| TPA: conserved [Aspergillus FGSC
  misc_feature (27)..(249): NCBI GI: 119491927 Blast Desc: NFIA_067280 [Neosartorya fischeri NRRL 181] gi|119411618|gb|EAW21561.1| conserved [Neosartorya fischeri NRRL 181]
  misc_feature (19)..(249): NCBI GI: 226281904 Blast Desc: conserved [Paracoccidioides brasiliensis Pb01]
  misc_feature (36)..(249): NCBI GI: 156046066 Blast Desc: SS1G_09309 [Sclerotinia sclerotiorum 1980] gi|154693705|gb|EDN93443.1| SS1G_09309 [Sclerotinia sclerotiorum 1980]
  misc_feature: Useful for introducing or modulating the production of volatile compounds
MGSRKKQLATSVSRAEPPNATVRATVPTWPIFKPHLPVVQLSVDHPSPGFEDQIVIIRNFFPKSLCRDFVAYLAGLPLSTTPGKPKRGDAVRVNDRFQVNDPQFAQRLWLQTGLKEAVQGESKTLWGGEVIGLNSNIRIYRYSPGQFFDCHYDDYNLVSVPSENGSETINAKTTWTALLYLTSATEGCQGGETVFYANDRKLAAEEIVIGPETGMILLHKHGNDCLLHEGREVIAGQKWVIRTDLCVRR

SEQ ID NO: 14707 - DNA, 1539 bp, Muscodor strobelii
  misc_feature: SGI EST ID NO. CUFF.35071.0
  misc_feature: Variant of the nucleotide sequence at SEQ ID NO 14705
aacttcttgagcatcattcagactcatcctgtcacgtcacggtgcgcgaccaattgaggatcgaggcaaaggaaggagaatttttgccattcatttgccatgggtagtaggaaaaagcaactggcgactagcgtgagccgtgctgagcccccgaatgctactgtgagagctaccgtgccaacctggccaatcttcaagcctcatttgcctgtcgtccagctctctgttgatcacccatcaccaggattcgaggaccagattgttataattcggaatttctttcctaagtcactctgccgagactttgtggcttatctggcaggcctgccattgtcaactacccctggcaagccgaaacggggagacgctgttcgggttaacgatcggttccaagtcaacgacccccaatttgctcagagactctggctgcaaactgggctgaaagaggcggtgcaaggggaatccaagactttgtggggtggagaagttataggattgaattcgaacattcggatttatcgctattccccaggtcaatttttcgactgtcactatgatgattacaatctagtcagcgttccctccgaaaatggctctgaaacaatcaatgccaaaacaacgtggactgcgttactttatctgacgtctgccactgagggctgtcaaggtggcgaaacagtcttttatgccaatgatcgcaaattagcagcagaagaaatcgtcattggtcctgagacagggatgattctccttcacaaacatggtaacgactgtcttttgcatgaaggtcgcgaggtgatcgctggccaaaaatgggtaattcgaaccgatctttgtgtccgcagatgagcaaatgcatcgtcagaacgcacgatcttgtatattccatctccttcacagccttgacgattcataaaaaaggagtccctggcttttctaccattgggtttcgaactgggggcttggttgcatgtatttgcaagccctccaaccagccaagctagtgagcctttgttgagttcaccgcaagtccgcaatgtgtttctttgtaaacaatcaagatcgaacttatgctttgcgctcttttccgggaataacagcttaaaatatgcactcgtagattttgatgattcccagaggaactcacatatgcaaccttctctatcaagacaggattgtattcgtgccgtgtaagccctttgtttggcattcaagactttcgcggattggatcgaacggatttttctccagacaccaatgttcatcgatcctaattaagtccttgactccctatcagtaactgaccaatctgatctcctcaaagccccgggcagtatcgtaaaagccatgcagctttgcgcgatattagatgcggacgcgtccaggaccaacacgatcgcatattacgagcctaaatggacaccaacggcttcgtcaccggcaagatccgtactaatgcagttcaactgaggtcgatgtacgagttttgggctatcataagttgacgccacccaaaggtgttgtccaatccagtcaaga

SEQ ID NO: 14708 - DNA, 381 bp, Muscodor strobelii
  misc_feature: SGI cDNA ID NO. 564852
  misc_feature: Encodes the peptide sequence at SEQ ID NO 14709
atgtacaggggccaggccccgtacaagggcccgttcacccattcggcgagcaaggccaacgtgtaccatctcatcgaccacgagaccaacccaggattctcggagaagacgtactgggttgaccaccaccttactcccaagggaaagcgcaagggtccccctcctttcgagcagaccaaggctctttcgacgtcacgggcgccagagaaactgttgtggaattcgctcttcccttcggggaagatccgccactggttggccggtctgagccttaatgtgcaagtctccattgacaacggcccgagccagtctgacgtggttctggcccagggcgtcgagatcaagaaagcatctaatgtggctgcacgagaagcagaatag

SEQ ID NO: 14709 - protein, 126 aa, Muscodor strobelii
  misc_feature: SGI Peptide ID NO. 564852
MYRGQAPYKGPFTHSASKANVYHLIDHETNPGFSEKTYWVDHHLTPKGKRKGPPPFEQTKALSTSRAPEKLLWNSLFPSGKIRHWLAGLSLNVQVSIDNGPSQSDVVLAQGVEIKKASNVAAREAE

SEQ ID NO: 14710 - DNA, 462 bp, Muscodor strobelii
  misc_feature: SGI cDNA ID NO. 564853
  misc_feature: Encodes the peptide sequence at SEQ ID NO 14711
atgatagtcataggttgcaagagtagcacgaacccgactatctggactgagcatctcttcagcaaaacaagaacaagggtgacgttggagtccaaggaaattgcggatggagctgtgaaggcttgggtcgatggagcgattgagttctgccctccatgcggtacgcatgaaggtaacaagaaagccaaaggggaggctaagaagaaggccacgaaggaagctagagaagctaagaatgaagctgagaaggaagctaagaaacatgtgcttcctagttctgcgaagacagcggacctcttcgcaaaggatgacctactcgagcggcttgggcacccagtagggatcacagcgaaatcagttggtgatgtccttcccgtgggctatgaggataacgcactagtaacatgcgccggggttgatcgtgaaattggtggtattaccgaagcagagaggactcgttga

SEQ ID NO: 14711 - protein, 153 aa, Muscodor strobelii
  misc_feature: SGI Peptide ID NO. 564853
MIVIGCKSSTNPTIWTEHLFSKTRTRVTLESKEIADGAVKAWVDGAIEFCPPCGTHEGNKKAKGEAKKKATKEAREAKNEAEKEAKKHVLPSSAKTADLFAKDDLLERLGHPVGITAKSVGDVLPVGYEDNALVTCAGVDREIGGITEAERTR

SEQ ID NO: 14712 - DNA, 1146 bp, Muscodor strobelii
  misc_feature: SGI cDNA ID NO. 564854
  misc_feature: Encodes the peptide sequence at SEQ ID NO 14713
atggcacaccaatctatccatattgtaggtgcaggcatcggtggattgtcactggcccgaaccctgcttaaaaatggcattcgagccgtgctctacgagagaacgccttcttctcaacgcaatggctacggtataactcttcatgaaactacttatcgaccgcttctggatatactcagcttggatgaaactacctttagacttcgtgtagccgttgatagtccaattggtggtaacggagcaatcaaccccaagctgcttgtcagtcctgggaatatcaaatcaacgtcattccgagcacatcgcgaaagacttgaaaagctgctcaaagagggcttaaacatccaatgggaacatgatctcgagaaaattgatgaatctgcatctggaaaggtgctatgcctgaaaaatagccagagactagagggtgcattcatcatcggcgttgacggcccacattctaacacacgcaagtctttgcttcccaacacatctcctaaggtactcccctatgttgtattcaatggtaagcatcgtgtcagtcgcgatgttttcgatcaaacgtacgcgccggccatgggaaattcgaacgtcatcgaaacgagggttggtgatacagtgctgaatatatccatcaacgacaatcagactgatattgttaacatatcatggatattctcgcgtgcggccaaaggcccgactgattctcttcataaaccaaatcgcccgacttcggaggctaccgagattccagggggatttttcgacgaagttagtgcacttcagggactcacccagcccttcaaagaggtgtttgatgctgagaagctgagaaacgagcgggcactacactggctcatgcgcacagtattagtcagccagcaggatcttgatacactcgcgagtaaaggtgtgtatcttataggcgatgctgttcatgctgagcctatcctgggaggggaaggggccaataatgctatcacagatggcgttcagctcgcacttcaaattgcgcgctccggccaggctggcatacgggcctggtatgaatcccggtatccagaatggcataatggcatcaaaagaagcgagatggctattggcgctatacatgccagacaaagcgattcgccttctaccttttaa

SEQ ID NO: 14713 - protein, 381 aa, Muscodor strobelii
  misc_feature: SGI Peptide ID NO. 564854
  misc_feature (2)..(363): Pfam Id: PF01494 Pfam Desc: FAD binding domain
  misc_feature (1)..(375): NCBI GI: 169612908 Blast Desc: SNOG_09582 [Phaeosphaeria nodorum SN15] gi|111061727|gb|EAT82847.1| SNOG_09582 [Phaeosphaeria nodorum SN15]
  misc_feature (5)..(339): NCBI GI: 238841119 Blast Desc: FAD binding domain-containing protein [Microsporum canis CBS 113480]
  misc_feature (6)..(371): NCBI GI: 119487999 Blast Desc: FAD binding domain protein [Neosartorya fischeri NRRL 181] gi|119410756|gb|EAW20701.1| FAD binding domain protein [Neosartorya fischeri NRRL 181]
  misc_feature (6)..(371): NCBI GI: 67539664 Blast Desc: AN6002.2 [Aspergillus nidulans FGSC A4] gi|40738561|gb|EAA57751.1| AN6002.2 [Aspergillus nidulans FGSC A4] gi|259479815|tpe|CBF70383.1| TPA: FAD-dependent AFUA_7G00150)
  misc_feature (4)..(259): NCBI GI: 189192675 Blast Desc: FAD binding domain containing protein [Pyrenophora tritici-repentis Pt-1C-BFP] gi|187978240|gb|EDU44866.1| FAD binding domain containing protein [Pyrenophora tritici-repentis
  misc_feature (6)..(371): NCBI GI: 145244875 Blast Desc: An11g07330 [Aspergillus niger] gi|134079399|emb|CAK40780.1| protein product [Aspergillus niger]
  misc_feature (6)..(371): NCBI GI: 159122843 Blast Desc: FAD-dependent monooxygenase, [Aspergillus fumigatus A1163]
  misc_feature (6)..(371): NCBI GI: 70982772 Blast Desc: FAD-dependent monooxygenase [Aspergillus fumigatus Af293] gi|66844538|gb|EAL84876.1| FAD-dependent monooxygenase, [Aspergillus fumigatus Af293]
  misc_feature (6)..(366): NCBI GI: 156058129 Blast Desc: [Sclerotinia sclerotiorum 1980] gi|154702581|gb|EDO02320.1| [Sclerotinia sclerotiorum 1980]
  misc_feature (84)..(381): NCBI GI: 154299057 Blast Desc: [Botryotinia fuckeliana B05.10] gi|150857544|gb|EDN32736.1| [Botryotinia fuckeliana B05.10]
  misc_feature (3)..(339): SWISSPROT Homolog: EC 1.14.13.24 3-hydroxybenzoate 6-monooxygenase
MAHQSIHIVGAGIGGLSLARTLLKNGIRAVLYERTPSSQRNGYGITLHETTYRPLLDILSLDETTFRLRVAVDSPIGGNGAINPKLLVSPGNIKSTSFRAHRERLEKLLKEGLNIQWEHDLEKIDESASGKVLCLKNSQRLEGAFIIGVDGPHSNTRKSLLPNTSPKVLPYVVFNGKHRVSRDVFDQTYAPAMGNSNVIETRVGDTVLNISINDNQTDIVNISWIFSRAAKGPTDSLHKPNRPTSEATEIPGGFFDEVSALQGLTQPFKEVFDAEKLRNERALHWLMRTVLVSQQDLDTLASKGVYLIGDAVHAEPILGGEGANNAITDGVQLALQIARSGQAGIRAWYESRYPEWHNGIKRSEMAIGAIHARQSDSPSTF

SEQ ID NO: 14714 - DNA, 1343 bp, Muscodor strobelii
  misc_feature: SGI EST ID NO. CUFF.35003.0
  misc_feature: Variant of the nucleotide sequence at SEQ ID NO 14712
tgagcatgtcgtttccactcttgaagctgcctcactgtacatctacgcgaatatttttggttacacaatgcctgttgtgtagccttcaactgacttcgacggattgttgccactatggcacaccaatctatccatattgtaggtgcaggcatcggtggattgtcactggcccgaaccctgcttaaaaatggcattcgagccgtgctctacgagagaacgccttcttctcaacgcaatggctacggtataactcttcatgaaactacttatcgaccgcttctggatatactcagcttggatgaaactacctttagacttcgtgtagccgttgatagtccaattggtggtaacggagcaatcaaccccaagctgcttgtcagtcctgggaatatcaaatcaacgtcattccgagcacatcgcgaaagacttgaaaagctgctcaaagagggcttaaacatccaatgggaacatgatctcgagaaaattgatgaatctgcatctggaaaggtgctatgcctgaaaaatagccagagactagagggtgcattcatcatcggcgttgacggcccacattctaacacacgcaagtctttgcttcccaacacatctcctaaggtactcccctatgttgtattcaatggtaagcatcgtgtcagtcgcgatgttttcgatcaaacgtacgcgccggccatgggaaattcgaacgtcatcgaaacgagggttggtgatacagtgctgaatatatccatcaacgacaatcagactgatattgttaacatatcatggatattctcgcgtgcggccaaaggcccgactgattctcttcataaaccaaatcgcccgacttcggaggctaccgagattccagggggatttttcgacgaagttagtgcacttcagggactcacccagcccttcaaagaggtgtttgatgctgagaagctgagaaacgagcgggcactacactggctcatgcgcacagtattagtcagccagcaggatcttgatacactcgcgagtaaaggtgtgtatcttataggcgatgctgttcatgctgagcctatcctgggaggggaaggggccaataatgctatcacagatggcgttcagctcgcacttcaaattgcgcgctccggccaggctggcatacgggcctggtatgaatcccggtatccagaatggcataatggcatcaaaagaagcgagatggctattggcgctatacatgccagacaaagcgattcgccttctaccttttaacgatatttagcttcgcttatgcctttaattatctcatattctgatgagccaattcgatgatgatctgcaagtttgactggaca

SEQ ID NO: 14715 - DNA, 483 bp, Muscodor strobelii
  misc_feature: SGI cDNA ID NO. 564855
  misc_feature: Encodes the peptide sequence at SEQ ID NO 14716
atggtcacggagaagagacagtcctttccagagagacgtcgactagtgaccaaattcagggtggtagttggcatccttctcgtatccgtcgtcttcaatttcgtgcttctgcttgtatcgtccaggcccatggtcgacgtaccgactaagtatgccggaatgcgacgtactcgcgaagagccattggtggtcgtgacgcagtatgatacacgcaaccagaccttacaggatcagttgtggcatgacatcaacctggatgctgcatatgttgctctcccagatgagttggttgaggaatatgaacttcgccgagcacagcgattcccttgggatacgtctaaaggattgtatcctgaatccgcgctgaagtactgcatgggtatcataatcttcattgtgtcaagattctctacctcgcacttgcagagtatcgacgaggagatccgcaatcgcgagattggcgtcatctcagccattgcttag

SEQ ID NO: 14716 - protein, 160 aa, Muscodor strobelii
  misc_feature: SGI Peptide ID NO. 564855
  misc_feature (4)..(117): NCBI GI: 242816284 Blast Desc: TSTA_107140 [Talaromyces stipitatus ATCC 10500] gi|218715083|gb|EED14506.1| TSTA_107140 [Talaromyces stipitatus ATCC 10500]
  misc_feature (4)..(117): NCBI GI: 156034839 Blast Desc: [Sclerotinia sclerotiorum 1980] gi|154698758|gb|EDN98496.1| [Sclerotinia sclerotiorum 1980]
  misc_feature (27)..(143): NCBI GI: 156051644 Blast Desc: SS1G_07229 [Sclerotinia sclerotiorum 1980] gi|154705007|gb|EDO04746.1| SS1G_07229 [Sclerotinia sclerotiorum 1980]
  misc_feature (10)..(117): NCBI GI: 154322324 Blast Desc: [Botryotinia fuckeliana B05.10] gi|150850556|gb|EDN25749.1| [Botryotinia fuckeliana B05.10]
  misc_feature (14)..(129): NCBI GI: 154297777 Blast Desc: [Botryotinia fuckeliana B05.10] gi|150858429|gb|EDN33621.1| [Botryotinia fuckeliana B05.10]
  misc_feature (25)..(117): NCBI GI: 242817079 Blast Desc: conserved [Talaromyces stipitatus ATCC 10500] gi|218713345|gb|EED12769.1| conserved [Talaromyces stipitatus ATCC 10500]
  misc_feature (26)..(117): NCBI GI: 242784974 Blast Desc: TSTA_033120 [Talaromyces stipitatus ATCC 10500] gi|218720646|gb|EED20065.1| TSTA_033120 [Talaromyces stipitatus ATCC 10500]
  misc_feature (13)..(117): NCBI GI: 242787550 Blast Desc: TSTA_038090 [Talaromyces stipitatus ATCC 10500] gi|218721179|gb|EED20598.1| TSTA_038090 [Talaromyces stipitatus ATCC 10500]
  misc_feature (19)..(145): NCBI GI: 169620792 Blast Desc: SNOG_13602 [Phaeosphaeria nodorum SN15] gi|111057929|gb|EAT79049.1| SNOG_13602 [Phaeosphaeria nodorum SN15]
  misc_feature (19)..(117): NCBI GI: 242780316 Blast Desc: TSTA_024590 [Talaromyces stipitatus ATCC 10500] gi|218719716|gb|EED19135.1| TSTA_024590 [Talaromyces stipitatus ATCC 10500]
MVTEKRQSFPERRRLVTKFRVVVGILLVSVVFNFVLLLVSSRPMVDVPTKYAGMRRTREEPLVVVTQYDTRNQTLQDQLWHDINLDAAYVALPDELVEEYELRRAQRFPWDTSKGLYPESALKYCMGIIIFIVSRFSTSHLQSIDEEIRNREIGVISAIA

SEQ ID NO: 14717 - DNA, 288 bp, Muscodor strobelii
  misc_feature: SGI cDNA ID NO. 564856
  misc_feature: Encodes the peptide sequence at SEQ ID NO 14718
atgaaaatgaaaatgcaattgtcatcgttcctcgtcgtattcgctgctctcacgagcgcgttgcccactcctgatgctgcggaccaggatggtctgccccaaattggcgaggccatcaaacgtagcgaagacgttgcgcgcaagattggcgaagcctacaagcgtgatgaagatgacacactccagatcggcgaggccattaaacgtgatgaagatggtggactccagattggtgaggcaatcaagcgtgatgaggacactccgcttcagattggcgaggcaatctaa

SEQ ID NO: 14718 - protein, 95 aa, Muscodor strobelii
  misc_feature: SGI Peptide ID NO. 564856
  misc_feature (28)..(95): NCBI GI: 260783512 Blast Desc: BRAFLDRAFT_105570 [Branchiostoma floridae] gi|229271945|gb|EEN42829.1| BRAFLDRAFT_105570 [Branchiostoma floridae]
MKMKMQLSSFLVVFAALTSALPTPDAADQDGLPQIGEAIKRSEDVARKIGEAYKRDEDDTLQIGEAIKRDEDGGLQIGEAIKRDEDTPLQIGEAI

SEQ ID NO: 14719 - DNA, 1467 bp, Muscodor strobelii
  misc_feature: SGI cDNA ID NO. 564857
  misc_feature: Reduced expression when VOC is produced
  misc_feature: Encodes the peptide sequence at SEQ ID NO 14720
atggctgatgatattcccctccccgatgcgcatgccgacacggcaatcgaattgggcgatgcagacccggccgcgatgcctaagagaccgcgcaccatgaccagcaccgccgagatcgacagcaccatatcgcacccgggctctgtgcgcatcaacgtgaagggcgccttcatcgtcgacactcccgagcagccgaacacaccggcgaatggccttgccaatgccaatggtagctaccatgagggaaaggacatcaggttgcccaaccacacggctgttgtcagccatattgctgtcgatatcggaggttctctagctaagctcgtctacttctcacgcgaaccgcactcgaccgaacccggcggcaggctcaacttccattccttcgagaccgaccatatcgacgactgcatcgagttcatgggccatctgaaagacaaccaattagctctcaatggctccaggcccaacgatctatgcattatggccacgggaggcggcgcgttcaaataccacgaccggataaaaaagcgactgggcgttgatgtgctgagcgaagacgaaatgacctgcttgattataggtctcgatttcttcatcactgagataccccgcgaagtattcacttactccgacaccgagcccatgcactttgcgcaacccagaccgaacatatacccctacatgctcgtgaacatcggctccggcgtctccatcctgaaagtcgacggcccacgcaaattcgagcgtgtaggtggcacatcactcggtggcggcacactctggggtctgctctccctcctcacacccgcagagaacttcgacgacatgttggcaatggccgcaaagggtgacaacgcgaaggtcgacatgctcgtcggtgacatttacggcacagactacaacaagatcggactgaaaagcaccgcgatcgcctcctctttcggcaaagtcttccgcatgaagcgcgaagccgagaacgaagcagaagacaacggcaacatctcccactccgaccatcccccgaccgacaccgacgctcctccaaacccgccctcatcctcacatgccaatcctcgtttctccgcctcagatatatcccgctccctcttatacgctgtatcgaataacatcggccaaatcgcataccttcaatcacaggtccacggactatccaatatctacttcggcgggtcctttatccgcggccacccgcagactatgaatacgctctccttcgccatcaagttctggagtaaaggacaaaaacaagcttatttcctccgtcatgaggggtatctaggcgctgtaggtgctttcttgaagcgacagccgagaaattggggtaggaggggcagttttgaggatttgagtagtgatgggttggaagagaggctgaggagaaggtctgagggtgatgttttggggagtgtcgatgggctcactatggacgggttagggacgtga

SEQ ID NO: 14720 - protein, 488 aa, Muscodor strobelii
  misc_feature: SGI Peptide ID NO. 564857
  misc_feature (95)..(444): Pfam Id: PF03630 Pfam Desc: Fumble
  misc_feature (29)..(488): NCBI GI: 116193151 Blast Desc: CHGG_06293 [Chaetomium globosum CBS 148.51] gi|88182206|gb|EAQ89674.1| CHGG_06293 [Chaetomium globosum CBS 148.51]
  misc_feature (23)..(477): NCBI GI: 145610046 Blast Desc: MGG_12598 [Magnaporthe grisea 70-15] gi|145017436|gb|EDK01799.1| MGG_12598 [Magnaporthe grisea 70-15]
  misc_feature (23)..(477): NCBI GI: 149210037 Blast Desc: MGCH7_ch7g500 [Magnaporthe grisea 70-15] gi|86196455|gb|EAQ71093.1| MGCH7_ch7g500 [Magnaporthe grisea 70-15]
  misc_feature (9)..(473): NCBI GI: 256734079 Blast Desc: [Nectria haematococca mpVI 77-13-4]
  misc_feature (28)..(468): NCBI GI: 46128605 Blast Desc: FG08680.1 [Gibberella zeae PH-1]
  misc_feature (27)..(459): NCBI GI: 119191932 Blast Desc: CIMG_00343 [Coccidioides immitis RS] gi|240106289|gb|EER24482.1| pantothenate kinase, [Coccidioides posadasii C735 delta SOWgp]
  misc_feature (21)..(456): NCBI GI: 156060871 Blast Desc: SS1G_02578 [Sclerotinia sclerotiorum 1980] gi|154699982|gb|EDN99720.1| SS1G_02578 [Sclerotinia sclerotiorum 1980]
  misc_feature (10)..(479): NCBI GI: 171683885 Blast Desc: protein product [Podospora anserina] gi|170941903|emb|CAP67555.1| protein product [Podospora anserina]
  misc_feature (39)..(468): NCBI GI: 225559315 Blast Desc: pantothenate kinase [Ajellomyces capsulatus G186AR]
  misc_feature (27)..(458): NCBI GI: 212544466 Blast Desc: pantothenate kinase, [Penicillium marneffei ATCC 18224] gi|210065356|gb|EEA19450.1| pantothenate kinase, [Penicillium marneffei ATCC 18224]
  misc_feature (35)..(447): SWISSPROT Homolog: EC 2.7.1.33 Pantothenate kinase
  misc_feature: Useful for introducing or modulating the production of volatile compounds
MADDIPLPDAHADTAIELGDADPAAMPKRPRTMTSTAEIDSTISHPGSVRINVKGAFIVDTPEQPNTPANGLANANGSYHEGKDIRLPNHTAVVSHIAVDIGGSLAKLVYFSREPHSTEPGGRLNFHSFETDHIDDCIEFMGHLKDNQLALNGSRPNDLCIMATGGGAFKYHDRIKKRLGVDVLSEDEMTCLIIGLDFFITEIPREVFTYSDTEPMHFAQPRPNIYPYMLVNIGSGVSILKVDGPRKFERVGGTSLGGGTLWGLLSLLTPAENFDDMLAMAAKGDNAKVDMLVGDIYGTDYNKIGLKSTAIASSFGKVFRMKREAENEAEDNGNISHSDHPPTDTDAPPNPPSSSHANPRFSASDISRSLLYAVSNNIGQIAYLQSQVHGLSNIYFGGSFIRGHPQTMNTLSFAIKFWSKGQKQAYFLRHEGYLGAVGAFLKRQPRNWGRRGSFEDLSSDGLEERLRRRSEGDVLGSVDGLTMDGLGT

SEQ ID NO: 14721 - DNA, 2515 bp, Muscodor strobelii
  misc_feature: SGI EST ID NO. CUFF.35305.0
  misc_feature: Variant of the nucleotide sequence at SEQ ID NO 14719
caacctggaaggctcgccgtttttaagactgagcgactgtggcataatgcatactggcagtacgaatatatggagagaagaaaactatagggcacagcttaccttaataaatgcaaggccgagtgacgaacaacatagggtatttagacctttgaacatcaaatttagtatggcgagagccagaacggcccatattaatctgctttcaggtgccatacatatatcacgtggactaaaaccacattagatttgagagcgccaatattgagtttggaaagctcgaagagcatcatgaagcagagggaagtggcactttgttactttagggcaagaaggggacctcaaggtcctcgtgcctgcagtaggggtcctagggtcctactgtacctaatcgataaccagcacgaagctaaagtcccacagtggacctcgggacactttagggcattccgctcccccggactggggctgccaggcctatctggcggcgagcaacgttgctgatagctccagtaattgtggtcttgttcttagaatagactcatgatcctttcgcttgctcaacaaaacatctcaaatcaacttttcttctattcttacacctcaatcgattgagtctgacataccaacattcatgccgccttaatatcctccagaagtccggcttctacgccgccagctctcttcaccctatcagtattttccctctcgaatccgtgatacccctataacccccacttgcgacacgcaccccgccatcgctgtcgctgtcagactgccgccgtcgcacgcgggcgcaagctggcagccatgacacccgtcgtcatggctgatgatattcccctccccgatgcgcatgccgacacggcaatcgaattgggcgatgcagacccggccgcgatgcctaagagaccgcgcaccatgaccagcaccgccgagatcgacagcaccatatcgcacccgggctctgtgcgcatcaacgtgaagggcgccttcatcgtcgacactcccgagcagccgaacacaccggcgaatggccttgccaatgccaatggtagctaccatgagggaaaggacatcaggttgcccaaccacacggctgttgtcagccatattgctgtcgatatcggaggttctctagctaagctcgtctacttctcacgcgaaccgcactcgaccgaacccggcggcaggctcaacttccattccttcgagaccgaccatatcgacgactgcatcgagttcatgggccatctgaaagacaaccaattagctctcaatggctccaggcccaacgatctatgcattatggccacgggaggcggcgcgttcaaataccacgaccggataaaaaagcgactgggcgttgatgtgctgagcgaagacgaaatgacctgcttgattataggtgaagctcaccacccaaaaaccactcaggcgggaggacaaatgctgacatgcgacggaaataggtctcgatttcttcatcactgagataccccgcgaagtattcacttactccgacaccgagcccatgcactttgcgcaacccagaccgaacatatacccctacatgctcgtgaacatcggctccggcgtctccatcctgaaagtcgacggcccacgcaaattcgagcgtgtaggtggcacatcactcggtggcggcacactctggggtctgctctccctcctcacacccgcagagaacttcgacgacatgttggcaatggccgcaaagggtgacaacgcgaaggtcgacatgctcgtcggtgacatttacggcacagactacaacaagatcggactgaaaagcaccgcgatcgcctcctctttcggcaaagtcttccgcatgaagcgcgaagccgagaacgaagcagaagacaacggcaacatctcccactccgaccatcccccgaccgacaccgacgctcctccaaacccgccctcatcctcacatgccaatcctcgtttctccgcctcagatatatcccgctccctcttatacgctgtatcgaataacatcggccaaatcgcataccttcaatcacaggtccacggactatccaatatctacttcggcgggtcctttatccgcggccacccgcagactatgaatacgctctccttcgccatcaagttctggagtaaaggacaaaaacaagcttatttcctccgtcatgaggggtatctaggcgctgtaggtgctttcttgaagcgacagccgagaaattggggtaggaggggcagttttgaggatttgagtagtgatgggttggaagagaggctgaggagaaggtctgagggtgatgttttggggagtgtcgatgggctcactatggacgggttagggacgtgattggtgttcttgcatactgggtctgtctgggctgagcgagcgttctgcggcatggatagagcattgggttgggttagaaagacaggagaaaggagagagtattatatccaggtagagataaaggaatgaataaatactacataagatatatactgccgt

SEQ ID NO: 14722 - DNA, 816 bp, Muscodor strobelii
  misc_feature: SGI cDNA ID NO. 564858
  misc_feature: Reduced expression when VOC is produced
  misc_feature: Encodes the peptide sequence at SEQ ID NO 14723
atggagtcaagcaacactaagctcctcctctacgaccacccaatctcctcctacgcccaaaaaatccgcatcgcactccgcgaaaaaggcctctccttcaccgccaaaactcctcagggtctcggctcaggccaacacatcccatccctctcccaaagtaatcctcgtcaggaagtccccgcgctcgtcgacggggacacacacatcttcgactcgaccatcatcctgcagtacatcgaggataaatggccatcgcccgctctactaccgtctgatccagcggctagggcgagcgcaagaatgatcgaagaggtgtgcgacactcactatgaggccgtgaactggggattcggcgaagttgactggtttggaaggggagagggggatgtgggggagaagttgaaggaacaggcgggattgcatacgagggatatcatggcttggttaactgagaaacttggggagaatccgtattttggtggggagacgtttgggtatgcggatgtttgtgttgcgccggtcgtgaatcgtagtgtgcataatgggcttggaccggaacagggcagtgcgttgcaggtttggtttgagagggtgaaggggagggatagtgtgaagaagacgtttgaggagtttgatgaggcggttgggaaaattggggggatgaaggatgcttttaagacgggcggagggaagagagagtatagagatcatagattggagtggatggttaagagtggcgggattagtgttgtgttggatgggttgagggatgggaatgtgaggttttcttggccgagaccggagcctccgacgtag

SEQ ID NO: 14723 - protein, 271 aa, Muscodor strobelii
  misc_feature: SGI Peptide ID NO. 564858
  misc_feature (113)..(202): Pfam Id: PF00043 Pfam Desc: Glutathione S-transferase, C-terminal domain
  misc_feature (6)..(81): Pfam Id: PF02798 Pfam Desc: Glutathione S-transferase, N-terminal domain
  misc_feature (8)..(265): NCBI GI: 188582118 Blast Desc: Glutathione S-transferase domain [Methylobacterium populi BJ001] gi|179345616|gb|ACB81028.1| Glutathione S-transferase domain [Methylobacterium populi BJ001]
  misc_feature (8)..(265): NCBI GI: 220922731 Blast Desc: Glutathione S-transferase domain protein [Methylobacterium nodulans ORS 2060] gi|219947338|gb|ACL57730.1| Glutathione S-transferase domain protein [Methylobacterium ORS
  misc_feature (8)..(264): NCBI GI: 154252103 Blast Desc: glutathione S-transferase domain-containing protein [Parvibaculum lavamentivorans DS-1] gi|154156053|gb|ABS63270.1| Glutathione S-transferase domain [Parvibaculum lavamentivorans
  misc_feature (6)..(265): NCBI GI: 114797348 Blast Desc: glutathione S-transferase [Hyphomonas neptunium ATCC 15444] gi|114737522|gb|ABI75647.1| glutathione S-transferase [Hyphomonas neptunium ATCC 15444]
  misc_feature (8)..(225): NCBI GI: 20067419 Blast Desc: glutathione transferase [Triticum aestivum] gi|190684057|gb|ACE82289.1| glutathione transferase [Triticum aestivum]
  misc_feature (8)..(225): NCBI GI: 192911948 Blast Desc: GST6 protein [Elaeis guineensis]
  misc_feature (8)..(225): NCBI GI: 20067415 Blast Desc: glutathione transferase [Triticum aestivum]
  misc_feature (7)..(208): NCBI GI: 11177831 Blast Desc: AF309377_1 glutathione S-transferase OsGSTU5 [Oryza sativa Japonica Group] gi|49387662|dbj|BAD25908.1| GST6 protein [Oryza sativa Japonica Group] gi|50725949|dbj|BAD33477.1| GST6
  misc_feature (7)..(208): NCBI GI: 115478827 Blast Desc: Os09g0367700 [Oryza sativa (japonica cultivar-group)] gi|113631240|dbj|BAF24921.1| Os09g0367700 [Oryza sativa Japonica Group]
  misc_feature (8)..(203): NCBI GI: 257061396 Blast Desc: glutathione S-transferase domain protein [Cyanothece sp. PCC 8802] gi|256591562|gb|ACV02449.1| glutathione S-transferase domain protein [Cyanothece sp. PCC 8802]
  misc_feature (2)..(209): SWISSPROT Homolog: EC 2.5.1.18 Glutathione transferase
  misc_feature: Useful for introducing or modulating the production of volatile compounds
MESSNTKLLLYDHPISSYAQKIRIALREKGLSFTAKTPQGLGSGQHIPSLSQSNPRQEVPALVDGDTHIFDSTIILQYIEDKWPSPALLPSDPAARASARMIEEVCDTHYEAVNWGFGEVDWFGRGEGDVGEKLKEQAGLHTRDIMAWLTEKLGENPYFGGETFGYADVCVAPVVNRSVHNGLGPEQGSALQVWFERVKGRDSVKKTFEEFDEAVGKIGGMKDAFKTGGGKREYRDHRLEWMVKSGGISVVLDGLRDGNVRFSWPRPEPPT

SEQ ID NO: 14724 - DNA, 1799 bp, Muscodor strobelii
  misc_feature: SGI EST ID NO. CUFF.35307.0
  misc_feature: Variant of the nucleotide sequence at SEQ ID NO 14722
aaacgcgcgactgtgagtcacaaatagacggcgatttgtcagctatgtctatcacatcctcttgcaaagttcctatcttacggagttcctacggagtcccctaccttacctgctggagataagtctgttgtgggagaaaagtaccctgccggcacaaagctctatgatctatatgcgggatgacgtcggacccctcgacggtcgacatcggccctgggtatgaggcccagaatgaacagcattacttctctattagaacatacgaggtctcttacatcctctgtctcttgctgactatacgagtgtatttcatttttgcccatcctccctacatagtatcaaatccccatcatggagtcaagcaacactaagctcctcctctacgaccacccaatctcctcctacgcccaaaaaatccgcatcgcactccgcgaaaaaggcctctccttcaccgccaaaactcctcagggtctcggctcaggccaacacatcccatccctctcccaaagtaatcctcgtcaggaagtccccgcgctcgtcgacggggacacacacatcttcgactcgaccatcatcctgcagtacatcgaggataaatggccatcgcccgctctactaccgtctgatccagcggctagggcgagcgcaagaatgatcgaagaggtgtgcgacactcactatgaggccgtgaactggggattcggcgaagttgactggtttggaaggggagagggggatgtgggggagaagttgaaggaacaggcgggattgcatacgagggatatcatggcttggttaactgagaaacttggggagaatccgtattttggtggggagacgtttgggtatgcggatgtttgtgttgcgccggtcgtgaatcgtagtgtgcataatgggcttggaccggaacagggcagtgcgttgcaggtttggtttgagagggtgaaggggagggatagtgtgaagaagacgtttgaggagtttgatgaggcggttgggaaaattggggggatgaaggatgcttttaagacgggcggagggaagagagagtatagagatcatagattggagtggatggttaagagtggcgggattagtgttgtgttggatgggttgagggatgggaatgtgaggttttcttggccgagaccggagcctccgacgtaggctgttgctggaaggtagtttgttcatatgacataataccagcactaagtggtgttaaccgatatggagactcaaaactaatgaaacagggaccgataatctcttggttgctatatcgaagttagatgtgcagtgactataccgagtgtgatagaagataaatgttgtatgtatgggctggtatgtgctatgccagccaactcgaggtttttgcttggatactcatctgatccggttgaggtattcgtggaaccttctctgtctcttgtatactatgaaatgagaagtctggaagaccaaagccctatttggaattgtcgcgtaggttatgatagcgggatgaaaacgtaaacgcaatgagtcagattcatgaaaggggccaggtaattacgataaatagtatcgaacgtcaacaagtactagatcgcagttgcgacatttgcgttctaatatactataacgctagcacagaaggcaatggcggcaatagagcagctacacatttgtagtgcactggcctagctgggaggactggtgttcatggtcatggggtacggtatccaatcttgacaactgtgtgattgctccatgtcgtcgcatgatagtggtattgagtgaatgagacaatacgt

SEQ ID NO: 14725 - DNA, 1788 bp, Muscodor strobelii
  misc_feature: SGI cDNA ID NO. 564859
  misc_feature: Reduced expression when VOC is produced
  misc_feature: Encodes the peptide sequence at SEQ ID NO 14726
atgaggttctcagcgttttactctgtgttttcaacactactcgttgctggttatgcctctacggcacagccagaagctcggggtgacaatggatcacgatcctgcaaagctttccccggcaccgattcctggccaagcaaagagacatggaaatccttcaatgcctcccttggaggcaaacttatcactccagttgcgccgggagctgtctgccatccaggacagcccacctacgatgccgacaaatgcgtcactgttaccaaacaatgggccacctacgatttccatcaacgggatcccgtatccaacatgtggcagcagttcaacaatgacacctgtctggttaacccaaattttacgtgcagccttgcaggatatccggcctacgtagtgaacgcaacaactgcgaaagatgtccagctaagtctgaagtttgcccaaaaacacaatattcgagttgtcgtcaaaagttcagggcacgattaccaggggcgctcgcaagctcccggtgctctatcgatctgggtccatcacatgcaaggtcctctgcagactcacgattcattcaagcctcaaggttgcgactttacgatcgagggccctgccgttactgcgctcggtggtacacagattggtcagctgtacaatgacttggatgttatcaaccagactatagttggaggaggctcaagatccgttgcggtcggcggttacatcactagcggcggacattcaattcttggacctcactatggcatggcagcagaccaagttttagagatcgagctcgttacaccaacgggcgagcttctgactgccaatgaatgccagaacactgacttattctgggctatgcgaggcggcggtggttcgaccttcggtgttatgacgtccctcacgatgactacacacccctcgcccaagatcgtctctggcatcgtgggaatagtcacctatatccctgatgctccgtatctttgggatatggtggggtacatcatgtctcaaatgccgtatctcgattcccaaggcgtgagtggctacacatacaccgtgacgaattacaccgtgccaattggaaatacgaccataaaggcagcaggagtcggtgggctacttatggtcaccggtacacaggacccgaatattttccagactatctttgatcccatcatcggtcacgtcaactctacttggcccggcacggcggcatctatcaccgtcatgccctatccatcgttcaagtcttggttcgacgttttctacgatcagaacccggcagggtatgatacttgggtagggtcacatctcatggacgccaaatctttgagtaatgctacagctcttggcgaggcctcaaaaattgctcgaaacagcgcatatcttgtggctggcaatggtgtcagaaatgccaagcccaggggaggtagcaatgcggttaatccttcgtggaggaggactgtaatccatgcgactaccggaaaagacttcccaccgcttaatgccacggccagagctgatgcgcagaagtatataaacgacatcgcggcgcctcttcgagcactagcccctgacatgggcgcttatgtaaatgagaactcacccggcgagccgaattgggagcatagtttctggggcgagaactacgaacgtctccttaagatcaagcgcacggttgacccagaggatgtgctgtggtgtcatccttgcgtgggtaacgatagatgggaggtaagaggcgcgaggctttgccgtgttgatggcggctgcgacaacgaatatcaatga

SEQ ID NO: 14726 - protein, 595 aa, Muscodor strobelii
  misc_feature: SGI Peptide ID NO. 564859
  misc_feature (528)..(572): Pfam Id: PF08031 Pfam Desc: Berberine and berberine like
  misc_feature (127)..(274): Pfam Id: PF01565 Pfam Desc: FAD binding domain
  misc_feature (20)..(589): NCBI GI: 116193329 Blast Desc: CHGG_06382 [Chaetomium globosum CBS 148.51] gi|88182295|gb|EAQ89763.1| CHGG_06382 [Chaetomium globosum CBS 148.51]
  misc_feature (32)..(586): NCBI GI: 256723565 Blast Desc: NECHADRAFT_42095 [Nectria haematococca mpVI 77-13-4]
  misc_feature (35)..(586): NCBI GI: 39970703 Blast Desc: MGG_02818 [Magnaporthe grisea 70-15] gi|149210189|ref|XP_001522469.1| MGCH7_ch7g573 [Magnaporthe grisea 70-15] gi|86196528|gb|EAQ71166.1| MGCH7_ch7g573 grisea
  misc_feature (32)..(586): NCBI GI: 256721574 Blast Desc: NECHADRAFT_37407 [Nectria haematococca mpVI 77-13-4]
  misc_feature (24)..(586): NCBI GI: 46116260 Blast Desc: FG03972.1 [Gibberella zeae PH-1]
  misc_feature (35)..(585): NCBI GI: 261353288 Blast Desc: FAD binding domain-containing protein [Verticillium albo-atrum VaMs.102]
  misc_feature (33)..(490): NCBI GI: 171680115 Blast Desc: protein product [Podospora anserina] gi|170939684|emb|CAP64910.1| protein product [Podospora anserina]
  misc_feature (30)..(527): NCBI GI: 145603988 Blast Desc: MGG_14073 [Magnaporthe grisea 70-15] gi|145012097|gb|EDJ96753.1| MGG_14073 [Magnaporthe grisea 70-15]
  misc_feature (35)..(586): NCBI GI: 255954473 Blast Desc: Pc21g09510 [Penicillium chrysogenum Wisconsin 54-1255] gi|211589700|emb|CAP95848.1| Pc21g09510 [Penicillium chrysogenum Wisconsin 54-1255]
  misc_feature (35)..(586): NCBI GI: 242779826 Blast Desc: conserved [Talaromyces stipitatus ATCC 10500] gi|218719614|gb|EED19033.1| conserved [Talaromyces stipitatus ATCC 10500]
  misc_feature: Useful for introducing or modulating the production of volatile compounds
MRFSAFYSVFSTLLVAGYASTAQPEARGDNGSRSCKAFPGTDSWPSKETWKSFNASLGGKLITPVAPGAVCHPGQPTYDADKCVTVTKQWATYDFHQRDPVSNMWQQFNNDTCLVNPNFTCSLAGYPAYVVNATTAKDVQLSLKFAQKHNIRVVVKSSGHDYQGRSQAPGALSIWVHHMQGPLQTHDSFKPQGCDFTIEGPAVTALGGTQIGQLYNDLDVINQTIVGGGSRSVAVGGYITSGGHSILGPHYGMAADQVLEIELVTPTGELLTANECQNTDLFWAMRGGGGSTFGVMTSLTMTTHPSPKIVSGIVGIVTYIPDAPYLWDMVGYIMSQMPYLDSQGVSGYTYTVTNYTVPIGNTTIKAAGVGGLLMVTGTQDPNIFQTIFDPIIGHVNSTWPGTAASITVMPYPSFKSWFDVFYDQNPAGYDTWVGSHLMDAKSLSNATALGEASKIARNSAYLVAGNGVRNAKPRGGSNAVNPSWRRTVIHATTGKDFPPLNATARADAQKYINDIAAPLRALAPDMGAYVNENSPGEPNWEHSFWGENYERLLKIKRTVDPEDVLWCHPCVGNDRWEVRGARLCRVDGGCDNEYQ

SEQ ID NO: 14727 - DNA, 4753 bp, Muscodor strobelii
  misc_feature: SGI EST ID NO. CUFF.35358.1
  misc_feature: Variant of the nucleotide sequence at SEQ ID NO 14725
ccgccatcaagtgcctatatttatgtttatttgcacctgaatatacgggttgtgagctgttctgtttttgtgatcgcgtctcttgtctccatctgagttggtatccgttaatgtggaagttgaggcgttaaaaactacgcccgagatggcatcaggatgatcaggaagtttgcatgctaataatactgctggagcccgatgttcccattcacagatcatgaacttgtgtagtgagacactggaatgaaaaattatcgactgtccacgacccgaatagtatatttctttcgtgagtacctagctaggaagtcaacccgctctcagccttttcacgttagtcattattctccataccaatttacttacggaatcatctcatagcatagtcctagttcatggcgccacgtctacaattggaagaaatgtgaacatttgtactcgaagatatatctcatgatcagcgcaagtctaggccttcccaaatcatgagcatgccggagcaagcgatgccttgccgaggaaataaatcacccatgcataattacacaagtaagtaatggacagagggcgaatcttgacactgtagatcataatgtcctaaagtgcacattctgttctcaacaagagagtgccgttgcgcctcatgtcgcttgacttccagtgttctagggctgatatctatggccaatttctaaccagtgtgcgtcccagtcgtcgcaagaagaaatgcctcagtttccagcatggatttgacaatcgtgactcatctcatgaactattgtgtcgagcgagaaggcaaaatgaaccatgtcgcgaaatgacagtgacgtaggattattgtaatctcgcatatcgcgcagcgttcagcactgccacatgacagttcgagtgatctcaaagccagcggccatctactctcaagataatttatcggaatcgtactcacgcgcaatggaacgcatgaggcgctagaacttttgaaaacaagaatcttctcgacgatgaagggcccaaatgcttgattgaatatgccgtctcggccgaatgccgaacacatggtagcgttagcagctctccgctatgcgccctcattatacctcagtggatccctgccatgatcggtttaacatagagctcgcatagagcttctagaagcgactcaagcttcaaccactccatgccaaggatattattgcttccaggattgttcggtcagtcgaggcgccgccacagctgagttctacaagaccttcgcctcaattgaaggtagtcgtaattgcaacaggcagaaggatagcgcaaggttgtcgctcaactaattcagcaatactccgacctgacttgagtccatcgatgatgctgggataataggcagcaatttagtcagtccattccgctgctggcgacttgcaccagacgcgtagctgaacacgatagggcttagactgaagtcgatcggcagattgctcgccattttatccaatagcacgcgtacatgacaatagttctccatcataaaacggtagcttctgtcctgagaaaccgacgaatacgacccgcactctccaaccaatgtcacaacacccagccagctcaggaagaccgcatgttgactagtctctcatattcgggaatcctagcattgaagtctgccttaggacttgttgatcatctactggctgacgtaaatcgtgtttgctcaatactattagaacctcaattgttccacaatagtctttcgttttactctgtgttttcaacactactcgttgctggttatgcctctacggcacagccagaagctcggggtgacaatggatcacgatcctgcaaagctttccccggcaccgattcctggccaagcaaagagacatggaaatccttcaatgcctcccttggaggcaaacttatcactccagttgcgccgggagctgtctgccatccaggacagcccacctacgatgccgacaaatgcgtcactgttaccaaacaatgggccacctacgatttccatcaacgggatcccgtatccaacatgtggcagcagttcaacaatgacacctgtctggttaacccaaattttacgtgcagccttgcaggatatccggcctacgtagtgaacgcaacaactgcgaaagatgtccagctaagtctgaagtttgcccaaaaacacaatattcgagttgtcgtcaaaagttcagggcacgattaccaggggcgctcgcaagctcccggtgctctatcgatctgggtccatcacatgcaaggtcctctgcagactcacgattcattcaagcctcaaggttgcgactttacgatcgagggccctgccgttactgcgctcggtggtacacagattggtcagctgtacaatgacttggatgttatcaaccagactatagttggaggaggctcaagatccgttgcggtcggcggttacatcactagcggcggacattcaattcttggacctcactatggcatggcagcagaccaagttttagagatcgagctcgttacaccaacgggcgagcttctgactgccaatgaatgccagaacactgacttattctgggctatgcgaggcggcggtggttcgaccttcggtgttatgacgtccctcacgatgactacacacccctcgcccaagatcgtctctggcatcgtgggaatagtcacctatatccctgatgctccgtatctttgggatatggtggggtacatcatgtctcaaatgccgtatctcgattcccaaggcgtgagtggctacacatacaccgtgacgaattacaccgtgccaattggaaatacgaccataaaggcagcaggagtcggtgggctacttatggtcaccggtacacaggacccgaatattttccagactatctttgatcccatcatcggtcacgtcaactctacttggcccggcacggcggcatctatcaccgtcatgccctatccatcgttcaagtcttggttcgacgttttctacgatcagaacccggcagggtatgatacttgggtagggtcacatctcatggacgccaaatctttgagtaatgctacagctcttggcgaggcctcaaaaattgctcgaaacagcgcatatcttgtggctggcaatggtgtcagaaatgccaagcccaggggaggtagcaatgcggttaatccttcgtggaggaggactgtaatccatgcgactaccggaaaagacttcccaccgcttaatgccacggccagagctgatgcgcagaagtatataaacgacatcgcggcgcctcttcgagcactagcccctgacatgggcgcttatgtaaatgagaactcacccggcgagccgaattgggagcatagtttctggggcgagaactacgaacgtctccttaagatcaagcgcacggttgacccagaggatgtgctgtggtgtcatccttgcgtgggtaacgatagatgggaggtaagaggcgcgaggctttgccgtgttgatggcggctgcgacaacgaatatcaatgactatttggaaggatcaagtccctattcaccgtcatatatgagctggaatggactcatgtatatcattccctgagcgatgcattgtactaggtatcagatatttacagtcctttgtagctccacatacgtcaaactaatgactgcacgatcaatttacctcttagcaggtaatttctcaaggacagcagcagaacctgtgatctcaaaatcccacgctgcgcgatcatcgatatcaatgaccagcttatacttcgccggccacagcgtcaaagcacctgcttggtcactcctcgcaatgctaccaatcttgatatccaaagtccccgtcgcagtatctccgggcttgatatcatggatccttgtgaaagccacaagactcttgatgggataaggagccggcccatactcgcctttaagaaacccaagaactacgtaatcggacgttgtgtttcctgtgtttgttactgagactgggatggaggttaaagggtagagatctgtgtagtttgtgcctccactgttctggtcttttgatgttaggtctgcggttgagaatgtcgcgggcagattgcttggtaaagagacattgaaggttgtgtagtgcagcccgtggccaaaagggaatacgggcgtcttggagtaccatttgtatgtgcgcccagaattcccactccccgactgcaaactcatattcgtcatcgggacctgattaacataatcgcccgggtattgtgtaaccggtagtcttccagcgggtgccttatcccccgtcaggatgctcacaacagctgtcccaccactttgacccggatatccagcccaaagcaacgagtcgacattgccatccgccacgagcgcggtgctatcaaccatagtacccatttgcacgacaatgaagggtttccctgctgctgctgcaccgagctgttgaatgagactgacttgattcccgggccaggtaatctgctctcgatctttatcctctgcctcaatgctcgtatcgatacctcctacatacaccgtcgcatcggcagctttcgcgagattaacggctgcggagaatccagaagtagatgtgcctgtgatcgtggttccctgtgcgttcgtcacttggaagccagcggctttgaaagcatcgacgacagtggtaacactctgtgctgtcccatctggtagccagaaaggtattgggttagttaatttttacgactatttgcggggccgccgtttttaagacaa

SEQ ID NO: 14728 - DNA, 2307 bp, Muscodor strobelii
  misc_feature: SGI cDNA ID NO. 564860
  misc_feature: Elevated expression when VOC is produced
  misc_feature: Encodes the peptide sequence at SEQ ID NO 14729
atgccgctgatgtttggaatatctgtcgagggcacaatggacgtcgaaattgaagttgtaattggatgcactcacctagcatcaaacaaagtatgcgacacgactctcgatccgtggacgcgcgccgcggcgcttgtggcggcgtttacaacgagcgagaagatctccaactcctgggacaatagccctggggtgtcacgcctcgggctacccgcttatgaatggtggcaggaagcactccatggtgtcgctcgatcgcgaggcgttcagttcgcctcatcgggcgagttctcctatgcgacatcattcccacagcccataattatgggcgccgcgttcgatatgccgctcatcaactccgtcgccactgtgacctccaccgaagcccgcgctttcagcaacgccggccgctgtggtctgaatttctggacgccgaatatcaatccattccgtgacccaagatggggccgagggcaagaagtaccgtccgaggatccgtatcatatgtcgcagtacgttatgcaactcattccggctttacaagggggcttgaaagcagacccttattacaaattggttgctacctgtaagcactacgctggctacgatatggagaattggaagggaaatcagagatatgggttcgatgccaaaatctcgattcaggatctgcaagactactttctcaagccctttagagcgtgtgtgagggatgcgaatgtgcagagtgttatgtgtagttataatgctgttaatggtgtgccaacttgcgccgatccatggttattgcaggatgtgttacgcggtctgtatggcttcacaagtgaggatcgatgggtcacagctgattgcgatgccctcggcaacgtttggactgatcaccactatggcggatctgccgcggctgcagcagcagcatcactgaatgccggcactgatttagactgtggccaattctggcctcagaacttgccgtcggcatatagctccaaactgtttaacgacactgttcttgatcgctcactgatccgtcgttatgcatccatggtaaggcttggctggtttgatgcagcggcgaaccagccctacagaaaactagcatggagcaatgtcgcgacagcggacgcaaagaacctcgcccttctcgctgcagaagaaggacttgtgttgttaaagaacaacggaacgacgaaattgccgttatctaagacaaccatcaaaagcgtggcggttataggacctttagcgacggctacgacacagatgcaaggcaattactgtgacctaacctatgggacagcacagagtgttaccactgtcgtcgatgctttcaaagccgctggcttccaagtgacgaacgcacagggaaccacgatcacaggcacatctacttctggattctccgcagccgttaatctcgcgaaagctgccgatgcgacggtgtatgtaggaggtatcgatacgagcattgaggcagaggataaagatcgagagcagattacctggcccgggaatcaagtcagtctcattcaacagctcggtgcagcagcagcagggaaacccttcattgtcgtgcaaatgggtactatggttgatagcaccgcgctcgtggcggatggcaatgtcgactcgttgctttgggctggatatccgggtcaaagtggtgggacagctgttgtgagcatcctgacgggggataaggcacccgctggaagactaccggttacacaatacccgggcgattatgttaatcaggtcccgatgacgaatatgagtttgcagtcggggagtgggaattctgggcgcacatacaaatggtactccaagacgcccgtattcccttttggccacgggctgcactacacaaccttcaatgtctctttaccaagcaatctgcccgcgacattctcaaccgcagacctaacatcaaaagaccagaacagtggaggcacaaactacacagatctctaccctttaacctccatcccagtctcagtaacaaacacaggaaacacaacgtccgattacgtagttcttgggtttcttaaaggcgagtatgggccggctccttatcccatcaagagtcttgtggctttcacaaggatccatgatatcaagcccggagatactgcgacggggactttggatatcaagattggtagcattgcgaggagtgaccaagcaggtgctttgacgctgtggccggcgaagtataagctggtcattgatatcgatgatcgcgcagcgtgggattttgagatcacaggttctgctgctgtccttgagaaattacctgctaagaggtaa

SEQ ID NO: 14729 - protein, 768 aa, Muscodor strobelii
  misc_feature: SGI Peptide ID NO. 564860
  misc_feature (62)..(317): Pfam Id: PF00933 Pfam Desc: Glycosyl hydrolase family 3 N terminal domain
  misc_feature (388)..(623): Pfam Id: PF01915 Pfam Desc: Glycosyl hydrolase family 3 C terminal domain
  misc_feature (26)..(768): NCBI GI: 156062754 Blast Desc: SS1G_01493 [Sclerotinia sclerotiorum 1980] gi|154696829|gb|EDN96567.1| SS1G_01493 [Sclerotinia sclerotiorum 1980]
  misc_feature (26)..(767): NCBI GI: 154313073 Blast Desc: BC1G_05538 [Botryotinia fuckeliana B05.10] gi|150849623|gb|EDN24816.1| BC1G_05538 [Botryotinia fuckeliana B05.10]
  misc_feature (26)..(748): NCBI GI: 242216161 Blast Desc: beta-xylosidase [Postia placenta Mad-698-R] gi|220726990|gb|EED80923.1| beta-xylosidase [Postia placenta Mad-698-R]
  misc_feature (26)..(765): NCBI GI: 115436902 Blast Desc: conserved [Aspergillus terreus NIH2624] gi|114188489|gb|EAU30189.1| conserved [Aspergillus terreus NIH2624]
  misc_feature (26)..(765): NCBI GI: 238508313 Blast Desc: beta-xylosidase, [Aspergillus flavus NRRL3357] gi|220688872|gb|EED45224.1| beta-xylosidase, [Aspergillus flavus NRRL3357]
  misc_feature (26)..(765): NCBI GI: 169784526 Blast Desc: [Aspergillus oryzae RIB40] gi|83775471|dbj|BAE65591.1| protein product [Aspergillus oryzae]
  misc_feature (26)..(765): NCBI GI: 70986056 Blast Desc: beta-xylosidase [Aspergillus fumigatus Af293] gi|66846158|gb|EAL86491.1| beta-xylosidase, [Aspergillus fumigatus Af293] gi|159128339|gb|EDP53454.1| beta-xylosidase
  misc_feature (26)..(765): NCBI GI: 242813865 Blast Desc: beta-xylosidase, [Talaromyces stipitatus ATCC 10500] gi|218714592|gb|EED14015.1| beta-xylosidase, [Talaromyces stipitatus ATCC 10500]
  misc_feature (11)..(765): NCBI GI: 119473971 Blast Desc: beta-xylosidase [Neosartorya fischeri NRRL 181] gi|119407014|gb|EAW16964.1| beta-xylosidase [Neosartorya fischeri NRRL 181]
  misc_feature (34)..(765): NCBI GI: 189203341 Blast Desc: beta-xylosidase [Pyrenophora tritici-repentis Pt-1C-BFP] gi|187985105|gb|EDU50593.1| beta-xylosidase [Pyrenophora tritici-repentis Pt-1C-BFP]
  misc_feature (26)..(628): SWISSPROT Homolog: EC 3.2.1.37 Xylan 1,4-beta-xylosidase
  misc_feature: Useful for introducing or modulating the production of volatile compounds
MPLMFGISVEGTMDVEIEVVIGCTHLASNKVCDTTLDPWTRAAALVAAFTTSEKISNSWDNSPGVSRLGLPAYEWWQEALHGVARSRGVQFASSGEFSYATSFPQPIIMGAAFDMPLINSVATVTSTEARAFSNAGRCGLNFWTPNINPFRDPRWGRGQEVPSEDPYHMSQYVMQLIPALQGGLKADPYYKLVATCKHYAGYDMENWKGNQRYGFDAKISIQDLQDYFLKPFRACVRDANVQSVMCSYNAVNGVPTCADPWLLQDVLRGLYGFTSEDRWVTADCDALGNVWTDHHYGGSAAAAAAASLNAGTDLDCGQFWPQNLPSAYSSKLFNDTVLDRSLIRRYASMVRLGWFDAAANQPYRKLAWSNVATADAKNLALLAAEEGLVLLKNNGTTKLPLSKTTIKSVAVIGPLATATTQMQGNYCDLTYGTAQSVTTVVDAFKAAGFQVTNAQGTTITGTSTSGFSAAVNLAKAADATVYVGGIDTSIEAEDKDREQITWPGNQVSLIQQLGAAAAGKPFIVVQMGTMVDSTALVADGNVDSLLWAGYPGQSGGTAVVSILTGDKAPAGRLPVTQYPGDYVNQVPMTNMSLQSGSGNSGRTYKWYSKTPVFPFGHGLHYTTFNVSLPSNLPATFSTADLTSKDQNSGGTNYTDLYPLTSIPVSVTNTGNTTSDYVVLGFLKGEYGPAPYPIKSLVAFTRIHDIKPGDTATGTLDIKIGSIARSDQAGALTLWPAKYKLVIDIDDRAAWDFEITGSAAVLEKLPAKR

SEQ ID NO: 14730 - DNA, 1104 bp, Muscodor strobelii
  misc_feature: SGI EST ID NO. CUFF.35085.0
  misc_feature: Variant of the nucleotide sequence at SEQ ID NO 14728
ggacaatagccctggggtgtcacgcctcgggctacccgcttatgaatggtggcaggaagcactccatggtgtcgctcgatcgcgaggcgttcagttcgcctcatcgggcgagttctcctatgcgacatcattcccacagcccataattatgggcgccgcgttcgatatgccgctcatcaactccgtcgccactgtgacctccaccgaagcccgcgctttcagcaacgccggccgctgtggtctgaatttctggacgccgaatatcaatccattccgtgacccaagatggggccgagggcaagaagtaccgtccgaggatccgtatcatatgtcgcagtacgttatgcaactcattccggctttacaagggggcttgaaagcagacccttattacaaattggttgctacctgtaagcactacgctggctacgatatggagaattggaagggaaatcagagatatgggttcgatgccaaaatctcgattcaggatctgcaagactactttctcaagccctttagagcgtgtgtgagggatgcgaatgtgcagagtgttatgtgtagttataatgctgttaatggtgtgccaacttgcgccgatccatggttattgcaggatgtgttacgcggtctgtatggcttcacaagtgaggatcgatgggtcacagctgattgcgatgccctcggcaacgtttggactgatcaccactatggcggatctgccgcggctgcagcagcagcatcactgaatgccggcactgatttagactgtggccaattctggcctcagaacttgccgtcggcatatagctccaaactgtttaacgacactgttcttgatcgctcactgatccgtcgttatgcatccatggtaaggcttggctggtttgatgcagcggcgaaccagccctacagaaaactagcatggagcaatgtcgcgacagcggacgcaaagaacctcgcccttctcgctgcagaagaaggacttgtgttgttaaagaacaacggaacgacgaaattgccgttatctaagacaaccatcaaaagcgtggcggttataggacctttagcgacggctacgacacagatgcaaggcaattactg

SEQ ID NO: 14731 - DNA, 1140 bp, Muscodor strobelii
  misc_feature: SGI cDNA ID NO. 564861
  misc_feature: Encodes the peptide sequence at SEQ ID NO 14732
atggcgacgagtttgggagtatggtccggctgttggggctacatagcgtccctaatagttctcggcctactagctagcctagcagtatttcttcgcttctggtcgagatacacatcgctggttggaacacgttcggacgacctactagccctggcggcactattatttcatcatggattgacggcgtcaatcataaccgcttttctgaagttcaatctgggctatgatatcgcgacgaaaaatgctattgatccgaatagtgaacacaggctccagaagcttacaattgctggaacccttctgtacggtttcagtatcaccgctcttcgactttcggtcatcgttttctatcttcgcatctttccggctcggacgctgcggcgtaccggcttcactctaattataatatgtatggcctggtttatcacgatagaaggcatcactctcgcaaattgcacaccaatctccttcaattgggacaagacgataccaggccgttgtatcagctctgcaggtgcagtcgtcgttattgcagcgaccaatgtcctggttgacgccgttacagtggggctaccaatacatgaagtcttgaagctggagttgtcaaaacagaagaaatacatcattatctgcatctttctcatcgcagggctggcgaccatcgcagctctgggaagattgattgccatactgctttatttgcaatacgatacgaagtcaaatggctcaacaaccgctgctttggctgctatcagtggctatgagatctatattgcgctaataggagcttgcctcccgacccttactcccgtcgtaaagaaacttcgaggacatctgagaggcagcgactcaccgatcccgcattctggcttcacatcgagacaaccgaccaaatcatcacatgcatacacgaacacatcagaaaactctggaaggaggtatcttaaaggagacgaagatgaagagaggccactcaaaccattggatgaggtgcacaaacttgtaccggccaagagtcgtggcgagttttggatagacataagcggccgcggacggccaccctcttcgactggagtaccactcgctgggatacgggtgcagcgtgaacttcaatggaaagaaatagagagttcatcatag

SEQ ID NO: 14732 - protein, 379 aa, Muscodor strobelii
  misc_feature: SGI Peptide ID NO. 564861
  misc_feature (20)..(274): NCBI GI: 46102717 Blast Desc: FG00057.1 [Gibberella zeae PH-1]
  misc_feature (13)..(371): NCBI GI: 154313039 Blast Desc: BC1G_05521 [Botryotinia fuckeliana B05.10] gi|150849606|gb|EDN24799.1| BC1G_05521 [Botryotinia fuckeliana B05.10]
  misc_feature (16)..(374): NCBI GI: 115395874 Blast Desc: conserved [Aspergillus terreus NIH2624] gi|114193145|gb|EAU34845.1| conserved [Aspergillus terreus NIH2624]
  misc_feature (16)..(328): NCBI GI: 145236936 Blast Desc: An07g00220 [Aspergillus niger] gi|134075580|emb|CAK39246.1| protein product [Aspergillus niger]
  misc_feature (15)..(371): NCBI GI: 156051376 Blast Desc: SS1G_07095 [Sclerotinia sclerotiorum 1980] gi|154704873|gb|EDO04612.1| SS1G_07095 [Sclerotinia sclerotiorum 1980]
  misc_feature (15)..(374): NCBI GI: 146324882 Blast Desc: conserved [Aspergillus fumigatus Af293] gi|129556612|gb|EAL86807.2| conserved [Aspergillus fumigatus Af293]
  misc_feature (16)..(284): NCBI GI: 212535402 Blast Desc: integral membrane protein, [Penicillium marneffei ATCC 18224] gi|210070256|gb|EEA24346.1| integral membrane protein, [Penicillium marneffei ATCC 18224]
  misc_feature (24)..(374): NCBI GI: 119483176 Blast Desc: NFIA_027930 [Neosartorya fischeri NRRL 181] gi|119409771|gb|EAW19719.1| conserved [Neosartorya fischeri NRRL 181]
  misc_feature (15)..(281): NCBI GI: 242792941 Blast Desc: integral membrane protein, [Talaromyces stipitatus ATCC 10500] gi|218718648|gb|EED18068.1| integral membrane protein, [Talaromyces stipitatus ATCC 10500]
  misc_feature (15)..(374): NCBI GI: 67900490 Blast Desc: AN7232.2 [Aspergillus nidulans FGSC A4] gi|40742089|gb|EAA61279.1| AN7232.2 [Aspergillus nidulans FGSC A4] gi|259483424|tpe|CBF78803.1| TPA: conserved [Aspergillus FGSC
MATSLGVWSGCWGYIASLIVLGLLASLAVFLRFWSRYTSLVGTRSDDLLALAALLFHHGLTASIITAFLKFNLGYDIATKNAIDPNSEHRLQKLTIAGTLLYGFSITALRLSVIVFYLRIFPARTLRRTGFTLIIICMAWFITIEGITLANCTPISFNWDKTIPGRCISSAGAVVVIAATNVLVDAVTVGLPIHEVLKLELSKQKKYIIICIFLIAGLATIAALGRLIAILLYLQYDTKSNGSTTAALAAISGYEIYIALIGACLPTLTPVVKKLRGHLRGSDSPIPHSGFTSRQPTKSSHAYTNTSENSGRRYLKGDEDEERPLKPLDEVHKLVPAKSRGEFWIDISGRGRPPSSTGVPLAGIRVQRELQWKEIESSS

SEQ ID NO: 14733 - DNA, 3791 bp, Muscodor strobelii
  misc_feature: SGI EST ID NO. CUFF.35201.0
  misc_feature: Variant of the nucleotide sequence at SEQ ID NO 14731
gtggaaaccggatgtgcctgttgcttttccatcccgcgcacgttgtgtgtaatattgagcgtgccatgtgccaacaagcgggtaagctgaccatttctgccctgcccgatccgtgtccaatggcacccattccaagtatcggctgcttatgggttgcacgtttctatctgcacaagatcctgccgagccttctacgaccgacgctcgatgaccgataaacccctcctcccctgcctaagtagcctttgacaagccaattatattggccaaacatcgcgcagaggctcgcgatccacacggcttcaggttagttgcttacctctggaatgtgtctcactaaccaggttcaataccacctcggacacgccacctcacccgactatttgcttgtaatgggctggaagtgctatgcatttctagtacatgtagactccgcaccggcatgcgtctgtaatactcgccatgtgttgagtctatctattcttactttccgatagcttccatatttgaaatccaataatttccaccccgttcaaccctgcctaactgccgtgctcgccttgcttacactcgcgagaaccgtgcgcacttggtggcaccggtataggtggtcttcgagaagttcggtaggactcggagacccggagcaagaatactattctgattgttgccgacaacctaattctctccttcttgtccaacgtttggcagttccgatgattttagactagcgtcaaattgctcaacacacgtccacgactcgcatcacgatgcgatggcgacgagtttgggagtatggtccggctgttggggctacatagcgtccctaatagttctcggcctactagctagcctagcagtatttcttcgcttctggtcgagatacacatcgctggttggaacacgttcggacgacctactagccctggcggcactattatttcatcatggattgacggcgtcaatcataaccgcttttctgaagttcaatctgggctatgatatcgcgacgaaaaatgctattgatccgaatagtgaacacaggctccagaagcttacaattgctggaacccttctgtacggtttcagtatcaccgctcttcgactttcggtcatcgttttctatcttcgcatctttccggctcggacgctgcggcgtaccggcttcactctaattataatatgtatggcctggtttatcacgatagaaggcatcactctcgcaaattgcacaccaatctccttcaattgggacaagacgataccaggccgttgtatcagctctgcaggtgcagtcgtcgttattgcagcgaccaatgtcctggttgacgccgttacagtggggctaccaatacatgaagtcttgaagctggagttgtcaaaacagaagaaatacatcattatctgcatctttctcatcgcagggctggcgaccatcgcagctctgggaagattgattgccatactgctttatttgcaatacgatacgaagtcaaatggctcaacaaccgctgctttggctgctatcagtggctatgagatctatattgcgctaataggagcttgcctcccgacccttactcccgtcgtaaagaaacttcgaggacatctgagaggcagcgactcaccgatcccgcattctggcttcacatcgagacaaccgaccaaatcatcacatgcatacacgaacacatcagaaaactctggaaggaggtatcttaaaggagacgaagatgaagagaggccactcaaaccattggatgaggtgcacaaacttgtaccggccaagagtcgtggcgagttttggatagacataagcggccgcggacggccaccctcttcgactggagtaccactcgctgggatacgggtgcagcgtgaacttcaatggaaagaaatagagagttcatcatagagaatggacgtaattcttctcgggccattccgtgccctgcagcaatcaacgtagctgactagcatcccttgcgtccgcgactgcataatggtgaacgctataattaaaacgcgaccctcagccagatttagtggtaacacacgctttataatatctttacaatatcctttcgacactcggctaacgcagttcgcgatcttcgtatctcgctcgtctgacgaccgcagaccatgaagctcgcctatcttacacctccattacacaaaatcaaacgacctccacattaccaaagcgcctaaagaaatggtctataggtctcctcacaccactcccaaagcttctttgcataacccagacccccttcttcttcaagcttcatcgcttccaaaatatcctttcgagttatctccgaatctggtctaatccgaccaaaaggtatgacataagtcccattgtgctccatcttaagctcaggcgacatgcccgcaaacaattccgtatagccaccatagatgggctcagatcgcatcttcagtaagtcgaggacaaaaagaagcgctgctggcgcgccgttgaaagagccagctttgagatttccgggattaatggtaacacttagtatcccgtcatcgccataccgacgagcaaactcccgaccaaggaaccaagatccggctttggaagcaccgtatgtggtcacacggttagtaaagcctttatcaaggacgctgaagtcgataccgtttgtcggcgaatcagagtccattagtccgcttgctagccaaatgactcttgtctgacccggcgatgctactgcggctgcggctctgatctaagggacaaggagttgggtgaagagcaaagtaccgacacagtgtactccgaaaatgacttcgagatcttgtttcgtgcgggtaccgtagggaaggaccatggcgccgacgcctgcgttgttccataggacgtcgagtttagactcttggcttgcgaaggtctcggccgcggatttgacagagcgtagatcagcgaggtcgaggtgtaggaacttcaataaacctcgcccgggagtcattacgggtatgctggcattgattgtgttgattgcgatttccgctttttcctgatgatagttgactgagcatgagcatttcaatagtagtgcgataccacatacctgcgatcttgaggccatgtaaatagtcgccccagttccgaagagaagtttacatagttcgaaaccaataccggcattaccgccagtcactatgaaaacgcggcccttgagcgagcctggtgggatgctcttttcggtgaaggtcggcggcggcggccatgtttgggttttccagttgcgaattttctccatttatctctttcaaaagtctttatccagactgcaggcaaaatgaaccatatgcgacattgtgttgggaaacgtggttgatgatatatgggatcagcaggtccgcactcttgcggactgtgcggagactaagggagttgttgcggcacgacggattaagatgccaaccaggtcaatccatatcgtgtctaagctgcggactattgcttacattgactatattaaattctaaatcccagcacacctggtaacgaacgtgagatctgggttgtcacagaccaaagggaggaacgcgattcacttacatgccgaaggtgacagaatcaacctaaggtagtgcttacaagtatgccgatttacttggaagctctcattcatgtatgcctcgcagtccaacacataaagattttgttgtgtgtttacctagaaattcaacccatatgtgaatcgcaggctgaggttgcggttccaaattactaggacaacctaactagcaacatattccatttcgtt

SEQ ID NO: 14734 - DNA, 471 bp, Muscodor strobelii
  misc_feature: SGI cDNA ID NO. 564862
  misc_feature: Encodes the peptide sequence at SEQ ID NO 14735
atggactctgattcgccgacaaacggtatcgacttcagcgtccttgataaaggctttactaaccgtgtgaccacatacggtgcttccaaagccggatcttggttccttggtcgggagtttgctcgtcggtatggcgatgacgggatactaagtgttaccattaatcccggaaatctcaaagctggctctttcaacggcgcgccagcagcgcttctttttgtcctcgacttactgaagatgcgatctgagcccatctatggtggctatacggaattgtttgcgggcatgtcgcctgagcttaagatggagcacaatgggacttatgtcataccttttggtcggattagaccagattcggagataactcgaaaggatattttggaagcgatgaagcttgaagaagaagggggtctgggttatgcaaagaagctttgggagtggtgtgaggagacctatagaccatttctttag

SEQ ID NO: 14735 - protein, 156 aa, Muscodor strobelii
  misc_feature: SGI Peptide ID NO. 564862
  misc_feature (2)..(153): NCBI GI: 256725683 Blast Desc: NECHADRAFT_81654 [Nectria haematococca mpVI 77-13-4]
  misc_feature (2)..(156): NCBI GI: 46110965 Blast Desc: FG02364.1 [Gibberella zeae PH-1]
  misc_feature (5)..(156): NCBI GI: 119196249 Blast Desc: CIMG_02499 [Coccidioides immitis RS]
  misc_feature (5)..(155): NCBI GI: 240110949 Blast Desc: oxidoreductase,short chain dehydrogenase, [Coccidioides posadasii C735 delta SOWgp]
  misc_feature (1)..(155): NCBI GI: 156066017 Blast Desc: SS1G_01019 [Sclerotinia sclerotiorum 1980] gi|154691878|gb|EDN91616.1| SS1G_01019 [Sclerotinia sclerotiorum 1980]
  misc_feature (26)..(156): NCBI GI: 212545773 Blast Desc: short-chain dehydrogenase, [Penicillium marneffei ATCC 18224] gi|210064560|gb|EEA18655.1| short-chain dehydrogenase, [Penicillium marneffei ATCC 18224]
  misc_feature (26)..(156): NCBI GI: 242801946 Blast Desc: estradiol 17 beta-dehydrogenase, [Talaromyces stipitatus ATCC 10500] gi|218717219|gb|EED16640.1| estradiol 17 beta-dehydrogenase, [Talaromyces stipitatus ATCC 10500]
  misc_feature (5)..(155): NCBI GI: 256719854 Blast Desc: NECHADRAFT_56763 [Nectria haematococca mpVI 77-13-4]
  misc_feature (2)..(156): NCBI GI: 256727198 Blast Desc: NECHADRAFT_32256 [Nectria haematococca mpVI 77-13-4]
  misc_feature (4)..(155): NCBI GI: 212530082 Blast Desc: short-chain dehydrogenase, [Penicillium marneffei ATCC 18224] gi|210074596|gb|EEA28683.1| short-chain dehydrogenase, [Penicillium marneffei ATCC 18224]
MDSDSPTNGIDFSVLDKGFTNRVTTYGASKAGSWFLGREFARRYGDDGILSVTINPGNLKAGSFNGAPAALLFVLDLLKMRSEPIYGGYTELFAGMSPELKMEHNGTYVIPFGRIRPDSEITRKDILEAMKLEEEGGLGYAKKLWEWCEETYRPFL

SEQ ID NO: 14736 - DNA, 501 bp, Muscodor strobelii
  misc_feature: SGI cDNA ID NO. 564863
  misc_feature: Encodes the peptide sequence at SEQ ID NO 14737
atgagtagccagaaaatcgactcgagcactcttcatgacatcactgcgaaggagaaggagctcacgggagaagcccgcccagtcaagggaggtccaacagctcaagcccaaaaacatgttggggaaacaatctcggcccaggctgtctccgacatcaccaaaggcgaaaagaaagtgactgggaacgatgcaccggtcgctgatggccccgcggccatggcgcagagcatccttgaatctcagccaagcgaagcccacagcggaaagcttgactcgagcactatttcgaagatcacggccgccgagaagcagatcactagcgaagatcatgctgtgaagggcggtcccacggcacaagcacagaagcacgctggcgaacccatcaacagcgagatccttcacgacattaccgagggagagaagaagatcactggtggcgaacgtattaaaggaggaccaacttccactgcgcagagtgagctcagcaaaagccgctcatga

SEQ ID NO: 14737 - protein, 166 aa, Muscodor strobelii
  misc_feature: SGI Peptide ID NO. 564863
  misc_feature (1)..(165): NCBI GI: 116793247 Blast Desc: [Picea sitchensis]
  misc_feature (1)..(166): NCBI GI: 169617459 Blast Desc: SNOG_11909 [Phaeosphaeria nodorum SN15] gi|160703414|gb|EAT80953.2| SNOG_11909 [Phaeosphaeria nodorum SN15]
  misc_feature (5)..(166): NCBI GI: 189188446 Blast Desc: [Pyrenophora tritici-repentis Pt-1C-BFP] gi|187972168|gb|EDU39667.1| [Pyrenophora tritici-repentis Pt-1C-BFP]
  misc_feature (83)..(164): NCBI GI: 169617459 Blast Desc: SNOG_11909 [Phaeosphaeria nodorum SN15] gi|160703414|gb|EAT80953.2| SNOG_11909 [Phaeosphaeria nodorum SN15]
MSSQKIDSSTLHDITAKEKELTGEARPVKGGPTAQAQKHVGETISAQAVSDITKGEKKVTGNDAPVADGPAAMAQSILESQPSEAHSGKLDSSTISKITAAEKQITSEDHAVKGGPTAQAQKHAGEPINSEILHDITEGEKKITGGERIKGGPTSTAQSELSKSRS

SEQ ID NO: 14738 - DNA, 369 bp, Muscodor strobelii
  misc_feature: SGI EST ID NO. CUFF.35096.0
  misc_feature: Variant of the nucleotide sequence at SEQ ID NO 14736
ctttcagactctcactatccagctcaagacacgttgcatcccgttcaggtcttattcaatcgaccgccaagatgagtagccagaaaatcgactcgagcactcttcatgacatcactgcgaaggagaaggagctcacgggagaagcccgcccagtcaagggaggtccaacagctcaagcccaaaaacatgttggggaaacaatctcggcccaggctgtctccgacatcaccaaaggcgaaaagaaagtgactgggaacgatgcaccggtcgctgatggccccgcggccatggcgcagagcatccttgaatctcagccaagcgaagcccacagcggaaagcttgactcgagcactatttcgaagatcacgg

SEQ ID NO: 14739 - DNA, 954 bp, Muscodor strobelii
  misc_feature: SGI cDNA ID NO. 564864
  misc_feature: Encodes the peptide sequence at SEQ ID NO 14740
atgggtggccttgtcagatctctcagtgtcgccacaagtctgttgagttgtattaatgcagtcgctattccacgtcagtcattgccaaatcctctatattacttcgcatttggtgattcatatacaacaaccacattcgacaatactggtcctcagccttctgtgtcaaatcctttgggaaatccggctcttggccaagggacgttcacaggcggactgaactacgttggctggctggctacgaaatacaactacacgacggttttcggctatgattttgctattggaggtgctactatcaccgactcgcaagtccctacggcagatccaaatattcacacattcgaggaacaagtgacgcagtacttcgagcctcaatacacttccgggagtgggaagatatggaactctgacaatgccatattctcgattttctttggaatcaatgacattggtctgcctctaacatcagaacctcaatatctcgaggacatgaatgttcgcattccggcgctactagatgcgtatttcgctctttgcgagaacctctataatcaaggagcaaggcgatttatgtttgtcggtgtgccgccgtcggaccggagtccgtatatcaccagtttaggcgctgatgtctcatctacgtacagcaactgggtcaatgcatataatggtcagctcgctcagcgcattactgattttaccggctcgcatactggagctgtaggagcaacgtacgattatcaccgttggatgtctcttgttcttgatagccctgcagactacgggttccctgataacacatgcgttaacagtgatggaacaagctgtatctggtgggatccctatcaccctggcacaaagctgaatgatgccttggcatcaaggatgcagcttgcgatgaacagtctgggttttgatggtagccagccagtaggtggttatttcttttaa

SEQ ID NO: 14740 - protein, 317 aa, Muscodor strobelii
  misc_feature: SGI Peptide ID NO. 564864
  misc_feature (34)..(297): Pfam Id: PF00657 Pfam Desc: GDSL-like Lipase/Acylhydrolase
  misc_feature (24)..(305): NCBI GI: 255943335 Blast Desc: Pc18g06090 [Penicillium chrysogenum Wisconsin 54-1255] gi|211587169|emb|CAP94833.1| Pc18g06090 [Penicillium chrysogenum Wisconsin 54-1255]
  misc_feature (30)..(305): NCBI GI: 115390699 Blast Desc: [Aspergillus terreus NIH2624] gi|114193778|gb|EAU35478.1| [Aspergillus terreus NIH2624]
  misc_feature (22)..(310): NCBI GI: 156061131 Blast Desc: SS1G_02708 [Sclerotinia sclerotiorum 1980] gi|154700112|gb|EDN99850.1| SS1G_02708 [Sclerotinia sclerotiorum 1980]
  misc_feature (21)..(306): NCBI GI: 70988657 Blast Desc: cellulose-binding GDSL lipase/acylhydrolase [Aspergillus fumigatus Af293] gi|66846818|gb|EAL87149.1| cellulose-binding GDSL lipase/acylhydrolase, [Aspergillus Af293]
  misc_feature (21)..(306): NCBI GI: 159128601 Blast Desc: cellulose-binding GDSL lipase/acylhydrolase, [Aspergillus fumigatus A1163]
  misc_feature (33)..(300): NCBI GI: 116204507 Blast Desc: CHGG_10137 [Chaetomium globosum CBS 148.51] gi|88176265|gb|EAQ83733.1| CHGG_10137 [Chaetomium globosum CBS 148.51]
  misc_feature (33)..(312): NCBI GI: 46110949 Blast Desc: FG02356.1 [Gibberella zeae PH-1]
  misc_feature (7)..(305): NCBI GI: 169846160 Blast Desc: CC1G_06005 [Coprinopsis cinerea okayama7#130] gi|116509123|gb|EAU92018.1| CC1G_06005 [Coprinopsis cinerea okayama7#130]
  misc_feature (20)..(306): NCBI GI: 242778066 Blast Desc: cellulose-binding GDSL lipase/acylhydrolase, [Talaromyces stipitatus ATCC 10500] gi|218722781|gb|EED22199.1| cellulose-binding GDSL lipase/acylhydrolase, [Talaromyces ATCC
  misc_feature (32)..(306): NCBI GI: 212537401 Blast Desc: cellulose-binding GDSL lipase/acylhydrolase, [Penicillium marneffei ATCC 18224] gi|210068598|gb|EEA22689.1| cellulose-binding GDSL lipase/acylhydrolase, [Penicillium ATCC
MGGLVRSLSVATSLLSCINAVAIPRQSLPNPLYYFAFGDSYTTTTFDNTGPQPSVSNPLGNPALGQGTFTGGLNYVGWLATKYNYTTVFGYDFAIGGATITDSQVPTADPNIHTFEEQVTQYFEPQYTSGSGKIWNSDNAIFSIFFGINDIGLPLTSEPQYLEDMNVRIPALLDAYFALCENLYNQGARRFMFVGVPPSDRSPYITSLGADVSSTYSNWVNAYNGQLAQRITDFTGSHTGAVGATYDYHRWMSLVLDSPADYGFPDNTCVNSDGTSCIWWDPYHPGTKLNDALASRMQLAMNSLGFDGSQPVGGYFF

SEQ ID NO: 14741 - DNA, 572 bp, Muscodor strobelii
  misc_feature: SGI EST ID NO. CUFF.35105.0
  misc_feature: Variant of the nucleotide sequence at SEQ ID NO 14739
gcgcgagtagtctaaagacagattatagtctctttctgtagtactcatcaatctctagtgtattgcacgttctagttcttacaaaatgggtggccttgtcagatctctcagtgtcgccacaagtctgttgagttgtattaatgcagtcgctattccacgtcagtcattgccaaatcctctatattacttcgcatttggtgattcatatacaacaaccacattcgacaatactggtcctcagccttctgtgtcaaatcctttgggaaatccggctcttggccaagggacgttcacaggcggactgaactacgttggctggctggctacgaaatacaactacacgacggttttcggctatgattttgctattggaggtgctactatcaccgactcgcaagtccctacggcagatccaaatattcacacattcgaggaacaagtgacgcagtacttcgagcctcaatacacttccgggagtgggaagatatggaactctgacaatgccatattctcgattttctttggaatcaatgacattggtctgcctctaacatcagaacctcaatatctcg

SEQ ID NO: 14742 - DNA, 972 bp, Muscodor strobelii
  misc_feature: SGI cDNA ID NO. 564865
  misc_feature: Encodes the peptide sequence at SEQ ID NO 14743
atggcctctctggtacttgtcgcagcgcagatccagactccctggcgaagacctgtcaggaaacgctacaagggtctggctgtatctaaatccgagtttcacacgactcattactctgaggcaacgtcggactgttttatagtaactggaccttatgaaatcgccgctcattctggtgttctcaggcgagtgtcaggactttttaacaaccatttgggcggtgaacttagacccttcacgtcacggctcgtcttacccgacgacatggatccctatgcagtaacattctgcctgaactttgcatatctaggatggaatgggacacttcgagcgtttctcattggaaaggatttcaacgacaaggtcaaacgcttgggaatgtgtctccgtgtctacgaggtggcacagaccctgatgataccactcctcgacaatcttttagaagaaatcgcgcgctgccttccgatgttcgagaacgccgttcactgcgggagatacaaagacgagcatttcgactacctgctcggctatgctcagatgtgcagcaagcttgtagacaaaatcttcgatcgacagcaatcggcttgctttgagccggttctgcgtataatagcacattggttcctggtgcatcaacggtggattggcaccgtgccagcgcattatcggatcatgcaagctttcggcgacttgtatttcatgagatccaatcgttcgaacgacgagtcaagcggaccttcgagtggagattttgacgaccagtcgagcggagtgttgagtgacatttcgagcctggtgaatgagcaatggcctggcccgatgccaactcagcgaattattcaccaaggccccaagctgttgcgccggatggcagctgacgacttgagggagagaaacaggccaggcatgaatgcgatgtttgggtctcgtaatgattacacgacggtaaggttcccattgcccggttactaa

SEQ ID NO: 14743 - protein, 323 aa, Muscodor strobelii
  misc_feature: SGI Peptide ID NO. 564865
MASLVLVAAQIQTPWRRPVRKRYKGLAVSKSEFHTTHYSEATSDCFIVTGPYEIAAHSGVLRRVSGLFNNHLGGELRPFTSRLVLPDDMDPYAVTFCLNFAYLGWNGTLRAFLIGKDFNDKVKRLGMCLRVYEVAQTLMIPLLDNLLEEIARCLPMFENAVHCGRYKDEHFDYLLGYAQMCSKLVDKIFDRQQSACFEPVLRIIAHWFLVHQRWIGTVPAHYRIMQAFGDLYFMRSNRSNDESSGPSSGDFDDQSSGVLSDISSLVNEQWPGPMPTQRIIHQGPKLLRRMAADDLRERNRPGMNAMFGSRNDYTTVRFPLPGY

SEQ ID NO: 14744 - DNA, 588 bp, Muscodor strobelii
  misc_feature: SGI cDNA ID NO. 564866
  misc_feature: Encodes the peptide sequence at SEQ ID NO 14745
atggagatgaccacgcagataatgcaggtccgcttgaccgtccgcactgctatcagttacgagcgtatgggtgtcggtgtaggcatcggtatcacgcagcatggcgaatataccacaggcgctcctcaaacccatcaaatcgctaccaaggaacgcaaaatcgccatcaaacgctcagaggtcatcaaccagaaactcaatacatcggccagagtccacatgcgtagcatccgatacgcattaggcctcgctcgcgcaacgataaaacacgatacactcttagttggtgccgacggaaaacaagtcatagtgctttccaagtcctcagaaactgtccgaataatcaaccatcatatcaagcattcacccgataaagtacaaagcatagaaaaggccagggacggggatttgatcaaaaaggtccttggagtagtcaggcaattgacaaaattgaatgtgcaagtattcatacagatcgctgatcgagacgatacaatgttcaaaaagagcgaggagcgacctgctaccggaggaaatgaaatggaagacgaaaacgtcgtcgtaggcaatggtcccggtctgatctga

SEQ ID NO: 14745 - protein, 195 aa, Muscodor strobelii
  misc_feature: SGI Peptide ID NO. 564866
MEMTTQIMQVRLTVRTAISYERMGVGVGIGITQHGEYTTGAPQTHQIATKERKIAIKRSEVINQKLNTSARVHMRSIRYALGLARATIKHDTLLVGADGKQVIVLSKSSETVRIINHHIKHSPDKVQSIEKARDGDLIKKVLGVVRQLTKLNVQVFIQIADRDDTMFKKSEERPATGGNEMEDENVVVGNGPGLI

SEQ ID NO: 14746 - DNA, 1035 bp, Muscodor strobelii
  misc_feature: SGI cDNA ID NO. 564867
  misc_feature: Encodes the peptide sequence at SEQ ID NO 14747
atgggaaacatattcagtcaattctttttcattcctacacctccaatcacggagaagaattgtccagatcagacagggcgggtcagttacgtcatcgaatgctatcaccgattgggattactgacgcgatctcaggtcttcatcgtcacaggtggttacgccggcgtaggatttgagctgtgtaagatattatatgccaaaaatgcattggtctgggttgcagggcgctccgagtcgaaggctcgagcggccatgtcgcgcattatggaggcagtaccagcgagcaagggtcaactcgaattcctccctctcgatctgtcagatcttggtaccattaagccggctgttgaatctttcattgctcaatcagaccgcctcgatgtcttagtcaacaatgctggagtgatgtaccctcctaagggcagtgtggatactcatggaaacgagttgatgatggggacgaactgccttggtcactacgctctttaccagctcttattgcccatactcactaaaacagccaagtcctcgccgactgccagcgtgcgtgttgcatgggctgcttccattgcagtgcaagtcgattgtccgcagccgcatggcatgatcattgaagacgacggcaagccaactgatcagggtattaatcacaattatggccagacaaaagttgggaacgccttcttcgcaagagagttcgccaagacaacaccggagacgggcattgtccatgtcgcgtttaacccgggtaacctcatgacggagctacaaaggcactggactggactgctatcctggatcacggtgcattttttcgtgtacccggccatctttggagcatatactgaactattctcggcgatcacgcccgaactaacgccagcactaagtggagcatacgtctatccatggggaagagttggcccccttcctgatggagttgaaacggctctgaagacgcaagcacagggcggaccgggtattgctgctaaattcatctcgtggtgtgacagacagacagctgcttatctatga

SEQ ID NO: 14747 - protein, 344 aa, Muscodor strobelii
  misc_feature: SGI Peptide ID NO. 564867
  misc_feature (3)..(343): NCBI GI: 121712447 Blast Desc: conserved [Aspergillus clavatus NRRL 1] gi|119401987|gb|EAW12409.1| conserved [Aspergillus clavatus NRRL 1]
  misc_feature (45)..(343): NCBI GI: 256725372 Blast Desc: NECHADRAFT_45833 [Nectria haematococca mpVI 77-13-4]
  misc_feature (10)..(344): NCBI GI: 239610907 Blast Desc: short-chain dehydrogenase [Ajellomyces dermatitidis ER-3]
  misc_feature (4)..(344): NCBI GI: 225560611 Blast Desc: short-chain dehydrogenase [Ajellomyces capsulatus G186AR]
  misc_feature (12)..(343): NCBI GI: 256719854 Blast Desc: NECHADRAFT_56763 [Nectria haematococca mpVI 77-13-4]
  misc_feature (4)..(344): NCBI GI: 240280835 Blast Desc: short-chain dehydrogenase [Ajellomyces capsulatus H143]
  misc_feature (10)..(344): NCBI GI: 46122791 Blast Desc: FG05773.1 [Gibberella zeae PH-1]
  misc_feature (9)..(344): NCBI GI: 145239881 Blast Desc: An08g04690 [Aspergillus niger] gi|134077101|emb|CAK45442.1| protein product [Aspergillus niger]
  misc_feature (3)..(343): NCBI GI: 256723839 Blast Desc: NECHADRAFT_92295 [Nectria haematococca mpVI 77-13-4]
  misc_feature (10)..(344): NCBI GI: 261206248 Blast Desc: short-chain dehydrogenase [Ajellomyces dermatitidis SLH14081] gi|239592920|gb|EEQ75501.1| short-chain dehydrogenase [Ajellomyces dermatitidis SLH14081]
MGNIFSQFFFIPTPPITEKNCPDQTGRVSYVIECYHRLGLLTRSQVFIVTGGYAGVGFELCKILYAKNALVWVAGRSESKARAAMSRIMEAVPASKGQLEFLPLDLSDLGTIKPAVESFIAQSDRLDVLVNNAGVMYPPKGSVDTHGNELMMGTNCLGHYALYQLLLPILTKTAKSSPTASVRVAWAASIAVQVDCPQPHGMIIEDDGKPTDQGINHNYGQTKVGNAFFAREFAKTTPETGIVHVAFNPGNLMTELQRHWTGLLSWITVHFFVYPAIFGAYTELFSAITPELTPALSGAYVYPWGRVGPLPDGVETALKTQAQGGPGIAAKFISWCDRQTAAYL

SEQ ID NO: 14748 - DNA, 1351 bp, Muscodor strobelii
  misc_feature: SGI EST ID NO. CUFF.35127.0
  misc_feature: Variant of the nucleotide sequence at SEQ ID NO 14746
cttgattagactcagtcctttccctcgtgtaaagatagagcaagatcatcctgaacttgtcatcgttttggctcatcatgggaaacatattcagtcaattctttttcattcctacacctccaatcacggagaagaattgtccagatcagacagggcgggtcttcatcgtcacaggtggttacgccggcgtaggatttgagctgtgtaagatattatatgccaaaaatgcattggtctgggttgcagggcgctccgagtcgaaggctcgagcggccatgtcgcgcattatggaggcagtaccagcgagcaagggtcaactcgaattcctccctctcgatctgtcagatcttggtaccattaagccggctgttgaatctttcattgctcaatcagaccgcctcgatgtcttagtcaacaatgctggagtgatgtaccctcctaagggcagtgtggatactcatggaaacgagttgatgatggggacgaactgccttggtcactacgctctttaccagctcttattgcccatactcactaaaacagccaagtcctcgccgactgccagcgtgcgtgttgcatgggctgcttccattgcagtgcaagtcgattgtccgcagccgcatggcatgatcattgaagacgacggcaagccaactgatcagggtattaatcacaattatggccagacaaaagttgggaacgccttcttcgcaagagagttcgccaagacaacaccggagacgggcattgtccatgtcgcgtttaacccgggtaacctcatgacggagctacaaaggcactggactggactgctatcctggatcacggtgcattttttcgtgtacccggccatctttggagcatatactgaactattctcggcgatcacgcccgaactaacgccagcactaagtggagcatacgtctatccatggggaagagttggcccccttcctgatggagttgaaacggctctgaagacgcaagcacagggcggaccgggtattgctgctaaattcatctcgtggtgtgacagacagacagctgcttatctatgatgaacgcatagatatcttttgtgtagtctgcataattatgttgtctttttctgtaatcccaaaacagatcaccgagacgaaattaacaaatgatgtacgtagatgacgatatacgcgactaatgagctgataagtttggcagaagtttataaacgtgaaacgcaacacagcttaatgtatactaaatgtcactcaatgatccctcttgtaagacgtgatgtttacctttattcagcatacatctaaatatttccatgcgtatctcaacatacgaattatctctttgcctcgcg

SEQ ID NO: 14749 - DNA, 981 bp, Muscodor strobelii
  misc_feature: SGI cDNA ID NO. 564868
  misc_feature: Elevated expression when VOC is produced
  misc_feature: Encodes the peptide sequence at SEQ ID NO 14750
atgggaaacatattcagtcaattctttttcattcctacacctccaatcacggagaagaattgtccagatcagacagggcgggtcttcatcgtcacaggtggttacgccggcgtaggatttgagctgtgtaagatattatatgccaaaaatgcattggtctgggttgcagggcgctccgagtcgaaggctcgagcggccatgtcgcgcattatggaggcagtaccagcgagcaagggtcaactcgaattcctccctctcgatctgtcagatcttggtaccattaagccggctgttgaatctttcattgctcaatcagaccgcctcgatgtcttagtcaacaatgctggagtgatgtaccctcctaagggcagtgtggatactcatggaaacgagttgatgatggggacgaactgccttggtcactacgctctttaccagctcttattgcccatactcactaaaacagccaagtcctcgccgactgccagcgtgcgtgttgcatgggctgcttccattgcagtgcaagtcgattgtccgcagccgcatggcatgatcattgaagacgacggcaagccaactgatcagggtattaatcacaattatggccagacaaaagttgggaacgccttcttcgcaagagagttcgccaagacaacaccggagacgggcattgtccatgtcgcgtttaacccgggtaacctcatgacggagctacaaaggcactggactggactgctatcctggatcacggtgcattttttcgtgtacccggccatctttggagcatatactgaactattctcggcgatcacgcccgaactaacgccagcactaagtggagcatacgtctatccatggggaagagttggcccccttcctgatggagttgaaacggctctgaagacgcaagcacagggcggaccgggtattgctgctaaattcatctcgtggtgtgacagacagacagctgcttatctatga

SEQ ID NO: 14750 - protein, 326 aa, Muscodor strobelii
  misc_feature: SGI Peptide ID NO. 564868
  misc_feature (3)..(325): NCBI GI: 121712447 Blast Desc: conserved [Aspergillus clavatus NRRL 1] gi|119401987|gb|EAW12409.1| conserved [Aspergillus clavatus NRRL 1]
  misc_feature (27)..(325): NCBI GI: 256725372 Blast Desc: NECHADRAFT_45833 [Nectria haematococca mpVI 77-13-4]
  misc_feature (10)..(326): NCBI GI: 239610907 Blast Desc: short-chain dehydrogenase [Ajellomyces dermatitidis ER-3]
  misc_feature (4)..(326): NCBI GI: 225560611 Blast Desc: short-chain dehydrogenase [Ajellomyces capsulatus G186AR]
  misc_feature (12)..(325): NCBI GI: 256719854 Blast Desc: NECHADRAFT_56763 [Nectria haematococca mpVI 77-13-4]
  misc_feature (4)..(326): NCBI GI: 240280835 Blast Desc: short-chain dehydrogenase [Ajellomyces capsulatus H143]
  misc_feature (10)..(326): NCBI GI: 46122791 Blast Desc: FG05773.1 [Gibberella zeae PH-1]
  misc_feature (3)..(325): NCBI GI: 256723839 Blast Desc: NECHADRAFT_92295 [Nectria haematococca mpVI 77-13-4]
  misc_feature (10)..(326): NCBI GI: 261206248 Blast Desc: short-chain dehydrogenase [Ajellomyces dermatitidis SLH14081] gi|239592920|gb|EEQ75501.1| short-chain dehydrogenase [Ajellomyces dermatitidis SLH14081]
  misc_feature (9)..(326): NCBI GI: 145239881 Blast Desc: An08g04690 [Aspergillus niger] gi|134077101|emb|CAK45442.1| protein product [Aspergillus niger]
  misc_feature: Useful for introducing or modulating the production of volatile compounds
MGNIFSQFFFIPTPPITEKNCPDQTGRVFIVTGGYAGVGFELCKILYAKNALVWVAGRSESKARAAMSRIMEAVPASKGQLEFLPLDLSDLGTIKPAVESFIAQSDRLDVLVNNAGVMYPPKGSVDTHGNELMMGTNCLGHYALYQLLLPILTKTAKSSPTASVRVAWAASIAVQVDCPQPHGMIIEDDGKPTDQGINHNYGQTKVGNAFFAREFAKTTPETGIVHVAFNPGNLMTELQRHWTGLLSWITVHFFVYPAIFGAYTELFSAITPELTPALSGAYVYPWGRVGPLPDGVETALKTQAQGGPGIAAKFISWCDRQTAAYL

SEQ ID NO: 14751 - DNA, 1351 bp, Muscodor strobelii; identical to SEQ ID NO: 14748
  misc_feature: SGI EST ID NO. CUFF.35127.0
  misc_feature: Variant of the nucleotide sequence at SEQ ID NO 14749

SEQ ID NO: 14752 - DNA, 252 bp, Muscodor strobelii
  misc_feature: SGI cDNA ID NO. 564869
  misc_feature: Encodes the peptide sequence at SEQ ID NO 14753
atgcccggttctcgcagttcgtctcaaactatgtacaacggccagacgtcgtcgaaacaaatccactactattcgacccacagctctgttgcatccggcgcacagagcctcatgatgcaacgtctttctaccttccagagcggaccacatagcacaccccaaccttcctccggctcacctgccgatattgaagcggcatatcgagcgagagcagcggcccggatcgcggcgctttcacctcgactcccttga

SEQ ID NO: 14753 - protein, 83 aa, Muscodor strobelii
  misc_feature: SGI Peptide ID NO. 564869
MPGSRSSSQTMYNGQTSSKQIHYYSTHSSVASGAQSLMMQRLSTFQSGPHSTPQPSSGSPADIEAAYRARAAARIAALSPRLP

SEQ ID NO: 14754 - DNA, 3272 bp, Muscodor strobelii
  misc_feature: SGI EST ID NO. CUFF.35398.0
  misc_feature: Variant of the nucleotide sequence at SEQ ID NO 14752
gagacattgatgctatattcgaaataatatcttcgcatgactggtcatgcacggcacgcagaatggtagaaccgtggatgttctgcatcaatcattactatcggccccacaggcttgctgcacttcggcattccgagtactgtacaacctcctcatcagttcgtgttggacaacacaaccttggggtgtgctcaatatccagttatctgatcctggaggcagaccgatcattggaaactcgcaaatgctgtgtcgaataccacttctcatccgctcgtgagcgcattgcgacgaataggaagagtcccggaagagacccggctacagggataatgcagagaatagggccatgcgtgggcgagcagacaagggtttggcatcatttcgacaagggttggaacaggggtttaagccgtcagcttggtaaatggacacgatgatctggacacaagctatcctcactgtcatacataaagagtcagattcccgccgagttttcattgagggagaattaaaatgttgaaaaagtttcgataacaggcctatggcaaagtgcgtctctcagtcgcaatggcaccactctgcctagagttgcacgagcttgggcatcacttcgacctcgtttcttatgtgaagtcttctcttccctgagccatttatactctttgtcatacatggaaagacagcaagacacttgatcttatcctgttatctggtatcaccacgtgattagtgtcttcccagaatcaaacggcgcctctcttggccgtcacgcttttaccgccttacccgcactcgaacgcgattgggaacagaaggtcgctgaaagtcctgcagcagagtccttggatgcctcgaactgagggcgacgcacagatttcccaactcgaccggccacaatgcatcactcgagtggcaagttgatgtttccatcaccacccaggctaatcagacagccaccacgaaacgagggaggcgaagtgcagcaacaaacaggattttccacatcgatcatgcatcacaaggtctcgtgagcccgatctccatgctgctatctgcaggattcgagttctgccttgttggatgcgtcttgcataggttgccccatttccttggttgccttcgaatgactaccccgctttgatctgcaccggctccttttcgttcgcgaacaacgattacagtcctcatctgattcgctgcattatcgaactgcgtgatagaggttcaccactctcaccgagatctcatcaccgtgcaggagcgcgcaccatgaatttttccgcttccagagtcaaactatgctattgatgagccgtgagtcatggggacaatacactgatcctgggactcaacagctcattcacaggtctcggaaccgatttcctcattggcctaggtcgacttccttcagatttggaatgatggctctgccacttgcccggattgtgcgtgctttgagggagcaaagtctggtacgagtgtattgcgcagcgcgcacagtacagtgatggtatctcaccattcgctagcaattcatagggttgcattcttgcaattcgatgaggaacctctcctggctttagtgaccgacgtctattttggacagactactgataactttttaattggtatgaacgctattggtgagaggggaagatgacagctcccaattctgcatcaactcacgctacagtttcggacacgaactaggtgatggctatcctgcacggtgctcgccatgtcacccttcatatgaccccacacgaccgatagtaggagcagatgcgaagctgcatatgcataccttttcgagtatccaatgagacagcctgtcaggaccaacaatatctttaagttgctaagggcttgccgaacagctctgagctttgaaggacttcgttcgaaattctagactcctcactggctcattcggcttcacccgtaccaggatgaatgcatcttcccgtcatgtaggagggttcgcatgctctcgcttcgtaatgaagaatggcgaaataggtcgaatgttggtcggcaaggcaaactgcaatgagttgacggtaccgtgcttcgctctgcattgcggttctacttgtaccggaaaaagcgtcgctgcacctacctgagcaactgtgtatttatttcgcgttcgtccgtgactgatttgtttgaatttgccgtccgcgctcttaacagaagtctgtgattctctcgttcctggaggaatcttaagctctacgcaattcacgtagcaattttatatcttaattccagtctcagaacagccagacctcagattcatcaatattgcatccaatcgtcatgcccggttctcgcagttcgtctcaaactatgtacaacggccagacgtcgtcgaaacaaatccactactattcgacccacagctctgttgcatccggcgcacagagcctcatgatgcaacgtctttctaccttccagagcggaccacatagcacaccccaaccttcctccggctcacctgccgatattgaagcggcatatcgagcgagagcagcggcccggatcgcggcgctttcacctcgactcccttgaacaatgcttaccctcatctaccctgtataacattctggtgctacaacaagcacgacagttgatatatcatcaatcactccagcgtctattgattctctgggttatatgctggcgtaaagtggttccgaatcgacagaatggcgtattgcatcctgagggagctaatgggcggctgctacgccttaacaccggtgtatgaaactacaacagtaaaaatggttgaggttacaacggcattagtgccgactgtgctcttcattcaactaggttgccaatattaacttgtaaaggacgggttattcattgtcagacatctgacataactgcgcagtagcagggttattgacaaaacatccaaagacgtcgcgaagggtctgaatagggaaattgagaaagcccgtcacattgcctcgggtatgcatctgatatcatctatattactcactgctcgtagagctttgagtaaacatacgtgcctagaggattataactttacgctgctacatcaccatttagctatcggatagtcttgttagtgttttatcgatatactctcttagagccttggctgcgaatggccagctagaagcaagtgatatcccaaagcccacaatgtacatcaactgaatatcactctgacttccccaattgcgcaatatcgcttgcgtgtaattcgatttccacttacgagctgc

SEQ ID NO: 14755 - DNA, 945 bp, Muscodor strobelii
  misc_feature: SGI cDNA ID NO. 564870
  misc_feature: Encodes the peptide sequence at SEQ ID NO 14756
atgttgaaggtcgtattgtccgtcgacgatattcgcaaggaagcggaaaagaaattggacagagtgaccacaaccgggatccaagccatggcgcatcccgacggggagctcgccacgagccgagcctgcgctagacgaggcgtcgacatgggcgtctcatcattcgcaaactactctgttgaagaaatcgtcgccgctggtcaagttatagggccagtcgaccatgttatgcagttatacacaatgaaggaccgagggatgcaagagcgaatcatcaaacgtgccgaggcagctggctgcaaggccatttttctaaccgccgatagtcctgtactgggtgttcgatataatgagtggaaagatgattttcggacgcctaaagggcttgatttcccgatgcaggagaaaacgagcgaaatgattcaggctaccacacatgatgacagcttcgttgctttcaattctagcgcacactcgtgggaatacgacataccgtggctaagggcaaggacgaaaatgcaaatttggatcaagggtgttgtgacggccgaagacgtactccttgcgcgagaatatggatgcgatggcgttatagtaagtaaccatggcggcaggcagcttgacgggataccagctacaattgacgctcttccggagtgcgtggaggcagctgatggaaagatacccgttcacattgatggcggcatccgaactggtgcagatatcttcaaggctattgctctaggtgctcattgttgttgggttgggcgacctgcgatttggggcctcgcgtatgatggtgaaaaaggcgtcgacaagatgttagacgtattgtacgatgaattcaaacgatgcatgcagctggcaggttgcaaggatgtttctgaaatcacaaaagcgtctttaggcatcgtgaggccagacggacctctggctagactttga

SEQ ID NO: 14756 - protein, 314 aa, Muscodor strobelii
  misc_feature: SGI Peptide ID NO. 564870
  misc_feature (1)..(304): Pfam Id: PF01070 Pfam Desc: FMN-dependent dehydrogenase
  misc_feature (25)..(304): Pfam Id: PF01070 Pfam Desc: FMN-dependent dehydrogenase
  misc_feature (227)..(250): Pfam Id: PF01645 Pfam Desc: Conserved region in glutamate synthase
  misc_feature (22)..(314): NCBI GI: 238507227 Blast Desc: (S)-2-hydroxy-acid oxidase, [Aspergillus flavus NRRL3357] gi|220689528|gb|EED45879.1| (S)-2-hydroxy-acid oxidase, [Aspergillus flavus NRRL3357]
  misc_feature (22)..(314): NCBI GI: 145231156 Blast Desc: An01g14530 [Aspergillus niger] gi|134055972|emb|CAK44151.1| protein product [Aspergillus niger]
  misc_feature (22)..(314): NCBI GI: 238500638 Blast Desc: oxidoreductase, [Aspergillus flavus NRRL3357] gi|220691790|gb|EED48137.1| oxidoreductase, [Aspergillus flavus NRRL3357]
  misc_feature (22)..(314): NCBI GI: 169782195 Blast Desc: [Aspergillus oryzae RIB40] gi|83774303|dbj|BAE64427.1| protein product [Aspergillus oryzae]
  misc_feature (22)..(314): NCBI GI: 255942469 Blast Desc: Pc18g01590 [Penicillium chrysogenum Wisconsin 54-1255] gi|211586736|emb|CAP94383.1| Pc18g01590 [Penicillium chrysogenum Wisconsin 54-1255]
  misc_feature (27)..(314): NCBI GI: 240108643 Blast Desc: FMN-dependent dehydrogenase family protein [Coccidioides posadasii C735 delta SOWgp]
  misc_feature (22)..(224): NCBI GI: 115397563 Blast Desc: ATEG_05195 [Aspergillus terreus NIH2624] gi|114192564|gb|EAU34264.1| ATEG_05195 [Aspergillus terreus NIH2624]
  misc_feature (27)..(264): NCBI GI: 119186239 Blast Desc: CIMG_03167 [Coccidioides immitis RS]
  misc_feature (23)..(314): NCBI GI: 58266126 Blast Desc: CND02080 [Cryptococcus neoformans var. neoformans JEC21] gi|134111114|ref|XP_775699.1| CNBD4280 [Cryptococcus neoformans var. neoformans B-3501A] gi|50258363|gb|EAL21052.1|
  misc_feature (3)..(314): NCBI GI: 238496005 Blast Desc: FMN-dependent dehydrogenase family protein [Aspergillus flavus NRRL3357] gi|220694118|gb|EED50462.1| FMN-dependent dehydrogenase family protein [Aspergillus flavus
  misc_feature (22)..(312): SWISSPROT Homolog: EC 1.1.3.15 (S)-2-hydroxy-acid oxidase
MLKVVLSVDDIRKEAEKKLDRVTTTGIQAMAHPDGELATSRACARRGVDMGVSSFANYSVEEIVAAGQVIGPVDHVMQLYTMKDRGMQERIIKRAEAAGCKAIFLTADSPVLGVRYNEWKDDFRTPKGLDFPMQEKTSEMIQATTHDDSFVAFNSSAHSWEYDIPWLRARTKMQIWIKGVVTAEDVLLAREYGCDGVIVSNHGGRQLDGIPATIDALPECVEAADGKIPVHIDGGIRTGADIFKAIALGAHCCWVGRPAIWGLAYDGEKGVDKMLDVLYDEFKRCMQLAGCKDVSEITKASLGIVRPDGPLARL

SEQ ID NO: 14757 - DNA, 1767 bp, Muscodor strobelii
  misc_feature: SGI EST ID NO. CUFF.35150.0
  misc_feature: Variant of the nucleotide sequence at SEQ ID NO 14755
aacgagtgtcacaaatgcggattataagaacacagcaccgtcgcgtccgaaaatcggcttgcatcatgaccttgcatccgggcttcgtccactcaaagagtgggtattccggacaaaaggtgcgatgtcacttctaggccccgcattccaacggcgccctatcttggacatgttcggacccgttacatagcatgatgagctggtcgaggtgggggcggcacattcttttgcatccatcgattgaacagtgtctggggaaatatgacaaagagaggaactcgcgcaaaaatcagtgaaggccaaagagaacacactgccaagacagtttcgctaccatgttgaaggtcgtattgtccgtcgacgatattcgcaaggaagcggaaaagaaattggacagagtgaccacaaacttttttaatgacgggtcaactttccaaacgacggtacgggaaaactctacagcatatggcaaatatcgaatcaggccgcgagtgctaagggatgtatcgagagccgatacgagtatcacacttttcgatcgtaaagtcgcattcccattatgtgtatcaccagccgggatccaagccatggcgcatcccgacggggagctcgccacgagccgagcctgcgctagacgaggcgtcgacatgggcgtctcatcattcgcaaactactctgttgaagaaatcgtcgccgctggtcaagttatagggccagtcgaccatgttatgcagttatacacaatgaaggaccgagggatgcaagagcgaatcatcaaacgtgccgaggcagctggctgcaaggccatttttctaaccgccgatagtcctgtactgggtgttcgatataatgagtggaaagatgattttcggacgcctaaagggcttgatttcccgatgcaggagaaaacgagcgaaatgattcaggctaccacacatgatgacagcttcgttgctttcaattctagcgcacactcgtgggaatacgacataccgtggctaagggcaaggacgaaaatgcaaatttggatcaagggtgttgtgacggccgaagacgtactccttgcgcgagaatatggatgcgatggcgttatagtaagtaaccatggcggcaggcagcttgacgggataccagctacaattgacgctcttccggagtgcgtggaggcagctgatggaaagatacccgttcacattgatggcggcatccgaactggtgcagatatcttcaaggctattgctctaggtgctcattgttgttgggttgggcgacctgcgatttggggcctcgcgtatgatggtgaaaaaggcgtcgacaagatgttagacgtattgtacgatgaattcaaacgatgcatgcagctggcaggttgcaaggatgtttctgaaatcacaaaagcgtctttaggcatcgtgaggccagacggacctctggctagactttgatcatagctaagttacgcttgatagacaagatgtcatgacaattggtctaggttgctcggtcttctcggggagagtacatcgtttgttttgtaattagaatcgaataatgatggaccgcatagaactagcaaccccattctaccaagcagcctcgtcaatgtggcagttgcacttccccctttcatagatgtctgcattcaaaattgattgagcgcttggggacatagctcccaaactccacgccagacgcgctgcaagtttacgaggcaaaatgatcggttaactaattatagaattgatcatattgttgtactagtaaata

SEQ ID NO: 14758 - DNA, 1374 bp, Muscodor strobelii
  misc_feature: SGI cDNA ID NO. 564871
  misc_feature: Encodes the peptide sequence at SEQ ID NO 14759
atgtctcaaccaattcctcaaccacctggagtgcccctgctcggcaatatcaaggatgtcaacccagctaacacgtggtggtctttgaaaaaattgcaagaaaaatatggagaaatatttcagatcaaagtgctgggacaaacaattgtcttcgccgcaagcgctgccctcgccgaagaattatgcgatgagaagaggttccggaagtttgtgggaggaccaatcgtcgagattcgggccgcagttcacgatgctctcttcacggccttcgacaacgagcccatgtggggaattgcccaccgtatcatcgcccccaaactgtcgacaacagcgcttgctgactcattcgatgagatgcgggatatcactagtgaattgatggggaaatggaaaggcttaggggcgagcaacaagatttctcccatcggcgaacttaacaggttgaacttagaagttaccacgcaaacgctgtacggcaagaggctaaatggcctgacaggtccagagcatcctatgctgaaagcgatggaagactcaacatccgaggccatacagcgaccgacaaggccaggcttcctcaactggctcttctacggtaggaagttcaagtcagggaccaaggccatgcgggcctacgcagccgaatgcgtgaagtaccgcaaggacaacccaaccaaccgacaggacttgcttgccacacttctcaccgcaaaggaccccgagactggaacaactttgaacgagtcgcaggttattgatgagatggtcagtatgcccattggtagctccaccgccccgtgtctcctagcaaccgtcattctgtttctgttgcagaatcccgaggtagtcacgaaggcccgtcaagagctagataccgtcattggcgacagccagttcaaatttgagcacttatctcagctcaagtatatcgaaggcattatgcgagagggtctccgtctttcgttcgctgcgcccggattcaacatcgagcccatccccaaggaggataaggcaccagtcttgcttggcggtggaaagtatcaaattgctcacaaccaggccgtcattcttgtgcttgccggtgtcaaccgcgatcccgcagttttcaacgagcccttggccttcaaacccgagcgcatgatgggcgagtcatttgacagactgccaatcggagcgaagaaatggtttggcaacggcaagcgagaatgcattggcaagcattgggcggtgcaatttaatatggtcgtcttggccaagatgatcaaggagatagacttcgaggccgttgatcctgcgtactcactggtgcaggacggttggttcaatgtgagaccgattgacttttttgctaaggtcaagccgagagcagcgtag

SEQ ID NO: 14759 - protein, 457 aa, Muscodor strobelii
  misc_feature: SGI Peptide ID NO. 564871
  misc_feature (6)..(452): Pfam Id: PF00067 Pfam Desc: Cytochrome P450
  misc_feature (273)..(379): Pfam Id: PF00067 Pfam Desc: Cytochrome P450
  misc_feature (6)..(248): Pfam Id: PF00067 Pfam Desc: Cytochrome P450
  misc_feature (1)..(454): NCBI GI: 261357242 Blast Desc: bifunctional P-450:NADPH-P450 reductase [Verticillium albo-atrum VaMs.102]
  misc_feature (1)..(455): NCBI GI: 116178832 Blast Desc: CHGG_00044 [Chaetomium globosum CBS 148.51] gi|88184341|gb|EAQ91809.1| CHGG_00044 [Chaetomium globosum CBS 148.51]
  misc_feature (16)..(457): NCBI GI: 171679142 Blast Desc: protein product [Podospora anserina] gi|170937642|emb|CAP62301.1| protein product [Podospora anserina]
  misc_feature (1)..(455): NCBI GI: 85076489 Blast Desc: NCU05006 [Neurospora crassa OR74A] gi|28916966|gb|EAA26697.1| NCU05006 [Neurospora crassa OR74A]
  misc_feature (1)..(455): NCBI GI: 261192005 Blast Desc: cytochrome P450 [Ajellomyces dermatitidis SLH14081] gi|239589726|gb|EEQ72369.1| cytochrome P450 [Ajellomyces dermatitidis SLH14081] gi|239608538|gb|EEQ85525.1| cytochrome
  misc_feature (1)..(455): NCBI GI: 154273326 Blast Desc: conserved [Ajellomyces capsulatus NAm1] gi|150416027|gb|EDN11371.1| conserved [Ajellomyces capsulatus NAm1]
  misc_feature (1)..(455): NCBI GI: 121719038 Blast Desc: cytochrome P450, [Aspergillus clavatus NRRL 1] gi|119404468|gb|EAW14844.1| cytochrome P450, [Aspergillus clavatus NRRL 1]
  misc_feature (1)..(457): NCBI GI: 119499021 Blast Desc: cytochrome P450, [Neosartorya fischeri NRRL 181] gi|119414432|gb|EAW24371.1| cytochrome P450, [Neosartorya fischeri NRRL 181]
  misc_feature (14)..(456): NCBI GI: 226279738 Blast Desc: conserved [Paracoccidioides brasiliensis Pb01]
  misc_feature (14)..(456): NCBI GI: 226289615 Blast Desc: conserved [Paracoccidioides brasiliensis Pb18]
  misc_feature (2)..(449): SWISSPROT Homolog: EC 1.6.2.4 NADPH--hemoprotein reductase
  misc_feature (2)..(449): SWISSPROT Homolog: EC 1.14.14.1 Unspecific monooxygenase
MSQPIPQPPGVPLLGNIKDVNPANTWWSLKKLQEKYGEIFQIKVLGQTIVFAASAALAEELCDEKRFRKFVGGPIVEIRAAVHDALFTAFDNEPMWGIAHRIIAPKLSTTALADSFDEMRDITSELMGKWKGLGASNKISPIGELNRLNLEVTTQTLYGKRLNGLTGPEHPMLKAMEDSTSEAIQRPTRPGFLNWLFYGRKFKSGTKAMRAYAAECVKYRKDNPTNRQDLLATLLTAKDPETGTTLNESQVIDEMVSMPIGSSTAPCLLATVILFLLQNPEVVTKARQELDTVIGDSQFKFEHLSQLKYIEGIMREGLRLSFAAPGFNIEPIPKEDKAPVLLGGGKYQIAHNQAVILVLAGVNRDPAVFNEPLAFKPERMMGESFDRLPIGAKKWFGNGKRECIGKHWAVQFNMVVLAKMIKEIDFEAVDPAYSLVQDGWFNVRPIDFFAKVKPRAA

SEQ ID NO: 14760 - DNA, 2482 bp, Muscodor strobelii
  misc_feature: SGI EST ID NO. CUFF.35155.0
  misc_feature: Variant of the nucleotide sequence at SEQ ID NO 14758
ccgcaattgcggtttcgctattccaaaccccgagaaattcgaaggctagctcaaaagagaatacattacgctggttcttgttcattacctttgtttcacaagcattcatctcgattcttcccagttgtccaactgtatttagtcgaacaaaaaagcggagagattatcgtctaatttccaggctggaggtcggcgccaacttagcatgcataagaatggctagctgcgtacattgtcttacccgaagagaatggcgccggtggttgggttcagctgtgttcaggatccgaaccctctaaaatccccatctcggctggcttggttgcagtttgtgcacaagttcagaggagctaatgcacacacggcagatcactccatggattttcttcgtcagaacatatcaggagctttccattggatctcggtatgcagacatacggtactagcgagacacgaaaagaatagcttgtgaagcttctgacgtggtggcgtttatcgcacagctacataatgatgaagaagccctaggagctctccagtccgtggtggccataaaaaccatcgaattcttttgctgcattacgtattgtttttggttggggcttctcaactttcacactcacatatccgagagtcaacagtcatgtctcaaccaattcctcaaccacctggagtgcccctgctcggcaatatcaaggatgtcaacccagctaacacgtggtggtctttgaaaaaattgcaagaaaaatatggagaaatatttcagatcaaagtgctgggacaaacaattgtcttcgccgcaagcgctgccctcgccgaagaattatgcgatgagaagaggttccggaagtttgtgggaggaccaatcgtcgagattcgggccgcagttcacgatgctctcttcacggccttcgacaacgagcccatgtggggaattgcccaccgtatcatcgcccccaaactgtcgacaacagcgcttgctgactcattcgatgagatgcgggatatcactagtgaattgatggggaaatggaaaggcttaggggcgagcaacaagatttctcccatcggcgaacttaacaggttgaacttagaagttaccacgcaaacgctgtacggcaagaggctaaatggcctgacaggtccagagcatcctatgctgaaagcgatggaagactcaacatccgaggccatacagcgaccgacaaggccaggcttcctcaactggctcttctacggtaggaagttcaagtcagggaccaaggccatgcgggcctacgcagccgaatgcgtgaagtaccgcaaggacaacccaaccaaccgacaggacttgcttgccacacttctcaccgcaaaggaccccgagactggaacaactttgaacgagtcgcaggttattgatgagatggtcagtatgcccattggtagctccaccgccccgtgtctcctagcaaccgtcattctgtttctgttgcagaatcccgaggtagtcacgaaggcccgtcaagagctagataccgtcattggcgacagccagttcaaatttgagcacttatctcagctcaagtatatcgaaggcattatgcgagagggtctccgtctttcgttcgctgcgcccggattcaacatcgagcccatccccaaggaggataaggcaccagtcttgcttggcggtggaaagtatcaaattgctcacaaccaggccgtcattcttgtgcttgccggtgtcaaccgcgatcccgcagttttcaacgagcccttggccttcaaacccgagcgcatgatgggcgagtcatttgacagactgccaatcggagcgaagaaatggtttggcaacggcaagcgagaatgcattggcaagcattgggcggtgcaatttaatatggtcgtcttggccaagatgatcaaggagatagacttcgaggccgttgatcctgcgtactcactggtgcaggacggttggttcaatgtgagaccgattgacttttttgctaaggtcaagccgagagcagcgtagaaccgctaagaattgacggcctcaaacacccgtcggatagcgcctcaaatgctcttcggagctagatcggtctacgatctcgatgtgctagaagtcaagacacgagcagctaggttgagaagaatcgggtgcacgcgtttcatgtctctctcgctcttatgatgatggatgatcaatgagaagacctttgatacctgatttgaaattgataatcgtaatctggatagttaatttaacagtgggtcaatctcaaaacgcagagcgactcccactattgacgctcacgatgatctatgaatcgccttctgaagacaagctcccgttagacagatcttacggctgctcaagaggacctcatcaatcctcggccaacaaatgactgccatcacgcagtatacctcgaacagatcgttatgattgactgcctcggtggtttctcaatctctactgatggtgtacctaatt

SEQ ID NO: 14761 - DNA, 1059 bp, Muscodor strobelii
  misc_feature: SGI cDNA ID NO. 564872
  misc_feature: Reduced expression when VOC is produced
  misc_feature: Encodes the peptide sequence at SEQ ID NO 14762
atgtactccgacttcatcaccaaaaatgcccatcaggtgtcgcaaatcgagagcgcattgcgctccctaacctacatcatccccggtcgcttccgcgatgccgaaatcgcctcggagacggtccactccggcgttcaactcctttcattataccatgatgctgttttgcgccgcgcgatcaacagtattccttcgttaaatacgagaatattaagtccgcatgcgcggtatacgaggttctggacagccaagagcaaagtatatcgcagaatagctttgctattgcaagttgtccagtacacagagctactatgggaaatggccgctaagcgacgaggggaaaaaataaggtggcgtgtagtcattgtcttagaggcactcaaggcgatctgtcgtcttctcttaatgcggatcacaaattcgagacccctcgtcacaccagcactacctgagagggagcctgtaccaaccgaagaagatggctccgaggaagacgcgctcagggaattgatgggagaagagcccggcgttgacggtacttttggctcggcgaaagcggcacaccaaaaggaatgggcgatgccacggacgaaatccaatttacctagcctgccaggcgttggggatgtaagctcataccttcagagccgagttttaacagccgaggacatcaaacccgcagctcagcttcttaacgctctatcaaaatccggccaagctgcggaagcattgcatatactcgcaccattgatatacgcggtggctctatcacaaagcaaagataaaaagtcttgggcgccctggcttcttggcatcaccattgagtacacagcgagacagctacgcgatagaggattccgcagcacatccctggaacaagaagaatgggggaagaggtactgggcggcgggatggtggactatgagaggtgcattctacgaaaacttcactaaaggcatggtggcaggtgttcgccggcgcatgcccagtctagtttctggcatactcgaagactacgaatacctgtgggagaactactactttagtacaagtgcctaa

SEQ ID NO: 14762 - protein, 352 aa, Muscodor strobelii
  misc_feature: SGI Peptide ID NO. 564872
  misc_feature (1)..(346): Pfam Id: PF08610 Pfam Desc: Peroxisomal membrane protein (Pex16)
  misc_feature (2)..(352): NCBI GI: 261353346 Blast Desc: peroxisomal membrane protein pex16 [Verticillium albo-atrum VaMs.102]
  misc_feature (1)..(352): NCBI GI: 116193943 Blast Desc: CHGG_06689 [Chaetomium globosum CBS 148.51] gi|88182602|gb|EAQ90070.1| CHGG_06689 [Chaetomium globosum CBS 148.51]
  misc_feature (2)..(351): NCBI GI: 164422511 Blast Desc: NCU01850 [Neurospora crassa OR74A] gi|157069689|gb|EAA34648.2| NCU01850 [Neurospora crassa OR74A]
  misc_feature (1)..(352): NCBI GI: 171683133 Blast Desc: protein product [Podospora anserina] gi|170941526|emb|CAP67178.1| protein product [Podospora anserina]
  misc_feature (1)..(352): NCBI GI: 256721900 Blast Desc: NECHADRAFT_36934 [Nectria haematococca mpVI 77-13-4]
  misc_feature (1)..(351): NCBI GI: 39955484 Blast Desc: MGG_09011 [Magnaporthe grisea 70-15] gi|149209365|ref|XP_001522057.1| MGCH7_ch7g174 [Magnaporthe grisea 70-15] gi|86196129|gb|EAQ70767.1| MGCH7_ch7g174 grisea
  misc_feature (1)..(352): NCBI GI: 46111845 Blast Desc: FG02804.1 [Gibberella zeae PH-1]
  misc_feature (1)..(351): NCBI GI: 154303206 Blast Desc: BC1G_09623 [Botryotinia fuckeliana B05.10] gi|150855086|gb|EDN30278.1| BC1G_09623 [Botryotinia fuckeliana B05.10]
  misc_feature (1)..(351): NCBI GI: 156058570 Blast Desc: SS1G_03297 [Sclerotinia sclerotiorum 1980] gi|154701084|gb|EDO00823.1| SS1G_03297 [Sclerotinia sclerotiorum 1980]
  misc_feature (1)..(352): NCBI GI: 145238904 Blast Desc: An07g10240 [Aspergillus niger] gi|134076600|emb|CAK45153.1| protein product [Aspergillus niger]
  misc_feature: Useful for introducing or modulating the production of volatile compounds
MYSDFITKNAHQVSQIESALRSLTYIIPGRFRDAEIASETVHSGVQLLSLYHDAVLRRAINSIPSLNTRILSPHARYTRFWTAKSKVYRRIALLLQVVQYTELLWEMAAKRRGEKIRWRVVIVLEALKAICRLLLMRITNSRPLVTPALPEREPVPTEEDGSEEDALRELMGEEPGVDGTFGSAKAAHQKEWAMPRTKSNLPSLPGVGDVSSYLQSRVLTAEDIKPAAQLLNALSKSGQAAEALHILAPLIYAVALSQSKDKKSWAPWLLGITIEYTARQLRDRGFRSTSLEQEEWGKRYWAAGWWTMRGAFYENFTKGMVAGVRRRMPSLVSGILEDYEYLWENYYFSTSA

SEQ ID NO: 14763 - DNA, 3117 bp, Muscodor strobelii
  misc_feature: SGI EST ID NO. CUFF.35158.0
  misc_feature: Variant of the nucleotide sequence at SEQ ID NO 14761
cgaaatatggcccagttcagcccggcacgcctgacagggacagacactcaggaatcaagccgtcggtcgtgtgcgttgtcaatgacgcgaatttccaacaaacccatcattcgtcgccgcttgccttcacttctctaactctcaacacctggcatcgcgtcttttttctgtactactctactctcaatttcgatagatccataccctctcttcttttttgagcccccccacctcgcttctcgattcaaattatccaaccaacattctggaatgcgttgacaacatctatgtctttaccacctgacgctttgcgcacaagcgcttcgcgtcccaaatctgtacaaaaaccaataaacagccttcttggcatgccgccgaagttcttacacatgtactccgacttcatcaccaaaaatgcccatcaggtgtcgcaaatcgagagcgcattgcgctccctaacctacatcatccccggtcgcttccgcgatgccgaaatcgcctcggagacggtccactccggcgttcaactcctttcattataccatgatgctgttttgcgccgcgcgatcaacagtattccttcgttaaatacgagaatattaagtccgcatgcgcggtatacgaggttctggacagccaagagcaaagtatatcgcagaatagctttgctattgcaagttgtccagtacacagagctactatgggaaatggccgctaagcgacgaggggaaaaaataaggtggcgtgtagtcattgtcttagaggcactcaaggcgatctgtcgtcttctcttaatgcggatcacaaattcgagacccctcgtcacaccagcactacctgagagggagcctgtaccaaccgaagaagatggctccgaggaagacgcgctcagggaattgatgggagaagagcccggcgttgacggtacttttggctcggcgaaagcggcacaccaaaaggaatgggcgatgccacggacgaaatccaatttacctagcctgccaggcgttggggatgtaagctcataccttcagagccgagttttaacagccgaggacatcaaacccgcagctcagcttcttaacgctctatcaaaatccggccaagctgcggaagcattgcatatactcgcaccattgatatacgcggtggctctatcacaaagcaaagataaaaagtcttgggcgccctggcttcttggcatcaccattgagtacacagcgagacagctacgcgatagaggattccgcagcacatccctggaacaagaagaatgggggaagaggtactgggcggcgggatggtggactatgagaggtgcattctacgaaaacttcactaaaggcatggtggcaggtgttcgccggcgcatgcccagtctagtttctggcatactcgaagactacgaatacctgtgggagaactactactttagtacaagtgcctaaagctactgtcactgccgcttatgcactttgcaggcctgggctaatggcacttaagcctgggggatgacagaaacgaatttggccgatcagagcccttgcgtttttcaaaaggcaagggataatgggacgtttcacttccccgatcccatatccatgtactgtcaggatctagcgccatacataaactcgagtagagcagttattgtaacgataataatgaaaaagataccctaagccgaatgttccgctgaacccatagatggaagtttgtgatgccacaaggtaccatccctacctacgtacatttcgcatcatcctgatttatctacgagcgagtctttatacccaatgattgatcttgggactcaataagattctcccgacgttgcaatgcgttatccgactctcactgacacgccatgtacctagttattgagctacattcccctgagtccctgaccaatatagtgctgattacgacatatgtgactaaacccccactttgaatgtgcctcaccaactacaactgtaacatcagcctttctcatccttcatagcaatctcattgataacatcatcacccattctcatacgtgcaaaatggaggaaatcttccaaaaatcggtgaaacgcgcaatggaattggccaaaaatctcgattccgtgccttgggagcttgactcgccacatcctcaaaatatctacacctacgacgcaactagcagttcctggaccagcggatcctcggcttcagctcagaacactgataccgaaattacgcatatagcgctttacagctggaatatagatttcatgctccccttcgctaaagaccgtatgagtatcggacttgcacatctacacactcacatctcttctctgcctcccactacagcggcagtgatattcttacaagaatgcttagaggaagatctcgacactatcggagagacaagctgggtaagagacggatttcgggtcacggatatggattctgaagcttgggggtcaagctattatgggaccacgacgctcgtcgacaagagactgaatgtcaatgaggtattcagagtgcattatagtgaatcgaatatgcagcgcgatgctctattcgtcgatgtcagtatcggtctgggaaaggacgagggagggaagactgtaaggctatgcaacacacatctcgaatccctcgtcacaccgctccgcgcacctcaaatcgcacttgtcgcgaagttcatgcttgcgcccgaagtctccggtgcactcgcagcgggagacttcaactccattgctcaatatgacaggacgcttcacagtaagaatgggctgcaggacgtttatctagagcttgggggtaaagaggacagcgacgagggatatacatggggacagcaggctgcgactgtgctgcggaaacaatttgggtgttcgaggatggacaaagtgtatctgagtggtaagctgaaagctgagaagtttgagagattcggtgccgatgttgagcttgaggatgaggagcagaaggaatggatcgaggctttgggcttcgaaaaggcgtggattacggatcatcttggagttatgagtgtggttagtttggatgggttgacatagtggtgtatgattagatcatcgtcgtaagatgaacagatatatttttgcaaagaca

SEQ ID NO: 14764 - DNA, 1014 bp, Muscodor strobelii
  misc_feature: SGI cDNA ID NO. 564873
  misc_feature: Elevated expression when VOC is produced
  misc_feature: Encodes the peptide sequence at SEQ ID NO 14765
atggaggaaatcttccaaaaatcggtgaaacgcgcaatggaattggccaaaaatctcgattccgtgccttgggagcttgactcgccacatcctcaaaatatctacacctacgacgcaactagcagttcctggaccagcggatcctcggcttcagctcagaacactgataccgaaattacgcatatagcgctttacagctggaatatagatttcatgctccccttcgctaaagaccgtatgagtatcggacttgcacatctacacactcacatctcttctctgcctcccactacagcggcagtgatattcttacaagaatgcttagaggaagatctcgacactatcggagagacaagctgggtaagagacggatttcgggtcacggatatggattctgaagcttgggggtcaagctattatgggaccacgacgctcgtcgacaagagactgaatgtcaatgaggtattcagagtgcattatagtgaatcgaatatgcagcgcgatgctctattcgtcgatgtcagtatcggtctgggaaaggacgagggagggaagactgtaaggctatgcaacacacatctcgaatccctcgtcacaccgctccgcgcacctcaaatcgcacttgtcgcgaagttcatgcttgcgcccgaagtctccggtgcactcgcagcgggagacttcaactccattgctcaatatgacaggacgcttcacagtaagaatgggctgcaggacgtttatctagagcttgggggtaaagaggacagcgacgagggatatacatggggacagcaggctgcgactgtgctgcggaaacaatttgggtgttcgaggatggacaaagtgtatctgagtggtaagctgaaagctgagaagtttgagagattcggtgccgatgttgagcttgaggatgaggagcagaaggaatggatcgaggctttgggcttcgaaaaggcgtggattacggatcatcttggagttatgagtgtggttagtttggatgggttgacatag

SEQ ID NO: 14765 - protein, 337 aa, Muscodor strobelii
  misc_feature: SGI Peptide ID NO. 564873
  misc_feature (1)..(335): NCBI GI: 256724147 Blast Desc: NECHADRAFT_64388 [Nectria haematococca mpVI 77-13-4]
  misc_feature (1)..(333): NCBI GI: 169768720 Blast Desc: [Aspergillus oryzae RIB40] gi|83766688|dbj|BAE56828.1| protein product [Aspergillus oryzae]
  misc_feature (1)..(337): NCBI GI: 67524359 Blast Desc: AN2637.2 [Aspergillus nidulans FGSC A4] gi|40743855|gb|EAA63039.1| [Aspergillus nidulans FGSC A4] gi|259486455|tpe|CBF84306.1| TPA: family protein (AFU_orthologue;
  misc_feature (21)..(333): NCBI GI: 238498042 Blast Desc: conserved [Aspergillus flavus NRRL3357] gi|220693530|gb|EED49875.1| conserved [Aspergillus flavus NRRL3357]
  misc_feature (1)..(333): NCBI GI: 46139481 Blast Desc: FG11255.1 [Gibberella zeae PH-1]
  misc_feature (16)..(328): NCBI GI: 169605269 Blast Desc: SNOG_05657 [Phaeosphaeria nodorum SN15] gi|111065601|gb|EAT86721.1| SNOG_05657 [Phaeosphaeria nodorum SN15]
  misc_feature (26)..(327): NCBI GI: 119481595 Blast Desc: endonuclease/exonuclease/phosphatase family protein [Neosartorya fischeri NRRL 181] gi|119408980|gb|EAW18929.1| endonuclease/exonuclease/phosphatase family protein [Neosartorya
  misc_feature (33)..(327): NCBI GI: 159129757 Blast Desc: endonuclease/exonuclease/phosphatase family protein [Aspergillus fumigatus A1163]
  misc_feature (33)..(327): NCBI GI: 71002034 Blast Desc: endonuclease/exonuclease/phosphatase family protein [Aspergillus fumigatus Af293] gi|66853336|gb|EAL93660.1| endonuclease/exonuclease/phosphatase family protein [Aspergillus
  misc_feature (10)..(329): NCBI GI: 169774517 Blast Desc: [Aspergillus oryzae RIB40] gi|83769589|dbj|BAE59724.1| protein product [Aspergillus oryzae]
  misc_feature: Useful for introducing or modulating the production of volatile compounds
MEEIFQKSVKRAMELAKNLDSVPWELDSPHPQNIYTYDATSSSWTSGSSASAQNTDTEITHIALYSWNIDFMLPFAKDRMSIGLAHLHTHISSLPPTTAAVIFLQECLEEDLDTIGETSWVRDGFRVTDMDSEAWGSSYYGTTTLVDKRLNVNEVFRVHYSESNMQRDALFVDVSIGLGKDEGGKTVRLCNTHLESLVTPLRAPQIALVAKFMLAPEVSGALAAGDFNSIAQYDRTLHSKNGLQDVYLELGGKEDSDEGYTWGQQAATVLRKQFGCSRMDKVYLSGKLKAEKFERFGADVELEDEEQKEWIEALGFEKAWITDHLGVMSVVSLDGLT

SEQ ID NO: 14766 - DNA, 3117 bp, Muscodor strobelii; identical to SEQ ID NO: 14763
  misc_feature: SGI EST ID NO. CUFF.35158.0
  misc_feature: Variant of the nucleotide sequence at SEQ ID NO 14764

SEQ ID NO: 14767 - DNA, 543 bp, Muscodor strobelii
  misc_feature: SGI cDNA ID NO. 564874
  misc_feature: Elevated expression when VOC is produced
  misc_feature: Encodes the peptide sequence at SEQ ID NO 14768
atggctgcaaactggtgggaaagcacattatatccttcggatcttttcgtcgaggcttgcggtgccatagtcttcgacagcccgataaatccaaaacgagtctgcctgctatatcatgcccaaagcgacgaatggctccttccgaaaggtagacggaattgcaacgagacacgtcaagcagcggctaggcgagaagtttgcgaagaatccgggtacggcatcacactccgacctttgacacttgccacaagagcaccgtcggagcgggaagacgcggacgtccgagacgcagcccgcacttatgacggcctcacagaacctttcatgctcgacgtccgcgacttgggcagagaaaagggagtcaaactcgtgtggtggtttatcgctgtgctagatggtacgtgtagcgaaggcgaagataaattcaaggcaactttcgttaaatgcgatcgtgcggttgaaagactcacctttcaaaaagaccgagatgttctaaaaagagcgatagatctcatggagcagcagaaggccaattctgtgtag

SEQ ID NO: 14768 - protein, 180 aa, Muscodor strobelii
  misc_feature: SGI Peptide ID NO. 564874
  misc_feature (16)..(171): Pfam Id: PF00293 Pfam Desc: NUDIX domain
  misc_feature (1)..(172): NCBI GI: 70986230 Blast Desc: NUDIX domain [Aspergillus fumigatus Af293] gi|66846238|gb|EAL86571.1| NUDIX domain, [Aspergillus fumigatus Af293] gi|159128248|gb|EDP53363.1| NUDIX domain, [Aspergillus
  misc_feature (8)..(173): NCBI GI: 115401242 Blast Desc: [Aspergillus terreus NIH2624] gi|114190150|gb|EAU31850.1| [Aspergillus terreus NIH2624]
  misc_feature (8)..(175): NCBI GI: 238484577 Blast Desc: NUDIX domain, [Aspergillus flavus NRRL3357] gi|220701577|gb|EED57915.1| NUDIX domain, [Aspergillus flavus NRRL3357]
  misc_feature (13)..(173): NCBI GI: 255947832 Blast Desc: Pc22g06550 [Penicillium chrysogenum Wisconsin 54-1255] gi|211591700|emb|CAP97943.1| Pc22g06550 [Penicillium chrysogenum Wisconsin 54-1255]
  misc_feature (1)..(173): NCBI GI: 238839424 Blast Desc: conserved [Microsporum canis CBS 113480]
  misc_feature (12)..(172): NCBI GI: 169607979 Blast Desc: SNOG_07054 [Phaeosphaeria nodorum SN15] gi|160701529|gb|EAT85705.2| SNOG_07054 [Phaeosphaeria nodorum SN15]
  misc_feature (8)..(109): NCBI GI: 169767664 Blast Desc: [Aspergillus oryzae RIB40] gi|83766158|dbj|BAE56301.1| protein product [Aspergillus oryzae]
  misc_feature (11)..(172): NCBI GI: 170084605 Blast Desc: [Laccaria bicolor S238N-H82] gi|164651078|gb|EDR15318.1| [Laccaria bicolor S238N-H82]
  misc_feature (8)..(173): NCBI GI: 169852670 Blast Desc: [Coprinopsis cinerea okayama7#130] gi|116505811|gb|EAU88706.1| [Coprinopsis cinerea okayama7#130]
  misc_feature (6)..(172): NCBI GI: 240273880 Blast Desc: conserved [Ajellomyces capsulatus H143]
  misc_feature: Useful for introducing or modulating the production of volatile compounds
MAANWWESTLYPSDLFVEACGAIVFDSPINPKRVCLLYHAQSDEWLLPKGRRNCNETRQAAARREVCEESGYGITLRPLTLATRAPSEREDADVRDAARTYDGLTEPFMLDVRDLGREKGVKLVWWFIAVLDGTCSEGEDKFKATFVKCDRAVERLTFQKDRDVLKRAIDLMEQQKANSV

SEQ ID NO: 14769 - DNA, 4591 bp, Muscodor strobelii
  misc_feature: SGI EST ID NO. CUFF.35164.0
  misc_feature: Variant of the nucleotide sequence at SEQ ID NO 14767
gtgcgacaggtttcttttccttttccttctatcatccaatctatcgattggttataaatctgaggagtgttgaagctactacctcattaagcttagtttgctgcttcaaagatggggtagatgcggaaatactcctgagatacgtacaagtacttttagagtcgtggaagtaccgctactactgcccttgcggccggtactttccccacgagccactcacattatgtgtcacctgcgaaagtcacaagcaggtccttgcaaccaccaccaagaggcgtactatcgttagtgcagagtcgcagccactggcttctatctggaatctaatctggcagataaggaagcatcctcgttcatcaacccattctcaatgttgaattgatgcaacaatctcaagaactaattgccaatcctcgatcaatggaaactttttggacatcaatggattaacggctgatggtattagtggggaggtgttgagtggatggattggttgatcctttgagctagacactgccatggcgattgcacggtgccaatggatgaatacttgctgaggcgggaagccaattgctccgattcgaattaacgatgggctaaagggcgacaacgacgcagttgctttcattacagcagcctccaattgattctgcatattgctacttttaggtacctgtgagtgcggacactttcggttccagcgagctgaattcctccggaagcggatttatcagcatcatcattccactccgctctacgcctagattcttcaaaatcggactacacgggaacactgatatcactatcactggaatgttatattcatgtagatccgaaggatccgacaaagcattgctgcaattcattcagggacgtcttcgcaggtttcaacaagatacaattgcttccataaacagcaacttggctcaattgcgtctcgattgcactacttcaaccttcccatccatggtagctccgaggcagatgctgtgtaggcagcttcgccgagagaccaggacttccctacgtacaaatacagatctacatcgcttgctgctagtagtctagtacgctctaacgtatatatgtaatatggcggcggtcgccggagttctatgatcttatttctacgatcttgtcttgaacccaaagatgagccgggacctgccgagtctcgtcagcctctatatagcattgagtggtcgtctacagcagtgttaattcagtgctgtcaatcggccaactcatacagcaacagaataggatatagatatttgaagagtccaatccttactaccaccaggtaacagacaggcaagggggctcgtttcgaatcaattgcaggaatttacactgtcgagtgctcatcctccgctgtacctaatgactccagtgatcaaacgtggggggctaatgagaaccgattaaggcaatttgcaaggaactttcaaaatccgtttcacacctacatttgtcagacctcttctatacaacaagcttaagagtgcctataagtgcctattagaaatatctcgacctctctactgtgctttatcttcagcgtatgcctagccggaaaacagcaataccaatctttcaatgcccatgtagtttactgctttgccccagctcaagtcctcatttacgtacttcatttgaatctcttcatcctgaaatcggtaccttaacccacatagtccgccgctgcaacggtaagcggcgcgaaccttgatagcaatggaccggcccactggtttcaacagatgcgaattcaccgcttgttaccatgctcaacctattgcgttcaccatcgcctagatactcaatccccgttgcccttgcttcaatgtcatcatcaaatgcgcacgttcgtccgcaaaacactatctggatcacaattgatcacacttctcggatgaggtcaatcacttgacctcaagcctcccccctttccaaaacggatggtgatactttatagtcaggcgccacactctatcgaccccagacaagacaagcctcttatctggtggtgtgtttatccactttcacatgtcccctcccgactcgacacccacctcgacaccgcaaagcacttttgattccatgctcgtctgctaatatggtcatgatacattagcggcggttttagacatatgcacctctacccgacatatctgcatgcgcatacatatgtgtccttttgtcgcagcagatatggagtagtgcagctgaagggtagcatcaaaaattacccctccatttatggaacctttgtgtgcaaaatcaaacgcgtttctcatcaaagtcaagagatgagatgcaactaccccgccaacccactgacgttgtctccgtccaccatcagtcggccgcgataagcgcgtcgtcttcattatcgatatagcctgtacctgaggcactttgctgtcgctctactcttcagacttcatggggctgatttgtcggaaaggacttcacttcagtgtggccgaatttaacaatctcaaaatagttcaataaactatcttccaattccccaagatcatcgattccgttgttttgttactgagcatgctatggctacttgctgcattgcgtctttagaatattaatatctcatcgtttccctccgttgaattcatacttctttcccctagcttctacgtgcttgttcatcaattgtccacagtgaccggaatatccagcaaacagtcacgatgcaaaacaggcagtttgtactaagaacggcctgtcaaaaatcctaaacgttttatgtcatcttccccacagtagtcagcctgcatgacctgtaccgttatcgctgttcgcgtgatgctccgcctcaaatggtgctcatcaacacaatgctgttgtcgcgagaagtagaggctagacaggcaacatgggcagcacgtgcaccataactccaccgccgcacgtttagctatgcacgaacactattgcggtcgcttcctacccgcaattgatccgttctggatgaattctatatcgattgacctaccagacgagagcatttgggcgctcggctatgagttccatgcgaaagatggttccagggccttggagacggcgtgctggaatgaggtgtgcggctcagcagcttcgtagcatcaaagcttacgaacgcgttcattttcgccggctccgtatagttcccgctccacgcttatcatgtatcctttgccgatgcgggttcgtcagaccgcgtgccggggaactcctcttgctcaaataatctgacaggcggccgtttcaagagcgacaggttgcagcaggattcttgttgtgtcagcgaagaggtaagattcgtccaatggtgcgtatcttttacagatatgcatgatcacctcgagtgaatcgcgtctggttgaaccactccaggctgcgaatgccctgtaaggtgacacagtggttactttcccatggtctgacatcccgcctcttgtgcttacgactacttccatttccactatttggcgagttggttgaatcaggctccgttgactcgactaatggcagctcgtcttacctcatatcttaatgtgctctcccctcgctgctaatgttccaatatcttatctctcacctacttctatgtgaatgtccacaagttacaagagaatcgacgaaaccatcatccccgcaaagggcacaagccttacacttatgaactatctggctctggtacagcccggaacgttgttttcatagacaggattaccgattcgccagactaacgaatcaaagtttatgtctagacacatcacagcgatcgtcttataagagtgctgaaagaggaggaagtgcacttgacaaaatggctgcaaactggtgggaaagcacattatatccttcggatcttttcgtcgaggcttgcggtgccatagtcttcgacagcccgataaatccaaaacgagtctgcctgctatatcatgcccaaagcgacgaatggctccttccgaaaggtagacggaattgcaacgagacacgtcaagcagcggctaggcgagaagtttgcgaagaatccgggtacggcatcacactccgacctttgacacttgccacaagagcaccgtcggagcgggaagacgcggacgtccgagacgcagcccgcacttatgacggcctcacagaacctttcatgctcgacgtccgcgacttgggcagagaaaagggagtcaaactcgtgtggtggtttatcgctgtgctagatggtacgtgtagcgaaggcgaagataaattcaaggcaactttcgttaaatgcgatcgtgcggttgaaagactcacctttcaaaaagaccgagatgttctaaaaagagcgatagatctcatggagcagcagaaggccaattctgtgtagctatctcaatccgctcagaccatgcaattggatgggactttgagctgacattgaagtattgtcttcattgcgtttcataaccaaaggcggatgacccggatagaagatggtgtgtcacgaccgaaaacggctggcgtcagtatttgagattactgtatcttgactatagttttggccgtgcgcatatatatcaatgatactcaagagcag

SEQ ID NO: 14770 - DNA, 1137 bp, Muscodor strobelii
  misc_feature: SGI cDNA ID NO. 564875
  misc_feature: Encodes the peptide sequence at SEQ ID NO 14771
atggcgcccactttgttgcccaattcttcagactcgaaacccctcgacatcagcaacctaatgtcacccccagaagtcagatacgactcattttctcaaggcagtatgtcaaagccaattgactccacactctctgctgtgcggcagcttccagtacctcatccgcctctgtcgccgcctatctcgcctgccgtcaagagtcatgacaatattctgagcggagatatgtctccttctgcgcacgtaaaagatccaattctatatccgacgcatgacagtgccaattcaccaccccagcagcctctctttgcaccagaggagttagctgatagcacgcaaattgtgaacgatcacgtctctgcccgacctacagagatcttcaaagacacggcgcccccgaagcaggacgactatgagttggccctgtatttcaagtcgcagctcatggcagtgtacctgaagaatcctaagtcgtggctcgacagagaacgagcattcttgaaggcggacaacaaggcgcgggcgcagagccagcgaaacaaacagttcaagctccagccaatcttaccagctaagcctcagactattcgcaaggaagcacagcgacccaaaccagcaaagtcaacaaaagtagtcaagcaaactccgaccaagcctcgacctatcagagctggtcctagccctacagcaatgttgactaaggctcttgcgcgagctcccagtgtcactccagatccctcgccgcgccgtgcaaccgcgccgaacagagtcgacgtggactatgatgcgcttcctgattactgcccacccaaggacagtctcccgaataagccgaatagtctcaaagttgattggaaggggactccgactgacctcagcgacgatcctgatcgccacctgctccatcctgatgaagttctcttagcatccaatttgcggcttagctgcgcaacgtaccttaccagcaagcgacgaattttcattcgccgtttggaatgtctgcgtaccggcaaagaatttcgcagaaccgacgcgcagcaggcctgcaagattgatgtaaacaaagcttcgaaattgtgggcagcatttgagaaagtgaattggctcgacaagtcttgggttttccaattcttgtaa

SEQ ID NO: 14771 - protein, 378 aa, Muscodor strobelii
  misc_feature: SGI Peptide ID NO. 564875
  misc_feature (281)..(371): Pfam Id: PF04433 Pfam Desc: SWIRM domain
  misc_feature (1)..(378): NCBI GI: 256721894 Blast Desc: NECHADRAFT_92207 [Nectria haematococca mpVI 77-13-4]
  misc_feature (19)..(378): NCBI GI: 46111819 Blast Desc: FG02791.1 [Gibberella zeae PH-1]
  misc_feature (13)..(377): NCBI GI: 261353367 Blast Desc: SWIRM domain-containing protein [Verticillium albo-atrum VaMs.102]
  misc_feature (15)..(377): NCBI GI: 156058578 Blast Desc: SS1G_03301 [Sclerotinia sclerotiorum 1980] gi|154701088|gb|EDO00827.1| SS1G_03301 [Sclerotinia sclerotiorum 1980]
  misc_feature (82)..(378): NCBI GI: 116193977 Blast Desc: CHGG_06706 [Chaetomium globosum CBS 148.51] gi|88182619|gb|EAQ90087.1| CHGG_06706 [Chaetomium globosum CBS 148.51]
  misc_feature (13)..(378): NCBI GI: 38636425 Blast Desc: conserved [Neurospora crassa]
  misc_feature (13)..(378): NCBI GI: 164429512 Blast Desc: NCU01862 [Neurospora crassa OR74A] gi|157073507|gb|EAA36257.2| conserved [Neurospora crassa OR74A]
  misc_feature (76)..(374): NCBI GI: 171683175 Blast Desc: protein product [Podospora anserina] gi|170941547|emb|CAP67199.1| protein product [Podospora anserina]
  misc_feature (126)..(377): NCBI GI: 154303194 Blast Desc: BC1G_09617 [Botryotinia fuckeliana B05.10] gi|150855080|gb|EDN30272.1| BC1G_09617 [Botryotinia fuckeliana B05.10]
  misc_feature (17)..(378): NCBI GI: 226283143 Blast Desc: SWIRM domain-containing protein [Paracoccidioides brasiliensis Pb01]
MAPTLLPNSSDSKPLDISNLMSPPEVRYDSFSQGSMSKPIDSTLSAVRQLPVPHPPLSPPISPAVKSHDNILSGDMSPSAHVKDPILYPTHDSANSPPQQPLFAPEELADSTQIVNDHVSARPTEIFKDTAPPKQDDYELALYFKSQLMAVYLKNPKSWLDRERAFLKADNKARAQSQRNKQFKLQPILPAKPQTIRKEAQRPKPAKSTKVVKQTPTKPRPIRAGPSPTAMLTKALARAPSVTPDPSPRRATAPNRVDVDYDALPDYCPPKDSLPNKPNSLKVDWKGTPTDLSDDPDRHLLHPDEVLLASNLRLSCATYLTSKRRIFIRRLECLRTGKEFRRTDAQQACKIDVNKASKLWAAFEKVNWLDKSWVFQFL

SEQ ID NO: 14772 - DNA, 2924 bp, Muscodor strobelii
  misc_feature: SGI EST ID NO. CUFF.35170.0
  misc_feature: Variant of the nucleotide sequence at SEQ ID NO 14770
caaacatgccaaacgcaattctgcactatccagcaccgcctatgcttccagtgcacgtactcattgcaatcgagtgacttgcgacgagataattataatagcaataaggttggtcgcacatttcttctctgggctggaatcggactgactgacctctgactggtgatggatggatgccttgtgtcgccgcgctcccccatcattcctacatcttgctcacgtcctctagggtcatctgtccgtcactatcttattattaggctcctgctcttgcccccaaacttgctctgctctgtttactctacttctttccctttggttccgttaaacttattctcttttattttcctgcgacactgtctgtcttctctcttacctcatccacttcttcctggatcaatgccatagcaaactgttgcaagtgaagtatcagcattgtttgccacttgacgcattcacacaactcccgcccatccgcgatccgccgtttctcgtcagactcggactttaggtcaatcttctccattcggtgttcagaattgacagcttgtacaccccacgctcctgcctagcattggtatttaggaccggtggccaaccaacaaccacaactctgcacattctcgccgcctactctctattgtctacgcgcccattgtgcatgattcacattctcggacaaccgcacaatcggaatagcctggtaccaaactcaaacctactaacaggtctctacctaactccgagatccaaccgcttccctcctgggtacttaatgagtgttggccctccacagactggacgcattcgtctacgaccacaagtattggcagccacaacccgtacaaccaacggcactcaatccccttggttctcccacctgcgcatcttagacattgacaacaactattgcgcccaattgggacaagcaattgagtcactccgcgtgtgaatatcgcgtctgcctgactatcgccacctcggtttcaaggtgtgcaaaccacctgtggctgacaaaccacctcgtccaccgcaaggcaagcttccatggctttcggatctcaaataccaacaaccaacaacacattattctctttctcttccatttcttcatcaacgaccaacaaccgtcccactatggcgcccactttgttgcccaattcttcagactcgaaacccctcgacatcagcaacctaatgtcacccccagaagtcagatacgactcattttctcaaggcagtatgtcaaagccaattgactccacactctctgctgtgcggcagcttccagtacctcatccgcctctgtcgccgcctatctcgcctgccgtcaagagtcatgacaatattctgagcggagatatgtctccttctgcgcacgtaaaagatccaattctatatccgacgcatgacagtgccaattcaccaccccagcagcctctctttgcaccagaggagttagctgatagcacgcaaattgtgaacgatcacgtctctgcccgacctacagagatcttcaaagacacggcgcccccgaagcaggacgactatgagttggccctgtatttcaagtcgcagctcatggcagtgtacctgaagaatcctaagtcgtggctcgacagagaacgagcattcttgaaggcggacaacaaggcgcgggcgcagagccagcgaaacaaacagttcaagctccagccaatcttaccagctaagcctcagactattcgcaaggaagcacagcgacccaaaccagcaaagtcaacaaaagtagtcaagcaaactccgaccaagcctcgacctatcagagctggtcctagccctacagcaatgttgactaaggctcttgcgcgagctcccagtgtcactccagatccctcgccgcgccgtgcaaccgcgccgaacagagtcgacgtggactatgatgcgcttcctgattactgcccacccaaggacagtctcccgaataagccgaatagtctcaaagttgattggaaggggactccgactgacctcagcgacgatcctgatcgccacctgctccatcctgatgaagttctcttagcatccaatttgcggcttagctgcgcaacgtaccttaccagcaagcgacgaattttcattcgccgtttggaatgtctgcgtaccggcaaagaatttcgcagaaccgacgcgcagcaggcctgcaagattgatgtaaacaaagcttcgaaattgtgggcagcatttgagaaagtgaattggctcgacaagtcttgggttttccaattcttgtaactgctacaagattacaaggcagcatccatatcagtagcccaggcggcagtcacgaggtcgactattacagagattataagtttgcccggcaattttgcgccagcgatttgtttttcatttttccttcggtctctttttgacatttacactctctacggtcgtaacagcgtggtcatttccaggggaattcggtttggttctcggcacatcgcagcatcaggggacactcgcattgatacccggagtgcgcagatttccttcttcaaggtcactccactccacatacacagcacagtttctttttacaggtcttcaggatggtcatacggacagctggttggtttcatagttggtttggcatcggaatgataggtcggtcctgtgatcccatcgaggatattgcatcatgtatggcgttctaccagataacctcgcagagtgaaacgccctgctcacttcggattgcttttggtgtttgacgggtttggagaaacccaatcagcgattttcgagggactgcagtatagatcaacgcatctattgtttggctatctagaaagatgccgttctagatcgtgttacatctcatagcaaaatgcccaattcaagatggcataccctcaaatttttgcccctctactaacttcgcg

SEQ ID NO: 14773 - DNA, 891 bp, Muscodor strobelii
  misc_feature: SGI cDNA ID NO. 564876
  misc_feature: Encodes the peptide sequence at SEQ ID NO 14774
atgtcttccagcaccaacagcgccaacaaggccttcacgagagatcacctctttgatctcaaaggccgtgttgcgcttgtcacaggcggtggttcgggtataggtctcatggtcacacagactcttgtcgcaaacggcgcaaaggtgtacatcaccggtcgtacccaagagaagctagatcgcgttgtagagaagtactccgagagcaaagacagtatcatccccattacagcagacatgacatccaaagcagacatcgccaagttagccaaggaaattgaatcacgagaggaatgcctctgcatcttagtgaacaatgcgggcatcaatacttcgaccctgcagacggagtctggatccgcgcaagaaatgaagcagaacctcttcgatgcagacgggtcaacatttgaagactggacaactgtgtacaacactaatgtggcatctctcttcttcaccaccacagcattccttccactgttgcagaaatccacagagcggcatccaggctggtccggcacagtgctcaacattacctcgatttcaggtctggtcaagacggcacagcatcacttccagtacaatgccagtaaggccgctgccaatcatcttactcgcatgcttgcgaccgagatcgcagacaatggcatcaaagttcgcgtcaacgcagttgcacctggtgtctttccaagcgagatgactgcgagcgaaagtggacaggatcagaagagctccatcccgaaggagaaatatgagagcaaggtaccggccgcgcgtcctggacgtgacgaagacatggcacaagccgttctgtccgcagtcgtaaaccaatatgtcaatggacagattatggtgatcgacggcggatacactattgctgctggtcagtaa

SEQ ID NO: 14774 - protein, 296 aa, Muscodor strobelii
  misc_feature: SGI Peptide ID NO. 564876
  misc_feature (23)..(213): Pfam Id: PF00106 Pfam Desc: short chain dehydrogenase
  misc_feature (21)..(60): Pfam Id: PF00107 Pfam Desc: Zinc-binding dehydrogenase
  misc_feature (1)..(296): NCBI GI: 116193979 Blast Desc: CHGG_06707 [Chaetomium globosum CBS 148.51] gi|88182620|gb|EAQ90088.1| CHGG_06707 [Chaetomium globosum CBS 148.51]
  misc_feature (1)..(295): NCBI GI: 38636424 Blast Desc: related to NAD(P)H-dependent oxidoreductase [Neurospora crassa]
  misc_feature (1)..(292): NCBI GI: 85118720 Blast Desc: NCU01861 [Neurospora crassa OR74A] gi|28927302|gb|EAA36256.1| NCU01861 [Neurospora crassa OR74A]
  misc_feature (4)..(295): NCBI GI: 256721929 Blast Desc: [Nectria haematococca mpVI 77-13-4]
  misc_feature (1)..(295): NCBI GI: 171683173 Blast Desc: protein product [Podospora anserina] gi|170941546|emb|CAP67198.1| protein product [Podospora anserina]
  misc_feature (8)..(295): NCBI GI: 154309639 Blast Desc: BC1G_07290 [Botryotinia fuckeliana B05.10] gi|150852313|gb|EDN27505.1| BC1G_07290 [Botryotinia fuckeliana B05.10]
  misc_feature (6)..(295): NCBI GI: 145248007 Blast Desc: An13g01130 [Aspergillus niger] gi|134080999|emb|CAK41513.1| protein product [Aspergillus niger]
  misc_feature (10)..(294): NCBI GI: 46111821 Blast Desc: FG02792.1 [Gibberella zeae PH-1]
  misc_feature (9)..(295): NCBI GI: 121700537 Blast Desc: short-chain dehydrogenase [Aspergillus clavatus NRRL 1] gi|119396676|gb|EAW07107.1| short-chain dehydrogenase [Aspergillus clavatus NRRL 1]
  misc_feature (3)..(295): NCBI GI: 119494241 Blast Desc: short-chain dehydrogenase [Neosartorya fischeri NRRL 181] gi|119412178|gb|EAW22119.1| short-chain dehydrogenase [Neosartorya fischeri NRRL 181]
  misc_feature (18)..(292): SWISSPROT Homolog: EC 1.1.1.100 3-oxoacyl-[acyl-carrier-protein] reductase
MSSSTNSANKAFTRDHLFDLKGRVALVTGGGSGIGLMVTQTLVANGAKVYITGRTQEKLDRVVEKYSESKDSIIPITADMTSKADIAKLAKEIESREECLCILVNNAGINTSTLQTESGSAQEMKQNLFDADGSTFEDWTTVYNTNVASLFFTTTAFLPLLQKSTERHPGWSGTVLNITSISGLVKTAQHHFQYNASKAAANHLTRMLATEIADNGIKVRVNAVAPGVFPSEMTASESGQDQKSSIPKEKYESKVPAARPGRDEDMAQAVLSAVVNQYVNGQIMVIDGGYTIAAGQ

SEQ ID NO: 14775 - DNA, 1478 bp, Muscodor strobelii
  misc_feature: SGI EST ID NO. CUFF.35180.3
  misc_feature: Variant of the nucleotide sequence at SEQ ID NO 14773
taccaatgagagccatcattgcattgcacctgactttcacataaaagaaacattagtaaggtcatgaatccatcattcctccgccgatttgcactccagcacagacgactgtctccaacaactttctcatttttcccaagaagtgcatgctgttctagtatctcccagccggtaatctcatcaatctacagtcaatcaagccatcggaaaccgacctcatctgtccagtttatcaggatgtcttccagcaccaacagcgccaacaaggccttcacgagagatcacctctttgatctcaaaggccgtgttgcgcttgtcacaggcggtggttcgggtataggtctcatggtcacacagactcttgtcgcaaacggcgcaaaggtgtacatcaccggtcgtacccaagagaagctagatcgcgttgtagagaagtactccgagagcaaagacagtatcatccccattacagcagacatgacatccaaagcagacatcgccaagttagccaaggaaattgaatcacgagaggaatgcctctgcatcttagtgaacaatgcgggcatcaatacttcgaccctgcagacggagtctggatccgcgcaagaaatgaagcagaacctcttcgatgcagacgggtcaacatttgaagactggacaactgtgtacaacactaatgtggcatctctcttcttcaccaccacagcattccttccactgttgcagaaatccacagagcggcatccaggctggtccggcacagtgctcaacattacctcgatttcaggtctggtcaagacggcacagcatcacttccagtacaatgccagtaaggccgctgccaatcatcttactcgcatgcttgcgaccgagatcgcagacaatggcatcaaagttcgcgtcaacgcagttgcacctggtgtctttccaagcgagatgactgcgagcgaaagtggacaggatcagaagagctccatcccgaaggagaaatatgagagcaaggtaccggccgcgcgtcctggacgtgacgaagacatggcacaagccgttctgtccgcagtcgtaaaccaatatgtcaatggacagattatggtgatcgacggcggatacactattgctgctggtcagtaaggttagccatcgctgtggcatttacgaacaatttccaattatgcgcaatcggttaggcttgtcagcgcaatcactatgcccagatttggaagtcgatcccttgtggtatgtaggagtatgtgtaaagcgaacgggcaaacacgttctaccgcgggtctaaatattcagttacgcggaccagatgatatcggtggctttggcgggaatatttgcgctgttacctgcacttataagctttgcctctgatattgctactaaatagtagacagtaacgagggacaagtttcctgtaataatcagagaatctcgccagaaacaagtcccagtttctcttagttcaagaaatcaaa

SEQ ID NO: 14776 - DNA, 951 bp, Muscodor strobelii
  misc_feature: SGI cDNA ID NO. 564877
  misc_feature: Encodes the peptide sequence at SEQ ID NO 14777
atgagttcgttaggagacctacccacagaaatctttatctatattattgaatattccagcatcatagacctacggtcgaccatcctcagcgctcgggtcaacaagaagttccgcgatgttgtacctgccgttctttactctcaatctcccgtatttgacaacgagcccttcgtcgaaaataacgtcttggtgcatcatccaatgaatcccatctggggaaatctcggctggattcaatcaagacttgccatgccgcctttcgaagtaaaatccccagggggtagtttcaagaggtttccgatactgtgcggcattcctcgcggatggaagcagcctcagatgctagttaaccttgaaccctttgccgaggtctgcaatgataaatcgagcttcttgcactctaacgcaagttggcgacgtttgagccccacgattggctgcggatcattgatacggaagatggaggtggtaaaagtgattgagggtcccctccatttggccaaccgtcgtccaccgtccacagtctgtcactctgatatcaagcttccgcggtcgggcttgacaatgggctttctgtccgacattttgaagtgcaccgagctcaatactcgggggccagaaaccggtttcatcatagagagatgggcattgttcgtaggcaagtcactgaagaaggatgtgaagaagaggaataagatgtctttctcggttgttaaccttcctgactttggccgtcaggattatatcctagccgatcagatcgatgctgcggttttagctgtatgggatcatggccgagtgggggatcagacatcgccatctcggtcgacagaagtaccaacatttggatcatggaaggtcacgacgacaatagaggggagctataacgacctgactgagaacggcacgtacactgacgccagcgacgatagcagtagttgggacaattga

SEQ ID NO: 14777 - protein, 316 aa, Muscodor strobelii
  misc_feature: SGI Peptide ID NO. 564877
MSSLGDLPTEIFIYIIEYSSIIDLRSTILSARVNKKFRDVVPAVLYSQSPVFDNEPFVENNVLVHHPMNPIWGNLGWIQSRLAMPPFEVKSPGGSFKRFPILCGIPRGWKQPQMLVNLEPFAEVCNDKSSFLHSNASWRRLSPTIGCGSLIRKMEVVKVIEGPLHLANRRPPSTVCHSDIKLPRSGLTMGFLSDILKCTELNTRGPETGFIIERWALFVGKSLKKDVKKRNKMSFSVVNLPDFGRQDYILADQIDAAVLAVWDHGRVGDQTSPSRSTEVPTFGSWKVTTTIEGSYNDLTENGTYTDASDDSSSWDN

SEQ ID NO: 14778 - DNA, 383 bp, Muscodor strobelii
  misc_feature: SGI EST ID NO. CUFF.35189.0
  misc_feature: Variant of the nucleotide sequence at SEQ ID NO 14776
gaaggatgtgaagaagaggaataagatgtctttctcggttgttaaccttcctgactttggccgtcaggattatatcctagccgatcagatcgatgctgcggttttagctgtatgggatcatggccgagtgggggatcagacatcgccatctcggtcgacagaagtaccaacatttggatcatggaaggtcacgacgacaatagaggggagctataacgacctgactgagaacggcacgtacactgacgccagcgacgatagcagtagttgggacaattgagacgagtagaacaacgaagatgacgaaggcgatgaggacgacgagcccgaataaactcgcattcacaacggtacaataacgagaaacacaatttcagggacgg

SEQ ID NO: 14779 - DNA, 1296 bp, Muscodor strobelii
  misc_feature: SGI cDNA ID NO. 564878
  misc_feature: Elevated expression when VOC is produced
  misc_feature: Encodes the peptide sequence at SEQ ID NO 14780
atgagagatgaactattgcggggtactctagttacgttcaagttgcgtttgcagtcatggtcgacggctttcttcctcgaacaacctcaagccaagattattgcgttgcacaatatgttgaatttaatatgtaacatcgtcttggctttcgcctcactagcctcatgtacggtggcccccgtcttagtccctgaactcacaggtcctcataaagtcggcactacggtcctcgagctcatcgactacaagcgacaagatccattctcgcccactcctgggcctcgtgatctcgtcgtatctcttttttatcccacagacgataatgcatgtgatcggttcaagctggcgcctcagttcccgccgaaaacagcggcatactatgatgcggctggtaacctgtcgactcctaccgtggagagtatcacgacgaggtcataccaagatgcgcccttggttcgacctgatcttccactgctcgttatgagccctggctttggtggttcgcgtctgttcttctcggattacgcggaagaattagcgagttatggctggaacatcgtcacgatcgaccatacatgggacgtaccgtttgtcgagtatccggacgggcgagtggttgattctaatcttagtgccattgttgtagcgggcggagttgtcaacgatacaatcttggcgccctttttgtaccctcgtgttgccgatctcacattcgttttggactctctttccaatagctcgatcacatcgaagataccaggccttgcgagtaacacgacttcgaaactccggactagcagtgtcggcattgttgggggctcatttggcggagcttcagcctaccatgttatggagattgacgaacggttcaaagtcggtgtcaatttcgatggcgcgctcttcacacccgctagattcaaagaattggattctccattcttattcttggccgctttggaccataactacacagctgatacaacttggtacgaggcctggcctaatctcaatggcttcaagcggatctttgctgtcaatgggacggagcatcctggttttacggatttcccaatatatcgagacatattgggacccgggtttcctgttgaaaagatcatcggcaatattggcacgataaatgggacgcgtatgttgggtattcagcgagatttcacgaaggcattgtttgataagttcttgaaaggatatggaggcgagctattagatggaaaggggcttgatcaatggccggaggtcagttggataaaggcgccaccaagtccgaagactgtgtag

SEQ ID NO: 14780 - protein, 431 aa, Muscodor strobelii
  misc_feature: SGI Peptide ID NO. 564878
  misc_feature (55)..(415): Pfam Id: PF03403 Pfam Desc: Platelet-activating factor acetylhydrolase, plasma/intracellular isoform II
  misc_feature (39)..(420): NCBI GI: 119482435 Blast Desc: PAF acetylhydrolase family protein [Neosartorya fischeri NRRL 181] gi|119409400|gb|EAW19349.1| PAF acetylhydrolase family protein [Neosartorya fischeri NRRL 181]
  misc_feature (39)..(419): NCBI GI: 154313952 Blast Desc: BC1G_04919 [Botryotinia fuckeliana B05.10] gi|150849065|gb|EDN24258.1| BC1G_04919 [Botryotinia fuckeliana B05.10]
  misc_feature (57)..(420): NCBI GI: 121704577 Blast Desc: PAF acetylhydrolase family protein [Aspergillus clavatus NRRL 1] gi|119398697|gb|EAW09126.1| PAF acetylhydrolase family protein [Aspergillus clavatus NRRL 1]
  misc_feature (39)..(419): NCBI GI: 115396058 Blast Desc: [Aspergillus terreus NIH2624] gi|114193237|gb|EAU34937.1| [Aspergillus terreus NIH2624]
  misc_feature (39)..(393): NCBI GI: 156046823 Blast Desc: SS1G_09495 [Sclerotinia sclerotiorum 1980] gi|154693890|gb|EDN93628.1| SS1G_09495 [Sclerotinia sclerotiorum 1980]
  misc_feature (39)..(419): NCBI GI: 71002852 Blast Desc: PAF acetylhydrolase family protein [Aspergillus fumigatus Af293] gi|66853745|gb|EAL94069.1| PAF acetylhydrolase family protein [Aspergillus fumigatus Af293]
  misc_feature (39)..(419): NCBI GI: 159130162 Blast Desc: PAF acetylhydrolase family protein [Aspergillus fumigatus A1163]
  misc_feature (64)..(420): NCBI GI: 242805475 Blast Desc: PAF acetylhydrolase family protein [Talaromyces stipitatus ATCC 10500] gi|218715163|gb|EED14585.1| PAF acetylhydrolase family protein [Talaromyces stipitatus ATCC
  misc_feature (63)..(422): NCBI GI: 169763002 Blast Desc: [Aspergillus oryzae RIB40] gi|83770429|dbj|BAE60562.1| protein product [Aspergillus oryzae]
  misc_feature (63)..(422): NCBI GI: 238488837 Blast Desc: PAF acetylhydrolase family protein [Aspergillus flavus NRRL3357] gi|220698044|gb|EED54384.1| PAF acetylhydrolase family protein [Aspergillus flavus NRRL3357]
  misc_feature (61)..(370): SWISSPROT Homolog: EC 3.1.1.47 1-alkyl-2-acetylglycerophosphocholine esterase
  misc_feature: Useful for introducing or modulating the production of volatile compounds
MRDELLRGTLVTFKLRLQSWSTAFFLEQPQAKIIALHNMLNLICNIVLAFASLASCTVAPVLVPELTGPHKVGTTVLELIDYKRQDPFSPTPGPRDLVVSLFYPTDDNACDRFKLAPQFPPKTAAYYDAAGNLSTPTVESITTRSYQDAPLVRPDLPLLVMSPGFGGSRLFFSDYAEELASYGWNIVTIDHTWDVPFVEYPDGRVVDSNLSAIVVAGGVVNDTILAPFLYPRVADLTFVLDSLSNSSITSKIPGLASNTTSKLRTSSVGIVGGSFGGASAYHVMEIDERFKVGVNFDGALFTPARFKELDSPFLFLAALDHNYTADTTWYEAWPNLNGFKRIFAVNGTEHPGFTDFPIYRDILGPGFPVEKIIGNIGTINGTRMLGIQRDFTKALFDKFLKGYGGELLDGKGLDQWPEVSWIKAPPSPKTV

SEQ ID NO: 14781 - DNA, 1630 bp, Muscodor strobelii
  misc_feature: SGI EST ID NO. CUFF.35192.0
  misc_feature: Variant of the nucleotide sequence at SEQ ID NO 14779
ggagtatcaacggccggtatggagcgtacaccctggttcaccaccgtcccaaaggagaaaatcctccaatgatcattgaccatacggaaacagcaacttgtatgttgagagttcccatggtaccgtgattctgacatgcatatacccttgacatattgtacaattaaccggacttgaagaagatgagagatgaactattgcggggtactctagttacgttcaagttgcgtttgcagtcatggtcgacggctttcttcctcgaacaacctcaagccaagattattgcgttgcacaatatgttgaatttaatatgtaacatcgtcttggctttcgcctcactagcctcatgtacggtggcccccgtcttagtccctgaactcacaggtcctcataaagtcggcactacggtcctcgagctcatcgactacaagcgacaagatccattctcgcccactcctgggcctcgtgatctcgtcgtatctcttttttatcccacagacgataatgcatgtgatcggttcaagctggcgcctcagttcccgccgaaaacagcggcatactatgatgcggctggtaacctgtcgactcctaccgtggagagtatcacgacgaggtcataccaagatgcgcccttggttcgacctgatcttccactgctcgttatgagccctggctttggtggttcgcgtctgttcttctcggattacgcggaagaattagcgagttatggctggaacatcgtcacgatcgaccatacatgggacgtaccgtttgtcgagtatccggacgggcgagtggttgattctaatcttagtgccattgttgtagcgggcggagttgtcaacgatacaatcttggcgccctttttgtaccctcgtgttgccgatctcacattcgttttggactctctttccaatagctcgatcacatcgaagataccaggccttgcgagtaacacgacttcgaaactccggactagcagtgtcggcattgttgggggctcatttggcggagcttcagcctaccatgttatggagattgacgaacggttcaaagtcggtgtcaatttcgatggcgcgctcttcacacccgctagattcaaagaattggattctccattcttattcttggccgctttggaccataactacacagctgatacaacttggtacgaggcctggcctaatctcaatggcttcaagcggatctttgctgtcaatgggacggagcatcctggttttacggatttcccaatatatcgagacatattgggacccgggtttcctgttgaaaagatcatcggcaatattggcacgataaatgggacgcgtatgttgggtattcagcgagatttcacgaaggcattgtttgataagttcttgaaaggatatggaggcgagctattagatggaaaggggcttgatcaatggccggaggtcagttggataaaggcgccaccaagtccgaagactgtgtagcgtcgtagaagggagtagccatgttcccagtatctggtgaatacaaaataaatgttacaagacaaggcaattacgttgatatgacaccgggccggatgagaggtatttcgactctcaccctaatatcctcgtttgagcaggccatgatgccg

SEQ ID NO: 14782 - DNA, 1815 bp, Muscodor strobelii
  misc_feature: SGI cDNA ID NO. 564880
  misc_feature: Encodes the peptide sequence at SEQ ID NO 14783
atgatctcccggctattggccacggcagcggctacttgctgtctcctgtccccagctccgatatctgcggctccggcagtgacgccgcagccggctatcacagtcaagaatggatcctattccggtgtatacagcgaggagtatgaccaggactttttccttgggatgccatatgctaagacagcaaaacgtttcactattgcagagcccctggagacgccatggaataacacccgcaaggccaccgcttatcctccacactgcatcggctatggaggcgacgatgttggttatgacatctcggaagattgtttgtacctaaatgtcattcgaccagctggtgtggatgagactgctgatctccctgtggcggtctggattcacggcggaggactagtcatgggcggatctgccgaccgaagatacaatctcagcttcatcgtcgacgagagcgtgaaacaggggaccccgatgttgggtgtgagcctcaactacagactctccgtgttcggcttcttagttggcagtgaggctcttgatgccggagtcgccaatcttgggtttcgcgaccagcgtctagcgttacaatggattaacgagaacattgctgcttttggcggttcacccgataaggtgactatcttcggggagagctcaggcgctgagtccgtggctgcgcaagtgttggcttacaatggtgtgttcgaatcacatttaagcagatatgcgatgaaagctaatcagtggaaaggacgcgatgacggcctgttccgcggtgcgatcggagaatccggttttggcgctgttttcgataggtatggtggtggtttaaacaatactgccgcggcacaagagactttcgacaacttggtgctcaacacttcctgttcatcaactgtgggcaccgctaacgccattccatgtctcattgccttgccgtttgaggagatcaactacgccgtgaacacaacgggtgtcggcccctggtcccctgtcatggacggtgacttcattgcggatatcccttccaagcaactcaagaatggaagattcgcgcaggtaccgattctaatcgggactaacacggatgaaggcaccgcgttcggtagtggtaagggacctaatgggacaggtgtcgacactgatgcggagttcgcgcaggccatccgggattatctaggaccgaacgtgaccacctcatcgggcatgtcaatagacgagatcattgaagatttaatgacgctataccctaatattcagagcctaggcatcccatctctaaagtcctggcccgagatcatcaccacggagacatccaatgttgaatccctgggtctgcagtatcgacgcactggcgcgctcttcggcgacttgagcatgcactatatgagacggctaagcaacatagcttgggataatgcgggcctcccctcttggtcttaccgcttcgacgtcatcgttaatggcgtcccgccgttcgtagctgcaacacatttccaggaggtcgcgttcgtatttcacaacctgaatggagatggttatgccacgaacccatttgaaggtgagccgaaatcgtatgcagagttgtccgcggttatgtcgcgagcttggatcaactttgtcactggccttgatccaaatggtgatggcagtattttggacgagaagtggccgagctatagccttgcggctggtgggggcgctggtcagaatattgtttggactgtgaatggtagctatgttgagttcgatgactatcgggcccctgggatgaagtggatgtctgatcattcattggatgtttttggtagatga

SEQ ID NO: 14783 - protein, 604 aa, Muscodor strobelii
  misc_feature: SGI Peptide ID NO. 564880
  misc_feature (11)..(589): Pfam Id: PF00135 Pfam Desc: Carboxylesterase
  misc_feature (11)..(418): Pfam Id: PF00135 Pfam Desc: Carboxylesterase
  misc_feature (448)..(589): Pfam Id: PF00135 Pfam Desc: Carboxylesterase
  misc_feature (31)..(603): NCBI GI: 256720264 Blast Desc: NECHADRAFT_56206 [Nectria haematococca mpVI 77-13-4]
  misc_feature (10)..(603): NCBI GI: 116194896 Blast Desc: CHGG_04046 [Chaetomium globosum CBS 148.51] gi|88179959|gb|EAQ87427.1| CHGG_04046 [Chaetomium globosum CBS 148.51]
  misc_feature (2)..(603): NCBI GI: 116194802 Blast Desc: CHGG_03999 [Chaetomium globosum CBS 148.51] gi|88179912|gb|EAQ87380.1| CHGG_03999 [Chaetomium globosum CBS 148.51]
  misc_feature (15)..(604): NCBI GI: 156062712 Blast Desc: SS1G_01472 [Sclerotinia sclerotiorum 1980] gi|154696808|gb|EDN96546.1| SS1G_01472 [Sclerotinia sclerotiorum 1980]
  misc_feature (64)..(603): NCBI GI: 154313027 Blast Desc: BC1G_05515 [Botryotinia fuckeliana B05.10] gi|150849600|gb|EDN24793.1| BC1G_05515 [Botryotinia fuckeliana B05.10]
  misc_feature (1)..(602): NCBI GI: 39968075 Blast Desc: MGG_02130 [Magnaporthe grisea 70-15] gi|145013018|gb|EDJ97659.1| MGG_02130 [Magnaporthe grisea 70-15]
  misc_feature (31)..(604): NCBI GI: 212541883 Blast Desc: extracellular lipase, [Penicillium marneffei ATCC 18224] gi|210066003|gb|EEA20096.1| extracellular lipase, [Penicillium marneffei ATCC 18224]
  misc_feature (25)..(604): NCBI GI: 256723251 Blast Desc: NECHADRAFT_86536 [Nectria haematococca mpVI 77-13-4]
  misc_feature (31)..(603): NCBI GI: 242770282 Blast Desc: extracellular lipase, [Talaromyces stipitatus ATCC 10500] gi|218725143|gb|EED24560.1| extracellular lipase, [Talaromyces stipitatus ATCC 10500]
  misc_feature (13)..(597): NCBI GI: 256719846 Blast Desc: NECHADRAFT_56618 [Nectria haematococca mpVI 77-13-4]
  misc_feature (101)..(590): SWISSPROT Homolog: EC 3.1.1.3 Triacylglycerol lipase
MISRLLATAAATCCLLSPAPISAAPAVTPQPAITVKNGSYSGVYSEEYDQDFFLGMPYAKTAKRFTIAEPLETPWNNTRKATAYPPHCIGYGGDDVGYDISEDCLYLNVIRPAGVDETADLPVAVWIHGGGLVMGGSADRRYNLSFIVDESVKQGTPMLGVSLNYRLSVFGFLVGSEALDAGVANLGFRDQRLALQWINENIAAFGGSPDKVTIFGESSGAESVAAQVLAYNGVFESHLSRYAMKANQWKGRDDGLFRGAIGESGFGAVFDRYGGGLNNTAAAQETFDNLVLNTSCSSTVGTANAIPCLIALPFEEINYAVNTTGVGPWSPVMDGDFIADIPSKQLKNGRFAQVPILIGTNTDEGTAFGSGKGPNGTGVDTDAEFAQAIRDYLGPNVTTSSGMSIDEIIEDLMTLYPNIQSLGIPSLKSWPEIITTETSNVESLGLQYRRTGALFGDLSMHYMRRLSNIAWDNAGLPSWSYRFDVIVNGVPPFVAATHFQEVAFVFHNLNGDGYATNPFEGEPKSYAELSAVMSRAWINFVTGLDPNGDGSILDEKWPSYSLAAGGGAGQNIVWTVNGSYVEFDDYRAPGMKWMSDHSLDVFGR

SEQ ID NO: 14784 - DNA, 885 bp, Muscodor strobelii
  misc_feature: SGI cDNA ID NO. 564881
  misc_feature: Encodes the peptide sequence at SEQ ID NO 14785
atgatcaacaccgccctagcagtagacaacggaggacatatatcaaggcgttacctcgcaccgacacagatgatccaagatttcagtggaaagattcgccttgcgaacgaccatgactacgaacgcaggccacgtactgcaaactcgcagtccgatgtcagtgaagcgacatcctccgtcattcatgtgcaggatctaggcttggctgctgtaccgacggaacttctcgaaatcccggactcgaagtccatagacgacgcaatggatgctgctcagctccatgaccatcttcaacttgagcctaactcctcgacaaatgtgaagggaaccattcgtgagatagtctcttccagcttagaagaagcttacggcagcgacggagatcgctatctacctatcgatgcgttcaatcaaatctttggagacgatttaatcaagaacttactcaagaaagaaaagattgaagacagagatgtaattgaatggtatgtccattgtcggcgaattattgtgatttcactccatgttggtgatctcgaactttccgaggacttaaggaaggagaaaatcaccgacgaaaacccccccctcagactctccaagaaccacagggccgaatgctttatcgccacggcaccagacggagatgagacgacgatttgtgggcattggagtcataacgatttatggctatttaaccatcatcaggcgacgttctgtgccccatttttcgactccaaagaggacagctttgttcttgtaatattgacgcctcaatccggttaccttggaagatattcgaagagaagagcagtggagggagccgcaaaatatatcgtgtggaagctcatccaagtcatcataacttcatatcaataccaatga

SEQ ID NO: 14785 - protein, 294 aa, Muscodor strobelii
  misc_feature: SGI Peptide ID NO. 564881
MINTALAVDNGGHISRRYLAPTQMIQDFSGKIRLANDHDYERRPRTANSQSDVSEATSSVIHVQDLGLAAVPTELLEIPDSKSIDDAMDAAQLHDHLQLEPNSSTNVKGTIREIVSSSLEEAYGSDGDRYLPIDAFNQIFGDDLIKNLLKKEKIEDRDVIEWYVHCRRIIVISLHVGDLELSEDLRKEKITDENPPLRLSKNHRAECFIATAPDGDETTICGHWSHNDLWLFNHHQATFCAPFFDSKEDSFVLVILTPQSGYLGRYSKRRAVEGAAKYIVWKLIQVIITSYQYQ

SEQ ID NO: 14786 - DNA, 271 bp, Muscodor strobelii
  misc_feature: SGI EST ID NO. CUFF.35286.0
  misc_feature: Variant of the nucleotide sequence at SEQ ID NO 14784
acctcgcaccgacacagatgatccaagatttcagtggaaagattcgccttgcgaacgaccatgactacgaacgcaggccacgtactgcaaactcgcagtccgatgtcagtgaagcgacatcctccgtcattcatgtgcaggatctaggcttggctgctgtaccgacggaacttctcgaaatcccggactcgaagtccatagacgacgcaatggatgctgctcagctccatgaccatcttcaacttgagcctaactcctcgacaaatgtgaa

SEQ ID NO: 14787 - DNA, 3597 bp, Muscodor strobelii
  misc_feature: SGI cDNA ID NO. 564882
  misc_feature: Encodes the peptide sequence at SEQ ID NO 14788
atgcatgctagtagtcctattgtctacaccttaagcagctcttctccccggttttctcgcaacgtcttcataccagcattccaaatcgctttcatcgacaaccgccttacttcagcaagttgtctcaatctggaagtagtggcagaattatcaaaatacggacgaacaaacgtcgaggtacatctcaaaaggaatatttatatcatctatatcgatcgcgagctcgtcgacacaactgatcttgagcccaaaacaaccatttcggaagctacactgcgtgcgcaatatggcggcgacattcccgattggacatctcagcttctggacgtagatagggcgcaggaagccatgtcagctgcaaacccattggccatagacgacgagtggtttctaccttacgacgaggtcacagagctagtgaccgaagatatcgttttatcggctctcagcgcgtctgacagcgacatcgaagaccccgagaaactcgcaaaatgggttctcaagaacggcaaacgattgtttctcatccttgtcttgatgacatgtcctacagtagagtggattagttggctagaggccctaaaggaaaatggcgtcgacgacagtatgctgccgctaggatttgaacgcaaaactaagccgtactatggattctcgttggagacgaggcatgcgaagaaattcaagtcattcgcacaatggcaatctaatgatcttgtcatatttgagcacaatcaatggcctctctcagcgcccatctttggcgtaggcaccaggttccgttctagctcggaacccattgctatcgctataaaaagggccaacgatagtgatgatgtcaatgaagtctttgctaaagagacagacagccttcaagccttacaagccttacaagcaattaagtcggttcatctcatccaaccgattgcagcctaccagaggggtagcgataggtgcttgatcttcccatgggctgatggcggcaatctgggtacctactgggagaaccacgaaaaggatcgtcacgacctttgcaacctgcaatggatcgtcactcagtttgttggcctgttcgaagctttgtctgtcctccatgagaacaattaccgccataacgaccttaagcccgaaaacatactgtggttcaaggacggaagagggcggggtacgctgaagatcgctgacatggggctcgctgcctttcgcgagaagggtgccaataccaaacaacgaaattggaaaggacaagcgactatggctcactctagcacttaccgttacgaaccaccggagatggaccaagatcgaaacaaggacacctcccgatcacggcagtatgatgtgtggtctatgggttgcatcatgactgagctactgatttgggccatatatggcttcgatgctgtgagaagctttaggaatcagacatcacaattctggaacagagatgacgaacacagtaatgagccaccatcgtataacgttcacccttatgtatcgtcagtcctcgcggccatgagaggagagccgcaaaaagcaccagcatatgaagctctacttggactaattgagggtagactactcgtcatccctgtgtcaaaagattatgtcagctctccagaacatcgagagatcgccgtggtgctacttgaaagtatgcaaaatatccaacagagctgccgatatgtgaataactatctaacccctctcaacctcgaataccccaacatcaacactaggagtagtgttgtgctgaagaaagatggattactcgcggtaccgggactttccaatgcgccgctcagtcttcagggcatcaagccggcaggtgatccgctaagtgtccaggacactaagatgttcaataaacaagaaatacgatggactgactggtcgaattctgtgtttgatatagaatgtggtaagtgggcaattccacgcatgagcattgccatttggcttctgcaattacgtcatgagggccctgttgtgggcatcgaggattgcccgaacttgctctcagtctatcttgacccagaatgtatagatgtcgagtcagatatcccgaatgatgctcaacttggattgccaaagctattagaccaaggcagctctgagcagttcttgctgtttaaggagtggatcaggatctgtgatgaaacacatgagaactgcagacgcgaccagcacaatgacaagaacgaggatcaatacgcctctgctatgccaacacgacttattgagctgggaacacccccacgaatagtcgagtctgcttccatctcaccctccaaatatgtcgcactcagtcactgctggggtaggctaagtgaccttgagcgattctgcgcctacgatcgtaacatagacacgctcaggaatttaattgatttcgacagcctacctaaaacattccgagatgctattaccgttgcgaggggaataggggtcaattatctctggatcgactcactgtgtatcattcaggataacaaagacgattgggagcacgaactggcgaagatggagcaagtctttagcttggcgtactgtaccattgcagcgagctcttccaaatcgtcgatcgagggcttcctcgggcgccgcgaggaacgactatgcgtgaaggtcgaaatgcctaacaacggcacgtactacgtttgccccaacatcgacaaagtcgatcgcgacgtcgaaatgagcgtgctcaattctcgcgggtgggtgcttcaggaaagagcactgtcgcgacgaaccatattctttacttcaacacaagcctattgggaatgtggtgccggtgtgcgctgcgagactctagcccgtctgcaaaattccaaggctgctttgctcggcgacgctagatttccggcgtcggcgcttgaataccactgtgacgggcgccaaatgctagtgcagacgctctacgagcggtattcagggttggccttcacgaaggactgggacaggccgatggcgattctcggtttgcaagaacgactggcgcgagtattcaacacgcgggcagcatatggactatttggaacgtatttcgcgcggctactgctctggcgccgcgcgggtttccagcgcatgacgcgcgtcgcacagcgcccgggaagccgttattgcgccctaccgagctggtcgtggttctccaaggtcggtactatcaagtatctcgatctcaaattccaagagacgcagtgggccacggaggacttcattaatccattgaaggatgatggaaatggaacattaggcttctcttcgtcccctgccagctatcgcgggcaggaagcgccaatgttgctgcgaggactagcgagagcaatggaaatgtccgcttttgaggctcatgtcaatctagtgtttgacgaagagaacttcgatattgaggaattgcggtgtgtggtcatcgggcgtgataaggatgatagcaatgcgccaggacaagcgaggtttcatgtgcttgtcatccacaacactgatagtcatcatcggaaagaaggtgatgaggtatatgagagggttggtattgcctccctcaagccagagtgggttgctgatgagggaatatgggtggatatacgttga

SEQ ID NO: 14788 - protein, 1198 aa, Muscodor strobelii
  misc_feature: SGI Peptide ID NO. 564882
  misc_feature (766)..(912): Pfam Id: PF06985 Pfam Desc: Heterokaryon incompatibility protein (HET)
  misc_feature (766)..(866): Pfam Id: PF06985 Pfam Desc: Heterokaryon incompatibility protein (HET)
  misc_feature (294)..(459): Pfam Id: PF00069 Pfam Desc: Protein kinase domain
  misc_feature (130)..(1189): NCBI GI: 256720668 Blast Desc: NECHADRAFT_85605 [Nectria haematococca mpVI 77-13-4]
  misc_feature (672)..(1183): NCBI GI: 256723898 Blast Desc: NECHADRAFT_78374 [Nectria haematococca mpVI 77-13-4]
  misc_feature (652)..(1160): NCBI GI: 256721865 Blast Desc: NECHADRAFT_88069 [Nectria haematococca mpVI 77-13-4]
  misc_feature (690)..(1189): NCBI GI: 171694810 Blast Desc: protein product [Podospora anserina] gi|170947647|emb|CAP59809.1| protein product [Podospora anserina]
  misc_feature (670)..(1181): NCBI GI: 256722363 Blast Desc: NECHADRAFT_82209 [Nectria haematococca mpVI 77-13-4]
  misc_feature (689)..(1191): NCBI GI: 256729997 Blast Desc: NECHADRAFT_82546 [Nectria haematococca mpVI 77-13-4]
  misc_feature (690)..(1198): NCBI GI: 256723790 Blast Desc: NECHADRAFT_78344 [Nectria haematococca mpVI 77-13-4]
  misc_feature (690)..(1193): NCBI GI: 170940327 Blast Desc: protein product [Podospora anserina]
  misc_feature (687)..(1160): NCBI GI: 256722820 Blast Desc: NECHADRAFT_87137 [Nectria haematococca mpVI 77-13-4]
  misc_feature (689)..(1160): NCBI GI: 169607331 Blast Desc: SNOG_06722 [Phaeosphaeria nodorum SN15] gi|160701390|gb|EAT85373.2| SNOG_06722 [Phaeosphaeria nodorum SN15]
MHASSPIVYTLSSSSPRFSRNVFIPAFQIAFIDNRLTSASCLNLEVVAELSKYGRTNVEVHLKRNIYIIYIDRELVDTTDLEPKTTISEATLRAQYGGDIPDWTSQLLDVDRAQEAMSAANPLAIDDEWFLPYDEVTELVTEDIVLSALSASDSDIEDPEKLAKWVLKNGKRLFLILVLMTCPTVEWISWLEALKENGVDDSMLPLGFERKTKPYYGFSLETRHAKKFKSFAQWQSNDLVIFEHNQWPLSAPIFGVGTRFRSSSEPIAIAIKRANDSDDVNEVFAKETDSLQALQALQAIKSVHLIQPIAAYQRGSDRCLIFPWADGGNLGTYWENHEKDRHDLCNLQWIVTQFVGLFEALSVLHENNYRHNDLKPENILWFKDGRGRGTLKIADMGLAAFREKGANTKQRNWKGQATMAHSSTYRYEPPEMDQDRNKDTSRSRQYDVWSMGCIMTELLIWAIYGFDAVRSFRNQTSQFWNRDDEHSNEPPSYNVHPYVSSVLAAMRGEPQKAPAYEALLGLIEGRLLVIPVSKDYVSSPEHREIAVVLLESMQNIQQSCRYVNNYLTPLNLEYPNINTRSSVVLKKDGLLAVPGLSNAPLSLQGIKPAGDPLSVQDTKMFNKQEIRWTDWSNSVFDIECGKWAIPRMSIAIWLLQLRHEGPVVGIEDCPNLLSVYLDPECIDVESDIPNDAQLGLPKLLDQGSSEQFLLFKEWIRICDETHENCRRDQHNDKNEDQYASAMPTRLIELGTPPRIVESASISPSKYVALSHCWGRLSDLERFCAYDRNIDTLRNLIDFDSLPKTFRDAITVARGIGVNYLWIDSLCIIQDNKDDWEHELAKMEQVFSLAYCTIAASSSKSSIEGFLGRREERLCVKVEMPNNGTYYVCPNIDKVDRDVEMSVLNSRGWVLQERALSRRTIFFTSTQAYWECGAGVRCETLARLQNSKAALLGDARFPASALEYHCDGRQMLVQTLYERYSGLAFTKDWDRPMAILGLQERLARVFNTRAAYGLFGTYFARLLLWRRAGFQRMTRVAQRPGSRYCALPSWSWFSKVGTIKYLDLKFQETQWATEDFINPLKDDGNGTLGFSSSPASYRGQEAPMLLRGLARAMEMSAFEAHVNLVFDEENFDIEELRCVVIGRDKDDSNAPGQARFHVLVIHNTDSHHRKEGDEVYERVGIASLKPEWVADEGIWVDIR

SEQ ID NO: 14789 - DNA, 1889 bp, Muscodor strobelii
  misc_feature: SGI EST ID NO. CUFF.35234.0
  misc_feature: Variant of the nucleotide sequence at SEQ ID NO 14787
gcaaaagacaagtcacttctggagtgtattatcaccaagctcaaattctcatcgcagaattgccatgtatggtgccttttattgtacgctcttcgacaaaattgcccctggttcacagggcttctgcaattacgtcatgagggccctgttgtgggcatcgaggattgcccgaacttgctctcagtctatcttgacccagaatgtatagatgtcgagtcagatatcccgaatgatgctcaacttggattgccaaagctattagaccaaggcagctctgagcagttcttgctgtttaaggagtggatcaggatctgtgatgaaacacatgagaactgcagacgcgaccagcacaatgacaagaacgaggatcaatacgcctctgctatgccaacacgacttattgagctgggaacacccccacgaatagtcgagtctgcttccatctcaccctccaaatatgtcgcactcagtcactgctggggtaggctaagtgaccttgagcgattctgcgcctacgatcgtaacatagacacgctcaggaatttaattgatttcgacagcctacctaaaacattccgagatgctattaccgttgcgaggggaataggggtcaattatctctggatcgactcactgtgtatcattcaggataacaaagacgattgggagcacgaactggcgaagatggagcaagtctttagcttggcgtactgtaccattgcagcgagctcttccaaatcgtcgatcgagggcttcctcgggcgccgcgaggaacgactatgcgtgaaggtcgaaatgcctaacaacggcacgtactacgtttgccccaacatcgacaaagtcgatcgcgacgtcgaaatgagcgtgctcaattctcgcgggtgggtgcttcaggaaagagcactgtcgcgacgaaccatattctttacttcaacacaagcctattgggaatgtggtgccggtgtgcgctgcgagactctagcccgtctgcaaaattccaaggctgctttgctcggcgacgctagatttccggcgtcggcgcttgaataccactgtgacgggcgccaaatgctagtgcagacgctctacgagcggtattcagggttggccttcacgaaggactgggacaggccgatggcgattctcggtttgcaagaacgactggcgcgagtattcaacacgcgggcagcatatggactatttggaacgtatttcgcgcggctactgctctggcgccgcgcgggtttccagcgcatgacgcgcgtcgcacagcgcccgggaagccgttattgcgccctaccgagctggtcgtggttctccaaggtcggtactatcaagtatctcgatctcaaattccaagagacgcagtgggccacggaggacttcattaatccattgaaggatgatggaaatggaacattaggcttctcttcgtcccctgccagctatcgcgggcaggaagcgccaatgttgctgcgaggactagcgagagcaatggaaatgtccgcttttgaggctcatgtcaatctagtgtttgacgaagagaacttcgatattgaggaattgcggtgtgtggtcatcgggcgtgataaggatgatagcaatgcgccaggacaagcgaggtttcatgtgcttgtcatccacaacactgatagtcatcatcggaaagaaggtgatgaggtatatgagagggttggtattgcctccctcaagccagagtgggttgctgatgagggaatatgggtggatatacgttgatactgccttgatttagacgagactactgattggcgcttgtgctcatggctctgatagatattagattgatataccccttttgccgttctgcccaaattatttaccgggtatcggcttgctttcccctggaa

SEQ ID NO: 14790 - DNA, 3798 bp, Muscodor strobelii
  misc_feature: SGI cDNA ID NO. 564883
  misc_feature: Elevated expression when VOC is produced
  misc_feature: Encodes the peptide sequence at SEQ ID NO 14791
atgcatgctagtagtcctattgtctacaccttaagcagctcttctccccggttttctcgcaacgtcttcataccagcattccaaatcgctttcatcgacaaccgccttacttcagcaagttgtctcaatctggaagtagtggcagaattatcaaaatacggacgaacaaacgtcgaggtacatctcaaaaggaatatttatatcatctatatcgatcgcgagctcgtcgacacaactgatcttgagcccaaaacaaccatttcggaagctacactgcgtgcgcaatatggcggcgacattcccgattggacatctcagcttctggacgtagatagggcgcaggaagccatgtcagctgcaaacccattggccatagacgacgagtggtttctaccttacgacgaggtcacagagctagtgaccgaagatatcgttttatcggctctcagcgcgtctgacagcgacatcgaagaccccgagaaactcgcaaaatgggttctcaagaacggcaaacgattgtttctcatccttgtcttgatgacatgtcctacagtagagtggattagttggctagaggccctaaaggaaaatggcgtcgacgacagtatgctgccgctaggatttgaacgcaaaactaagccgtactatggattctcgttggagacgaggcatgcgaagaaattcaagtcattcgcacaatggcaatctaatgatcttgtcatatttgagcacaatcaatggcctctctcagcgcccatctttggcgtaggcaccaggttccggtatcgactcgacaaaaatcagcccttgccgtacctgaaattggcaagcaggccagggcattctagctcggaacccattgctatcgctataaaaagggccaacgatagtgatgatgtcaatgaagtctttgctaaagagacagacagccttcaagccttacaagccttacaagcaattaagtcggttcatctcatccaaccgattgcagcctaccagaggggtagcgataggtgcttgatcttcccatgggctgatggcggcaatctgggtacctactgggagaaccacgaaaaggatcgtcacgacctttgcaacctgcaatggatcgtcactcagtttgttggcctgttcgaagctttgtctgtcctccatgagaacaattaccgccataacgaccttaagcccgaaaacatactgtggttcaaggacggaagagggcggggtacgctgaagatcgctgacatggggctcgctgcctttcgcgagaagggtgccaataccaaacaacgaaattggaaaggacaagcgactatggctcactctagcacttaccgttacgaaccaccggagatggaccaagatcgaaacaaggacacctcccgatcacggcagtatgatgtgtggtctatgggttgcatcatgactgagctactgatttgggccatatatggcttcgatgctgtgagaagctttaggaatcagacatcacaattctggaacagagatgacgaacacagtaatgagccaccatcgtataacgttcacccttatgtatcgtcagtcctcgcggccatgagaggagagccgcaaaaagcaccagcatatgaagctctacttggactaattgagggtagactactcgtcatccctgtgtcaaaagattatgtcagctctccagaacatcgagagatcgccgtggtgctacttgaaagtatgcaaaatatccaacagagctgccgatatgtgaataactatctaacccctctcaacctcgaataccccaacatcaacactaggagtagtgttgtgctgaagaaagatggattactcgcggtaccgggactttccaatgcgccgctcagtcttcagggcatcaagccggcaggtgatccgctaagtgtccaggacactaagatgttcaataaacaagaaatacgatggactgactggtcgaattctgtgtttgatatagaatgtggtaagtgggcaattccacgcatgagcattgccatttatacaggcgaccaccacatggatgcaaaagacaagtcacttctggagtgtattatcaccaagctcaaattctcatcgcagaattgccatgtatggtgccttttattgtacgctcttcgacaaaattgcccctggttcacagggcttctgcaattacgtcatgagggccctgttgtgggcatcgaggattgcccgaacttgctctcagtctatcttgacccagaatgtatagatgtcgagtcagatatcccgaatgatgctcaacttggattgccaaagctattagaccaaggcagctctgagcagttcttgctgtttaaggagtggatcaggatctgtgatgaaacacatgagaactgcagacgcgaccagcacaatgacaagaacgaggatcaatacgcctctgctatgccaacacgacttattgagctgggaacacccccacgaatagtcgagtctgcttccatctcaccctccaaatatgtcgcactcagtcactgctggggtaggctaagtgaccttgagcgattctgcgcctacgatcgtaacatagacacgctcaggaatttaattgatttcgacagcctacctaaaacattccgagatgctattaccgttgcgaggggaataggggtcaattatctctggatcgactcactgtgtatcattcaggataacaaagacgattgggagcacgaactggcgaagatggagcaagtctttagcttggcgtactgtaccattgcagcgagctcttccaaatcgtcgatcgagggcttcctcgggcgccgcgaggaacgactatgcgtgaaggtcgaaatgcctaacaacggcacgtactacgtttgccccaacatcgacaaagtcgatcgcgacgtcgaaatgagcgtgctcaattctcgcgggtgggtgcttcaggaaagagcactgtcgcgacgaaccatattctttacttcaacacaagcctattgggaatgtggtgccggtgtgcgctgcgagactctagcccgtctgcaaaattccaaggctgctttgctcggcgacgctagatttccggcgtcggcgcttgaataccactgtgacgggcgccaaatgctagtgcagacgctctacgagcggtattcagggttggccttcacgaaggactgggacaggccgatggcgattctcggtttgcaagaacgactggcgcgagtattcaacacgcgggcagcatatggactatttggaacgtatttcgcgcggctactgctctggcgccgcgcgggtttccagcgcatgacgcgcgtcgcacagcgcccgggaagccgttattgcgccctaccgagctggtcgtggttctccaaggtcggtactatcaagtatctcgatctcaaattccaagagacgcagtgggccacggaggacttcattaatccattgaaggatgatggaaatggaacattaggcttctcttcgtcccctgccagctatcgcgggcaggaagcgccaatgttgctgcgaggactagcgagagcaatggaaatgtccgcttttgaggctcatgtcaatctagtgtttgacgaagagaacttcgatattgaggaattgcggtgtgtggtcatcgggcgtgataaggatgatagcaatgcgccaggacaagcgaggtttcatgtgcttgtcatccacaacactgatagtcatcatcggaaagaaggtgatgaggtatatgagagggttggtattgcctccctcaagccagagtgggttgctgatgagggaatatgggtggatatacgttga

SEQ ID NO: 14791 - protein, 1265 aa, Muscodor strobelii
  misc_feature: SGI Peptide ID NO. 564883
  misc_feature (833)..(979): Pfam Id: PF06985 Pfam Desc: Heterokaryon incompatibility protein (HET)
  misc_feature (833)..(933): Pfam Id: PF06985 Pfam Desc: Heterokaryon incompatibility protein (HET)
  misc_feature (314)..(479): Pfam Id: PF00069 Pfam Desc: Protein kinase domain
  misc_feature (130)..(1250): NCBI GI: 256723898 Blast Desc: NECHADRAFT_78374 [Nectria haematococca mpVI 77-13-4]
  misc_feature (130)..(1227): NCBI GI: 256721865 Blast Desc: NECHADRAFT_88069 [Nectria haematococca mpVI 77-13-4]
  misc_feature (130)..(1256): NCBI GI: 256720668 Blast Desc: NECHADRAFT_85605 [Nectria haematococca mpVI 77-13-4]
  misc_feature (113)..(1258): NCBI GI: 256729997 Blast Desc: NECHADRAFT_82546 [Nectria haematococca mpVI 77-13-4]
  misc_feature (130)..(1265): NCBI GI: 256723790 Blast Desc: NECHADRAFT_78344 [Nectria haematococca mpVI 77-13-4]
  misc_feature (694)..(1256): NCBI GI: 171694810 Blast Desc: protein product [Podospora anserina] gi|170947647|emb|CAP59809.1| protein product [Podospora anserina]
  misc_feature (737)..(1248): NCBI GI: 256722363 Blast Desc: NECHADRAFT_82209 [Nectria haematococca mpVI 77-13-4]
  misc_feature (757)..(1260): NCBI GI: 170940327 Blast Desc: protein product [Podospora anserina]
  misc_feature (754)..(1227): NCBI GI: 256722820 Blast Desc: NECHADRAFT_87137 [Nectria haematococca mpVI 77-13-4]
  misc_feature (756)..(1227): NCBI GI: 169607331 Blast Desc: SNOG_06722 [Phaeosphaeria nodorum SN15] gi|160701390|gb|EAT85373.2| SNOG_06722 [Phaeosphaeria nodorum SN15]
  misc_feature: Useful for introducing or modulating the production of volatile compounds
MHASSPIVYTLSSSSPRFSRNVFIPAFQIAFIDNRLTSASCLNLEVVAELSKYGRTNVEVHLKRNIYIIYIDRELVDTTDLEPKTTISEATLRAQYGGDIPDWTSQLLDVDRAQEAMSAANPLAIDDEWFLPYDEVTELVTEDIVLSALSASDSDIEDPEKLAKWVLKNGKRLFLILVLMTCPTVEWISWLEALKENGVDDSMLPLGFERKTKPYYGFSLETRHAKKFKSFAQWQSNDLVIFEHNQWPLSAPIFGVGTRFRYRLDKNQPLPYLKLASRPGHSSSEPIAIAIKRANDSDDVNEVFAKETDSLQALQALQAIKSVHLIQPIAAYQRGSDRCLIFPWADGGNLGTYWENHEKDRHDLCNLQWIVTQFVGLFEALSVLHENNYRHNDLKPENILWFKDGRGRGTLKIADMGLAAFREKGANTKQRNWKGQATMAHSSTYRYEPPEMDQDRNKDTSRSRQYDVWSMGCIMTELLIWAIYGFDAVRSFRNQTSQFWNRDDEHSNEPPSYNVHPYVSSVLAAMRGEPQKAPAYEALLGLIEGRLLVIPVSKDYVSSPEHREIAVVLLESMQNIQQSCRYVNNYLTPLNLEYPNINTRSSVVLKKDGLLAVPGLSNAPLSLQGIKPAGDPLSVQDTKMFNKQEIRWTDWSNSVFDIECGKWAIPRMSIAIYTGDHHMDAKDKSLLECIITKLKFSSQNCHVWCLLLYALRQNCPWFTGLLQLRHEGPVVGIEDCPNLLSVYLDPECIDVESDIPNDAQLGLPKLLDQGSSEQFLLFKEWIRICDETHENCRRDQHNDKNEDQYASAMPTRLIELGTPPRIVESASISPSKYVALSHCWGRLSDLERFCAYDRNIDTLRNLIDFDSLPKTFRDAITVARGIGVNYLWIDSLCIIQDNKDDWEHELAKMEQVFSLAYCTIAASSSKSSIEGFLGRREERLCVKVEMPNNGTYYVCPNIDKVDRDVEMSVLNSRGWVLQERALSRRTIFFTSTQAYWECGAGVRCETLARLQNSKAALLGDARFPASALEYHCDGRQMLVQTLYERYSGLAFTKDWDRPMAILGLQERLARVFNTRAAYGLFGTYFARLLLWRRAGFQRMTRVAQRPGSRYCALPSWSWFSKVGTIKYLDLKFQETQWATEDFINPLKDDGNGTLGFSSSPASYRGQEAPMLLRGLARAMEMSAFEAHVNLVFDEENFDIEELRCVVIGRDKDDSNAPGQARFHVLVIHNTDSHHRKEGDEVYERVGIASLKPEWVADEGIWVDIR

SEQ ID NO: 14792 - DNA, 1889 bp, Muscodor strobelii; identical to SEQ ID NO: 14789
  misc_feature: SGI EST ID NO. CUFF.35234.0
  misc_feature: Variant of the nucleotide sequence at SEQ ID NO 14790

SEQ ID NO: 14793 - DNA, 1704 bp, Muscodor strobelii
  misc_feature: SGI cDNA ID NO. 564884
  misc_feature: Encodes the peptide sequence at SEQ ID NO 14794
atgagttctgggagaacattagccgaccagtatcctatccatgttggggtatggatcaactggtcgtccgggaaaatcttgggcagcactctgacacttgaaagaagcgatgcaaaccttttgattgcatttcttggtgtgttgattacctttgtctcgtctcgggcgtggcgcatactttgttttgcattgcatcgacattattcagatcctacgccccaagatgctatttatcaccaacgtcaggcaatcctacgcaactcgtcagcacctgaagatggtatcaaccttctattacgcctcttttgggaaaatcgccggtcgaacgcatcctcgcgaccccttcctgctgctgctgctggcatcttcttcctcacagtattcacgattgcaggcggtttctcttctaagatttccactggaatcaatggcgaagttttgatccaaagcagtcactgcggatacttgcatcctccaacgatcttcgatgatcccgaaggtgtattcgcgtcttggacctatcgtagtgagcttctaagtaacgctgccaactacgccctccaatgctattcgaacaataacagcattgggcttaactgcaacagcttcgtaaagccacgtattgctggtaccgtcgactttgaagcgagttgcccttttgagagccaaatgtgtcgaatgcagtctggaaatattcgtctcgatagcggctatgtcgatagccatgaagactttggaatcaattcacccccagatcaaaggattctctggagaaacgtgcttcaatgtgggcccttaactacggaagggtacaccagcgagaatatcacagataccaacgagaataagaccttctaccactacggtagtacgatgagcgtagcacatggtcctgtggattggatatatagagttgcttcggtacaatcccagtattggtacctgcaggacagttatgatatcattgacaattacttcacgcagtttataagcccagtacagtctctcatacaaaacggcacaacaagaaacaactctgacttccgacccattgaccccctgtatagggacgatgcggatttatacatcatgtttctctcgggtaacggagtgctgtacaaatcgccaacaccagacgagtggtatcaggtatcacccatccccgtaatcggaagcgctgcatcggtcaaccagactacgagcgcggacgccctttatcttcccctcgaacctgcttctccaatgggttgcgtggaccagtatcagttctgcaacgctgccttaccagaagagaacagatgcggtcctctcacaagtctacttgatgcaatatctggcgccgagccgctgtttggaggttctgcagctggtgacgatgatccggatacagctgcagtagcccgttggaaatatttcacgtctaagtttgaagggtttcgcatgtccatcaacattttattagtgcagctagggtctaccgcattactgtcacaaagaaatctgcttggagggttgcaaggctctctggcacgcaaccagtggcaactggatataagccacttatggaacatatcaatggccgcacagcaattagccgtgatcgggacagcatacggtcccactgacgcagaaacacttcgaagttgggtcgacttcgatttagctgagccggaattgaagaagttgtgtaacaatcaggtatga

SEQ ID NO: 14794 - protein, 567 aa, Muscodor strobelii
  misc_feature: SGI Peptide ID NO. 564884
  misc_feature (11)..(566): NCBI GI: 169615058 Blast Desc: SNOG_10683 [Phaeosphaeria nodorum SN15] gi|111060957|gb|EAT82077.1| SNOG_10683 [Phaeosphaeria nodorum SN15]
  misc_feature (13)..(566): NCBI GI: 119474227 Blast Desc: NFIA_004500 [Neosartorya fischeri NRRL 181] gi|119407142|gb|EAW17092.1| conserved [Neosartorya fischeri NRRL 181]
  misc_feature (8)..(544): NCBI GI: 189194015 Blast Desc: conserved [Pyrenophora tritici-repentis Pt-1C-BFP] gi|187978910|gb|EDU45536.1| conserved [Pyrenophora tritici-repentis Pt-1C-BFP]
  misc_feature (13)..(567): NCBI GI: 169772941 Blast Desc: [Aspergillus oryzae RIB40] gi|83768800|dbj|BAE58937.1| protein product [Aspergillus oryzae]
  misc_feature (13)..(540): NCBI GI: 115399382 Blast Desc: [Aspergillus terreus NIH2624] gi|114192163|gb|EAU33863.1| [Aspergillus terreus NIH2624]
  misc_feature (13)..(566): NCBI GI: 70986226 Blast Desc: conserved [Aspergillus fumigatus Af293] gi|66846236|gb|EAL86569.1| conserved [Aspergillus fumigatus Af293]
  misc_feature (13)..(566): NCBI GI: 159128250 Blast Desc: conserved [Aspergillus fumigatus A1163]
  misc_feature (7)..(447): NCBI GI: 115433432 Blast Desc: [Aspergillus terreus NIH2624] gi|114189705|gb|EAU31405.1| [Aspergillus terreus NIH2624]
  misc_feature (7)..(542): NCBI GI: 121699395 Blast Desc: ACLA_082720 [Aspergillus clavatus NRRL 1] gi|119396149|gb|EAW06581.1| ACLA_082720 [Aspergillus clavatus NRRL 1]
  misc_feature (7)..(531): NCBI GI: 169618215 Blast Desc: SNOG_12297 [Phaeosphaeria nodorum SN15] gi|160703576|gb|EAT80110.2| SNOG_12297 [Phaeosphaeria nodorum SN15]
MSSGRTLADQYPIHVGVWINWSSGKILGSTLTLERSDANLLIAFLGVLITFVSSRAWRILCFALHRHYSDPTPQDAIYHQRQAILRNSSAPEDGINLLLRLFWENRRSNASSRPLPAAAAGIFFLTVFTIAGGFSSKISTGINGEVLIQSSHCGYLHPPTIFDDPEGVFASWTYRSELLSNAANYALQCYSNNNSIGLNCNSFVKPRIAGTVDFEASCPFESQMCRMQSGNIRLDSGYVDSHEDFGINSPPDQRILWRNVLQCGPLTTEGYTSENITDTNENKTFYHYGSTMSVAHGPVDWIYRVASVQSQYWYLQDSYDIIDNYFTQFISPVQSLIQNGTTRNNSDFRPIDPLYRDDADLYIMFLSGNGVLYKSPTPDEWYQVSPIPVIGSAASVNQTTSADALYLPLEPASPMGCVDQYQFCNAALPEENRCGPLTSLLDAISGAEPLFGGSAAGDDDPDTAAVARWKYFTSKFEGFRMSINILLVQLGSTALLSQRNLLGGLQGSLARNQWQLDISHLWNISMAAQQLAVIGTAYGPTDAETLRSWVDFDLAEPELKKLCNNQV

SEQ ID NO: 14795 - DNA, 801 bp, Muscodor strobelii
  misc_feature: SGI cDNA ID NO. 564885
  misc_feature: Encodes the peptide sequence at SEQ ID NO 14796
atgagggactggatactggaggagacatactgggccgtcgtagatcaatatggcgaggtccacgacgaggtgtgggccgatccttgggaaaagatcatgtggttcgggaaatacaaaggggagccgctcaaggcgttgccctcacaatactgcgattggcttatcttgcaagcttgcaaagaaaccacatcttggaataccaccgagttccaaagatggtacgagcgatgcttgcgtatggattccctagatgaagacccggcttatgatgaatatgttgaagttgaagaagaggaggatgacgacgatccatttgtagacatggaaggagacgacgcggagccactatgggaagaatacgaagatgcgcaacgggtattcgcgaatggtacgagcagacgaggcatgtttgacgacgtgaaagaatcagccgaggctaccggggttaacgataactgcctgatcgaagaagacctcgaggatcaagacgaagacgactggggcgacatggccaactcatatcagccttggcttgatgagcagtccgaggaagaggagcagtccgaggaagaggagcagtccgagcgagaacgtgaagagcgagaggacgaagccggaaagatcatcatggacgaggacaccagcaacgaagcattcgatctacacaacacaatccaagactcatctctcaaccctgaggacacaaacacgaattcgggacgattcaccgtatctgcgaacacgaagaagagaggcgcaactgacgagttccaatcggatactaagcgacacagaacttga

SEQ ID NO: 14796 - protein, 266 aa, Muscodor strobelii
  misc_feature: SGI Peptide ID NO. 564885
MRDWILEETYWAVVDQYGEVHDEVWADPWEKIMWFGKYKGEPLKALPSQYCDWLILQACKETTSWNTTEFQRWYERCLRMDSLDEDPAYDEYVEVEEEEDDDDPFVDMEGDDAEPLWEEYEDAQRVFANGTSRRGMFDDVKESAEATGVNDNCLIEEDLEDQDEDDWGDMANSYQPWLDEQSEEEEQSEEEEQSEREREEREDEAGKIIMDEDTSNEAFDLHNTIQDSSLNPEDTNTNSGRFTVSANTKKRGATDEFQSDTKRHRT

SEQ ID NO: 14797 - DNA, 1593 bp, Muscodor strobelii
  misc_feature: SGI cDNA ID NO. 564886
  misc_feature: Encodes the peptide sequence at SEQ ID NO 14798
atgactacactagtcccccgtccgccgtacacgaaggatgagctgaagactctataccctgcaggccttgaactccagctcgtccaggtcttgatgcgacatggagagcgtagtcccgtatctgcccgtttccaaaatgccggactgccggccttctggccatattgcaatgctgttcgccaactcaagtccgctgtgcttgacggtgatacgaagcagttcacaacattcgagtggaagagacggctagagagctttggtcctcacgatgaacccatacttgctgctggccccaacggcgagttggacggtatatgtgaaatgggcatgttgacagatcgcggccgacagacgacgttcgagctcggcacccggttgcgaaagctgtatgtcgatcagcttggcttcttgccaccctcattgctgaatgccgactctttttatctccgagcaacacccatccctcgagccaacgatagtctccaggagacgttccttgggctctaccccttacacgcccgcgcgcccaatttccctcctccatccgtcatcttacggtctccagccgatgagaccctcttccccaatgactccaattgtcggcgatttgcagcgctctcgcgggcctttgctcagcgcgccgctgaccggtggaacgacacagatgagatggcgtatctgaacaagttgtacgggaagtggatgccagaagggcaacgagtggcagtcgactcccggccccgtctgagtggtgtcatggacaccataaactccacgctggcccatggacccgagacacggttaccaaaggagttctacgataagaagggcctggatatcattgagaagattggcgttgaagagtggtttgtgggttataaagaaagcgtcgagtaccgaactctcggcatcggcgaactcatgggcgacgttgtgagcaggatggtcggaagtgccgaacactcgacggcagatggggaatacgaagtggcgggtaaactgacgaacaaaccactgttagatgggaagggtgctacgcccgtccgttttggactaagcggttgtcatgatacgacactcgctgctgttctcgctagcttaggcgcatttgacaccgataagtggccgccgtatacgagccatattgctatcgaaatgttcaaaagagcagacgctgcgtcttctgcgtccacaacctccagcccacaagcgactatcccaccagctgagagcacgagcattgcggctgctcccaagacaagctggtggagctccttgttctcctctgcgcctcgcgcaaccccagggcttccgccaccgggtattgggcggaaacccacaactgatctgactgccgacgaaaaggccaaattagatggatactatgttcgattacggtacaacgatgaaatagtcaagatccccggctgcaagctagccgggaagcatcttgacggggatgaaagcttctgtactctggaggcattcaaaaccatcgtagataaattcaccccaaagaactggaagcagcaatgctccgcaagcgttcatgatccagcattcccacccaaacctgagccagctggagagtag

SEQ ID NO: 14798 - protein, 530 aa, Muscodor strobelii
  misc_feature: SGI Peptide ID NO. 564886
  misc_feature (24)..(468): Pfam Id: PF00328 Pfam Desc: Histidine acid phosphatase
  misc_feature (24)..(219): Pfam Id: PF00328 Pfam Desc: Histidine acid phosphatase
  misc_feature (329)..(468): Pfam Id: PF00328 Pfam Desc: Histidine acid phosphatase
  misc_feature (1)..(529): NCBI GI: 154295211 Blast Desc: BC1G_13419 [Botryotinia fuckeliana B05.10] gi|150844146|gb|EDN19339.1| BC1G_13419 [Botryotinia fuckeliana B05.10]
  misc_feature (1)..(529): NCBI GI: 46122131 Blast Desc: FG05443.1 [Gibberella zeae PH-1]
  misc_feature (1)..(530): NCBI GI: 116191971 Blast Desc: CHGG_05703 [Chaetomium globosum CBS 148.51] gi|88181616|gb|EAQ89084.1| CHGG_05703 [Chaetomium globosum CBS 148.51]
  misc_feature (1)..(529): NCBI GI: 39976807 Blast Desc: MGG_06306 [Magnaporthe grisea 70-15] gi|145016296|gb|EDK00786.1| MGG_06306 [Magnaporthe grisea 70-15]
  misc_feature (1)..(530): NCBI GI: 164425068 Blast Desc: NCU06460 [Neurospora crassa OR74A] gi|157070776|gb|EAA28115.2| NCU06460 [Neurospora crassa OR74A]
  misc_feature (1)..(529): NCBI GI: 256729927 Blast Desc: NECHADRAFT_62903 [Nectria haematococca mpVI 77-13-4]
  misc_feature (1)..(529): NCBI GI: 189208448 Blast Desc: conserved [Pyrenophora tritici-repentis Pt-1C-BFP] gi|187976650|gb|EDU43276.1| conserved [Pyrenophora tritici-repentis Pt-1C-BFP]
  misc_feature (1)..(529): NCBI GI: 240274450 Blast Desc: acid phosphatase [Ajellomyces capsulatus H143]
  misc_feature (1)..(529): NCBI GI: 225561346 Blast Desc: conserved [Ajellomyces capsulatus G186AR]
  misc_feature (1)..(521): NCBI GI: 212531885 Blast Desc: acid phosphatase, [Penicillium marneffei ATCC 18224] gi|210071463|gb|EEA25552.1| acid phosphatase, [Penicillium marneffei ATCC 18224]
  misc_feature (19)..(512): SWISSPROT Homolog: EC 3.1.3.2 Acid phosphatase
MTTLVPRPPYTKDELKTLYPAGLELQLVQVLMRHGERSPVSARFQNAGLPAFWPYCNAVRQLKSAVLDGDTKQFTTFEWKRRLESFGPHDEPILAAGPNGELDGICEMGMLTDRGRQTTFELGTRLRKLYVDQLGFLPPSLLNADSFYLRATPIPRANDSLQETFLGLYPLHARAPNFPPPSVILRSPADETLFPNDSNCRRFAALSRAFAQRAADRWNDTDEMAYLNKLYGKWMPEGQRVAVDSRPRLSGVMDTINSTLAHGPETRLPKEFYDKKGLDIIEKIGVEEWFVGYKESVEYRTLGIGELMGDVVSRMVGSAEHSTADGEYEVAGKLTNKPLLDGKGATPVRFGLSGCHDTTLAAVLASLGAFDTDKWPPYTSHIAIEMFKRADAASSASTTSSPQATIPPAESTSIAAAPKTSWWSSLFSSAPRATPGLPPPGIGRKPTTDLTADEKAKLDGYYVRLRYNDEIVKIPGCKLAGKHLDGDESFCTLEAFKTIVDKFTPKNWKQQCSASVHDPAFPPKPEPAGE

SEQ ID NO: 14799 - DNA, 2762 bp, Muscodor strobelii
  misc_feature: SGI EST ID NO. CUFF.35299.0
  misc_feature: Variant of the nucleotide sequence at SEQ ID NO 14797
gttcaacccacttccacctcggcggcttgtccttcactctcacctagccacatttcattcccacatggtcacacaacgtgcttggattggtgaggttgattgaggacgcgagggcaagaagacggtttggattctcttgtttattatctctcactctcatctgctagagatatttccattcacgctcaacaggagtaattgtatttgtttgcattttgattttggctgtgctctggaccttgtatccgtatcttcacaatgactacactagtcccccgtccgccgtacacgaaggatgagctgaagactctataccctgcaggccttgaactccagctcgtccaggtcttgatgcgacatggagagcgtagtcccgtatctgcccgtttccaaaatgccggactgccggccttctggccatattgcaatgctgttcgccaactcaagtccgctgtgcttgacggtgatacgaagcagttcacaacattcgagtggaagagacggctagagagctttggtcctcacgatgaacccatacttgctgctggccccaacggcgagttggacggtatatgtgaaatgggcatgttgacagatcgcggccgacagacgacgttcgagctcggcacccggttgcgaaagctgtatgtcgatcagcttggcttcttgccaccctcattgctgaatgccgactctttttatctccgagcaacacccatccctcgagccaacgatagtctccaggagacgttccttgggctctaccccttacacgcccgcgcgcccaatttccctcctccatccgtcatcttacggtctccagccgatgagaccctcttccccaatgactccaattgtcggcgatttgcagcgctctcgcgggcctttgctcagcgcgccgctgaccggtggaacgacacagatgagatggcgtatctgaacaagttgtacgggaagtggatgccagaagggcaacgagtggcagtcgactcccggccccgtctgagtggtgtcatggacaccataaactccacgctggcccatggacccgagacacggttaccaaaggagttctacgataagaagggcctggatatcattgagaagattggcgttgaagagtggtttgtgggttataaagaaagcgtcgagtaccgaactctcggcatcggcgaactcatgggcgacgttgtgagcaggatggtcggaagtgccgaacactcgacggcagatggggaatacgaagtggcgggtaaactgacgaacaaaccactgttagatgggaagggtgctacgcccgtccgttttggactaagcggttgtcatgatacgacactcgctgctgttctcgctagcttaggcgcatttgacaccgataagtggccgccgtatacgagccatattgctatcgaaatgttcaaaagagcagacgctgcgtcttctgcgtccacaacctccagcccacaagcgactatcccaccagctgagagcacgagcattgcggctgctcccaagacaagctggtggagctccttgttctcctctgcgcctcgcgcaaccccagggcttccgccaccgggtattgggcggaaacccacaactgatctgactgccgacgaaaaggccaaattagatggatactatgttcgattacggtacaacgatgaaatagtcaagatccccggctgcaagctagccgggaagcatcttgacggggatgaaagcttctgtactctggaggcattcaaaaccatcgtagataaattcaccccaaagaactggaagcagcaatgctccgcaagcgttcatgatccagcattcccacccaaacctgagccagctggagagtagtcatctctgcgttcaatgactcgatgaaagaacgaaatcaacacctcactgtctgtaaatagagagtgggacatcaccacatgtacaaagacatctgaacggcatgtatgtatatatccatgctacctttttaggaattggcctgagccctatctcatgtgaatggaaactccggtctctcgtagatgaaacagaacagtttatcaagttcttagccctctgtatcgcgcgctatttgtcgcgctatctctttaaacgcgtgactgagtttgctggggcgaattttgtccatgtttattgttacaaatgcatcccactctcattcctgacgagcgagattttgcgcttgtccatgatctgtcggtgagatgtctcccagtctatctgtctccggtatcaagttctgtgtcgcttagtatccgattggaactcgtcagttgcgcctctcttcttcgtgttcgcagatacggtgaatcgtcccgaattcgtgtttgtgtcctcagggttgagagatgagtcttggattgtgttgtgtagatcgaatgcttcgttgctggtgtcctcgtccatgatgatctttccggcttcgtcctctcgctcttcacgttctcgctcggactgctcctcttcctcggactgctcctcttcctcggactgctcatcaagccaaggctgatatgagttggccatgtcgccccagtcgtcttcgtcttgatcctcgaggtcttcttcgatcaggcagttatcgttaaccccggtagcctcggctgattctttcacgtcgtcaaacatgcctcgtctgctcgtaccattcgcgaatacccgttgcgcatcttcgtattcttcccatagtggctccgcgtcgtctccttccatgtctacaaatggatcgtcgtcatcctcctcttctt

SEQ ID NO: 14800 - DNA, 2658 bp, Muscodor strobelii
  misc_feature: SGI cDNA ID NO. 564887
  misc_feature: Reduced expression when VOC is produced
  misc_feature: Encodes the peptide sequence at SEQ ID NO 14801
atgaggggatccaaatcggtctgtctgctctgccgcctccggagcagaactgcggtcgcgacggcagcaggcaagacatcccaaacaccatggcaaaggcaattccaagccctcgcattctcgacgaccccccagaaccacgatgcagatagcacgaatgcggcacccaggacacaggatatcgatgcctcaagtcttagtcattccatcgccagccgtccacatccgcgccctcggaaagcagtcaaagaaaagtatcatgtcacacagtctccctccaaggttgatgccctcttccagcagattctgcaggaacaaattttcatccaagaccagcccacgccgcaatcactcgctgccccaagcagacctcccagcgatctcgtcattgtcagcgcaatccagaaactcgagcaaatggtcaacaacgacagcacttcaatatcaaaagctttcaatttctttcgaggcgaggtgtccccgatcatccgacaagaaggagtctatataccacgtgcatatcaccgggttaagaaatccttgatcaccagagtcatcgccgcgaaaaaggcaaacattggcgaccaaaagctgcctaccgtcgcagacatcttccgaacgatcgatcaagatgcgagtatacatccgaaacagtgggccgaactggtcgagcagttggtctcgtatctcgtccacgtcaatgtcgacgctggaacacagaccgcggccgagcacgagaagagactggcagtacgtgaagctatgatgatggatttggtcgagtcgtggaagatattgacttcgccacgagttgagacgggagtgcagagcgacaatgatgtcactgatggtttttactttccacgtctacactctccttcgctcaagaagttcgcgcgcaatcgcgactttactagcgcatttagcactctcttcccgcaatacccacgaaaccaacttggggatcgagtctcaatgctagccattgcaacctttacactaatgcacgacagccgccggtgttcagtcggaatcagacaagatgcggcacggttcatgtccaaggtcggatatctgatcaatgccgtcaaaatctcgcgattagatttgaacaagaaattgcacactttgtttccaaggctagaaccatacgtaatgaacctttggccgagcattgagacctacctcgcgagagactaccaggcaacccacgacgagccatcggtggtcgttgctcgagcttttaatataacaaacaccgacaagcaactcaaaaaactatttctcttcgatgcgcaagccatcgagcgtcgccttagatatgccgacgacactcgaaattccgctgacttggacaggatttgggtggaactggttggtaccacaaaacccgtggaagagcagagagcagaacaaattcgaaataacccaggtctcattgaccagtacatcaaaatatgcatgtccaacaacttacccgaaaaggccatgacggcgtggaagatgcttggcaccatcaaagtaaaaccaacgataaagacctggaccgaaatgctcaacggcctaaagaaggccaagaacatagacggaattagaaatatctgggcaaggctagccgcctccgaggtccagctagacacacaaatctggacaacccgcatctcaggtctggtcgaagccggtcacattcaagacggtctagacgcactagacgaaatggtacaactctggaggaaaggacaagagaaagaggcctctaccggaaagcccaacacagctgtgcaaccgaccagcgccccagtcaacgccgcgctcgccggcctagtccggcgcaatcggaacaatgatctagaagccgccgaaaaactcctagtctgggccggaaaacagggtatcgaacccgatatctacacatacaacactatgctccggcccctcatccgcgatggcgaacgcgacggagcagtggagagactcttccagacgatggagagacaaggtgttcgtgcagacgcagcgacattcgccatcgtactggatgcctcgttctcccggcatacgccgacggaccctgtagagcaatccgcgcaagtttcagcagtcgctgactctatggttgctgcggggctggaattcgatatgaagatgtacggcaaaatgatatatctcctcctcacctccaacgccacgacggccgccatggctgtcatcaatcatctacttgggaagaatatcgagattagtcctcatatctacaccatgctcgtagagcactgctttgtgcaacgtccgcctaaactagatgtcgtcgatgccatagtgcaccggaggaggccaaccaagggtaactcaaacctagcagaggacatggatagaagattttacgatagggtgatcttggggtatacggaattcggacggctcgaggaagcgctgggtgtttataagaaggcggtgaagggcacgagtattagtctttcggccgtgttggcattagtcagggagttgttgagggtgcagaggtcggacgatgcgagttttgtggtgagggatacgaagatgcggtttgaggccgagaaccatgataaggtcgagaaggataggttttatgggaatgtgctttggagtgttgctgagcggtatgggttattgccttga

SEQ ID NO: 14801 - protein, 885 aa, Muscodor strobelii
  misc_feature: SGI Peptide ID NO. 564887
  misc_feature (1)..(883): NCBI GI: 39976805 Blast Desc: MGG_06305 [Magnaporthe grisea 70-15] gi|145016297|gb|EDK00787.1| MGG_06305 [Magnaporthe grisea 70-15]
  misc_feature (1)..(884): NCBI GI: 85084641 Blast Desc: NCU06461 [Neurospora crassa OR74A] gi|28918442|gb|EAA28116.1| [Neurospora crassa OR74A]
  misc_feature (6)..(884): NCBI GI: 116191969 Blast Desc: CHGG_05702 [Chaetomium globosum CBS 148.51] gi|88181615|gb|EAQ89083.1| CHGG_05702 [Chaetomium globosum CBS 148.51]
  misc_feature (126)..(884): NCBI GI: 171686836 Blast Desc: protein product [Podospora anserina] gi|170943379|emb|CAP69032.1| protein product [Podospora anserina]
  misc_feature (72)..(820): NCBI GI: 154295213 Blast Desc: BC1G_13420 [Botryotinia fuckeliana B05.10] gi|150844147|gb|EDN19340.1| BC1G_13420 [Botryotinia fuckeliana B05.10]
  misc_feature (305)..(884): NCBI GI: 46111289 Blast Desc: FG02526.1 [Gibberella zeae PH-1]
  misc_feature (307)..(884): NCBI GI: 256725800 Blast Desc: NECHADRAFT_94562 [Nectria haematococca mpVI 77-13-4]
  misc_feature (253)..(823): NCBI GI: 156051118 Blast Desc: SS1G_06966 [Sclerotinia sclerotiorum 1980] gi|154704744|gb|EDO04483.1| SS1G_06966 [Sclerotinia sclerotiorum 1980]
  misc_feature (434)..(779): NCBI GI: 261354277 Blast Desc: conserved [Verticillium albo-atrum VaMs.102]
  misc_feature (437)..(883): NCBI GI: 189208450 Blast Desc: [Pyrenophora tritici-repentis Pt-1C-BFP] gi|187976651|gb|EDU43277.1| [Pyrenophora tritici-repentis Pt-1C-BFP]
  misc_feature: Useful for introducing or modulating the production of volatile compounds
MRGSKSVCLLCRLRSRTAVATAAGKTSQTPWQRQFQALAFSTTPQNHDADSTNAAPRTQDIDASSLSHSIASRPHPRPRKAVKEKYHVTQSPSKVDALFQQILQEQIFIQDQPTPQSLAAPSRPPSDLVIVSAIQKLEQMVNNDSTSISKAFNFFRGEVSPIIRQEGVYIPRAYHRVKKSLITRVIAAKKANIGDQKLPTVADIFRTIDQDASIHPKQWAELVEQLVSYLVHVNVDAGTQTAAEHEKRLAVREAMMMDLVESWKILTSPRVETGVQSDNDVTDGFYFPRLHSPSLKKFARNRDFTSAFSTLFPQYPRNQLGDRVSMLAIATFTLMHDSRRCSVGIRQDAARFMSKVGYLINAVKISRLDLNKKLHTLFPRLEPYVMNLWPSIETYLARDYQATHDEPSVVVARAFNITNTDKQLKKLFLFDAQAIERRLRYADDTRNSADLDRIWVELVGTTKPVEEQRAEQIRNNPGLIDQYIKICMSNNLPEKAMTAWKMLGTIKVKPTIKTWTEMLNGLKKAKNIDGIRNIWARLAASEVQLDTQIWTTRISGLVEAGHIQDGLDALDEMVQLWRKGQEKEASTGKPNTAVQPTSAPVNAALAGLVRRNRNNDLEAAEKLLVWAGKQGIEPDIYTYNTMLRPLIRDGERDGAVERLFQTMERQGVRADAATFAIVLDASFSRHTPTDPVEQSAQVSAVADSMVAAGLEFDMKMYGKMIYLLLTSNATTAAMAVINHLLGKNIEISPHIYTMLVEHCFVQRPPKLDVVDAIVHRRRPTKGNSNLAEDMDRRFYDRVILGYTEFGRLEEALGVYKKAVKGTSISLSAVLALVRELLRVQRSDDASFVVRDTKMRFEAENHDKVEKDRFYGNVLWSVAERYGLLP

SEQ ID NO: 14802 - DNA, 2976 bp, Muscodor strobelii
  misc_feature: SGI EST ID NO. CUFF.35270.0
  misc_feature: Variant of the nucleotide sequence at SEQ ID NO 14800
ggtatctccgacgtcgtcctcttgaaattgtttgctcgaaatcggaacagctcacgggacaacacgacagcaaggccgtagctagccaacaatgcccgcagcaatgccaatgtgacgcctcatgacacgcgagacatatacttaccgaactcagcgaccagatgaatttcagaatcttggtggaacatcacgacgcatgttatgaggggatccaaatcggtctgtctgctctgccgcctccggagcagaactgcggtcgcgacggcagcaggcaagacatcccaaacaccatggcaaaggcaattccaagccctcgcattctcgacgaccccccagaaccacgatgcagatagcacgaatgcggcacccaggacacaggatatcgatgcctcaagtcttagtcattccatcgccagccgtccacatccgcgccctcggaaagcagtcaaagaaaagtatcatgtcacacagtctccctccaaggttgatgccctcttccagcagattctgcaggaacaaattttcatccaagaccagcccacgccgcaatcactcgctgccccaagcagacctcccagcgatctcgtcattgtcagcgcaatccagaaactcgagcaaatggtcaacaacgacagcacttcaatatcaaaagctttcaatttctttcgaggcgaggtgtccccgatcatccgacaagaaggagtctatataccacgtgcatatcaccgggttaagaaatccttgatcaccagagtcatcgccgcgaaaaaggcaaacattggcgaccaaaagctgcctaccgtcgcagacatcttccgaacgatcgatcaagatgcgagtatacatccgaaacagtgggccgaactggtcgagcagttggtctcgtatctcgtccacgtcaatgtcgacgctggaacacagaccgcggccgagcacgagaagagactggcagtacgtgaagctatgatgatggatttggtcgagtcgtggaagatattgacttcgccacgagttgagacgggagtgcagagcgacaatgatgtcactgatggtttttactttccacgtctacactctccttcgctcaagaagttcgcgcgcaatcgcgactttactagcgcatttagcactctcttcccgcaatacccacgaaaccaacttggggatcgagtctcaatgctagccattgcaacctttacactaatgcacgacagccgccggtgttcagtcggaatcagacaagatgcggcacggttcatgtccaaggtcggatatctgatcaatgccgtcaaaatctcgcgattagatttgaacaagaaattgcacactttgtttccaaggctagaaccatacgtaatgaacctttggccgagcattgagacctacctcgcgagagactaccaggcaacccacgacgagccatcggtggtcgttgctcgagcttttaatataacaaacaccgacaagcaactcaaaaaactatttctcttcgatgcgcaagccatcgagcgtcgccttagatatgccgacgacactcgaaattccgctgacttggacaggatttgggtggaactggttggtaccacaaaacccgtggaagagcagagagcagaacaaattcgaaataacccaggtctcattgaccagtacatcaaaatatgcatgtccaacaacttacccgaaaaggccatgacggcgtggaagatgcttggcaccatcaaagtaaaaccaacgataaagacctggaccgaaatgctcaacggcctaaagaaggccaagaacatagacggaattagaaatatctgggcaaggctagccgcctccgaggtccagctagacacacaaatctggacaacccgcatctcaggtctggtcgaagccggtcacattcaagacggtctagacgcactagacgaaatggtacaactctggaggaaaggacaagagaaagaggcctctaccggaaagcccaacacagctgtgcaaccgaccagcgccccagtcaacgccgcgctcgccggcctagtccggcgcaatcggaacaatgatctagaagccgccgaaaaactcctagtctgggccggaaaacagggtatcgaacccgatatctacacatacaacactatgctccggcccctcatccgcgatggcgaacgcgacggagcagtggagagactcttccagacgatggagagacaaggtgttcgtgcagacgcagcgacattcgccatcgtactggatgcctcgttctcccggcatacgccgacggaccctgtagagcaatccgcgcaagtttcagcagtcgctgactctatggttgctgcggggctggaattcgatatgaagatgtacggcaaaatgatatatctcctcctcacctccaacgccacgacggccgccatggctgtcatcaatcatctacttgggaagaatatcgagattagtcctcatatctacaccatgctcgtagagcactgctttgtgcaacgtccgcctaaactagatgtcgtcgatgccatagtgcaccggaggaggccaaccaagggtaactcaaacctagcagaggacatggatagaagattttacgatagggtgatcttggggtatacggaattcggacggctcgaggaagcgctgggtgtttataagaaggcggtgaagggcacgagtattagtctttcggccgtgttggcattagtcagggagttgttgagggtgcagaggtcggacgatgcgagttttgtggtgagggatacgaagatgcggtttgaggccgagaaccatgataaggtcgagaaggataggttttatgggaatgtgctttggagtgttgctgagcggtatgggttattgccttgaggtggaaaggggaaggggggatgagtgtagagatagagatagaggagtctgacttgatgagacgcactgacgcagacagacttgtgtataaatagaaaattaagaaatctagaagct

SEQ ID NO: 14803 - DNA, 1656 bp, Muscodor strobelii
  misc_feature: SGI cDNA ID NO. 564888
  misc_feature: Elevated expression when VOC is produced
  misc_feature: Encodes the peptide sequence at SEQ ID NO 14804
atgcacgacagccgccggtgttcagtcggaatcagacaagatgcggcacggttcatgtccaaggtcggatatctgatcaatgccgtcaaaatctcgcgattagatttgaacaagaaattgcacactttgtttccaaggctagaaccatacgtaatgaacctttggccgagcattgagacctacctcgcgagagactaccaggcaacccacgacgagccatcggtggtcgttgctcgagcttttaatataacaaacaccgacaagcaactcaaaaaactatttctcttcgatgcgcaagccatcgagcgtcgccttagatatgccgacgacactcgaaattccgctgacttggacaggatttgggtggaactggttggtaccacaaaacccgtggaagagcagagagcagaacaaattcgaaataacccaggtctcattgaccagtacatcaaaatatgcatgtccaacaacttacccgaaaaggccatgacggcgtggaagatgcttggcaccatcaaagtaaaaccaacgataaagacctggaccgaaatgctcaacggcctaaagaaggccaagaacatagacggaattagaaatatctgggcaaggctagccgcctccgaggtccagctagacacacaaatctggacaacccgcatctcaggtctggtcgaagccggtcacattcaagacggtctagacgcactagacgaaatggtacaactctggaggaaaggacaagagaaagaggcctctaccggaaagcccaacacagctgtgcaaccgaccagcgccccagtcaacgccgcgctcgccggcctagtccggcgcaatcggaacaatgatctagaagccgccgaaaaactcctagtctgggccggaaaacagggtatcgaacccgatatctacacatacaacactatgctccggcccctcatccgcgatggcgaacgcgacggagcagtggagagactcttccagacgatggagagacaaggtgttcgtgcagacgcagcgacattcgccatcgtactggatgcctcgttctcccggcatacgccgacggaccctgtagagcaatccgcgcaagtttcagcagtcgctgactctatggttgctgcggggctggaattcgatatgaagatgtacggcaaaatgatatatctcctcctcacctccaacgccacgacggccgccatggctgtcatcaatcatctacttgggaagaatatcgagattagtcctcatatctacaccatgctcgtagagcactgctttgtgcaacgtccgcctaaactagatgtcgtcgatgccatagtgcaccggaggaggccaaccaagggtaactcaaacctagcagaggacatggatagaagattttacgatagggtgatcttggggtatacggaattcggacggctcgaggaagcgctgggtgtttataagaaggcggtgaagggcacgagtattagtctttcggccgtgttggcattagtcagggagttgttgagggtgcagaggtcggacgatgcgagttttgtggtgagggatacgaagatgcggtttgaggccgagaaccatgataaggtcgagaaggataggttttatgggaatgtgctttggagtgttgctgagcggtatgggttattgccttga

SEQ ID NO: 14804 - protein, 551 aa, Muscodor strobelii
  misc_feature: SGI Peptide ID NO. 564888
  misc_feature (3)..(550): NCBI GI: 85084641 Blast Desc: NCU06461 [Neurospora crassa OR74A] gi|28918442|gb|EAA28116.1| [Neurospora crassa OR74A]
  misc_feature (99)..(550): NCBI GI: 171686836 Blast Desc: protein product [Podospora anserina] gi|170943379|emb|CAP69032.1| protein product [Podospora anserina]
  misc_feature (1)..(549): NCBI GI: 39976805 Blast Desc: MGG_06305 [Magnaporthe grisea 70-15] gi|145016297|gb|EDK00787.1| MGG_06305 [Magnaporthe grisea 70-15]
  misc_feature (100)..(550): NCBI GI: 116191969 Blast Desc: CHGG_05702 [Chaetomium globosum CBS 148.51] gi|88181615|gb|EAQ89083.1| CHGG_05702 [Chaetomium globosum CBS 148.51]
  misc_feature (44)..(550): NCBI GI: 46111289 Blast Desc: FG02526.1 [Gibberella zeae PH-1]
  misc_feature (8)..(491): NCBI GI: 154295213 Blast Desc: BC1G_13420 [Botryotinia fuckeliana B05.10] gi|150844147|gb|EDN19340.1| BC1G_13420 [Botryotinia fuckeliana B05.10]
  misc_feature (50)..(550): NCBI GI: 256725800 Blast Desc: NECHADRAFT_94562 [Nectria haematococca mpVI 77-13-4]
  misc_feature (98)..(489): NCBI GI: 156051118 Blast Desc: SS1G_06966 [Sclerotinia sclerotiorum 1980] gi|154704744|gb|EDO04483.1| SS1G_06966 [Sclerotinia sclerotiorum 1980]
  misc_feature (100)..(445): NCBI GI: 261354277 Blast Desc: conserved [Verticillium albo-atrum VaMs.102]
  misc_feature (103)..(519): NCBI GI: 189208450 Blast Desc: [Pyrenophora tritici-repentis Pt-1C-BFP] gi|187976651|gb|EDU43277.1| [Pyrenophora tritici-repentis Pt-1C-BFP]
  misc_feature: Useful for introducing or modulating the production of volatile compounds
MHDSRRCSVGIRQDAARFMSKVGYLINAVKISRLDLNKKLHTLFPRLEPYVMNLWPSIETYLARDYQATHDEPSVVVARAFNITNTDKQLKKLFLFDAQAIERRLRYADDTRNSADLDRIWVELVGTTKPVEEQRAEQIRNNPGLIDQYIKICMSNNLPEKAMTAWKMLGTIKVKPTIKTWTEMLNGLKKAKNIDGIRNIWARLAASEVQLDTQIWTTRISGLVEAGHIQDGLDALDEMVQLWRKGQEKEASTGKPNTAVQPTSAPVNAALAGLVRRNRNNDLEAAEKLLVWAGKQGIEPDIYTYNTMLRPLIRDGERDGAVERLFQTMERQGVRADAATFAIVLDASFSRHTPTDPVEQSAQVSAVADSMVAAGLEFDMKMYGKMIYLLLTSNATTAAMAVINHLLGKNIEISPHIYTMLVEHCFVQRPPKLDVVDAIVHRRRPTKGNSNLAEDMDRRFYDRVILGYTEFGRLEEALGVYKKAVKGTSISLSAVLALVRELLRVQRSDDASFVVRDTKMRFEAENHDKVEKDRFYGNVLWSVAERYGLLP

SEQ ID NO: 14805 - DNA, 2976 bp, Muscodor strobelii; identical to SEQ ID NO: 14802
  misc_feature: SGI EST ID NO. CUFF.35270.0
  misc_feature: Variant of the nucleotide sequence at SEQ ID NO 14803

SEQ ID NO: 14806 - DNA, 546 bp, Muscodor strobelii
  misc_feature: SGI cDNA ID NO. 564889
  misc_feature: Encodes the peptide sequence at SEQ ID NO 14807
atggttgctgcggggctggaattcgatatgaagatgtacggcaaaatgatatatctcctcctcacctccaacgccacgacggccgccatggctgtcatcaatcatctacttgggaagaatatcgagattagtcctcatatctacaccatgctcgtagagcactgctttgtgcaacgtccgcctaaactagatgtcgtcgatgccatagtgcaccggaggaggccaaccaagggtaactcaaacctagcagaggacatggatagaagattttacgatagggtgatcttggggtatacggaattcggacggctcgaggaagcgctgggtgtttataagaaggcggtgaagggcacgagtattagtctttcggccgtgttggcattagtcagggagttgttgagggtgcagaggtcggacgatgcgagttttgtggtgagggatacgaagatgcggtttgaggccgagaaccatgataaggtcgagaaggataggttttatgggaatgtgctttggagtgttgctgagcggtatgggttattgccttga

SEQ ID NO: 14807 - protein, 181 aa, Muscodor strobelii
  misc_feature: SGI Peptide ID NO. 564889
  misc_feature (1)..(180): NCBI GI: 85084641 Blast Desc: NCU06461 [Neurospora crassa OR74A] gi|28918442|gb|EAA28116.1| [Neurospora crassa OR74A]
  misc_feature (1)..(180): NCBI GI: 171686836 Blast Desc: protein product [Podospora anserina] gi|170943379|emb|CAP69032.1| protein product [Podospora anserina]
  misc_feature (1)..(180): NCBI GI: 256725800 Blast Desc: NECHADRAFT_94562 [Nectria haematococca mpVI 77-13-4]
  misc_feature (12)..(121): NCBI GI: 154295213 Blast Desc: BC1G_13420 [Botryotinia fuckeliana B05.10] gi|150844147|gb|EDN19340.1| BC1G_13420 [Botryotinia fuckeliana B05.10]
  misc_feature (4)..(180): NCBI GI: 46111289 Blast Desc: FG02526.1 [Gibberella zeae PH-1]
  misc_feature (13)..(179): NCBI GI: 39976805 Blast Desc: MGG_06305 [Magnaporthe grisea 70-15] gi|145016297|gb|EDK00787.1| MGG_06305 [Magnaporthe grisea 70-15]
  misc_feature (9)..(119): NCBI GI: 156051118 Blast Desc: SS1G_06966 [Sclerotinia sclerotiorum 1980] gi|154704744|gb|EDO04483.1| SS1G_06966 [Sclerotinia sclerotiorum 1980]
  misc_feature (31)..(149): NCBI GI: 189208450 Blast Desc: [Pyrenophora tritici-repentis Pt-1C-BFP] gi|187976651|gb|EDU43277.1| [Pyrenophora tritici-repentis Pt-1C-BFP]
  misc_feature (1)..(75): NCBI GI: 261354277 Blast Desc: conserved [Verticillium albo-atrum VaMs.102]
  misc_feature (1)..(180): NCBI GI: 116191969 Blast Desc: CHGG_05702 [Chaetomium globosum CBS 148.51] gi|88181615|gb|EAQ89083.1| CHGG_05702 [Chaetomium globosum CBS 148.51]
MVAAGLEFDMKMYGKMIYLLLTSNATTAAMAVINHLLGKNIEISPHIYTMLVEHCFVQRPPKLDVVDAIVHRRRPTKGNSNLAEDMDRRFYDRVILGYTEFGRLEEALGVYKKAVKGTSISLSAVLALVRELLRVQRSDDASFVVRDTKMRFEAENHDKVEKDRFYGNVLWSVAERYGLLP

SEQ ID NO: 14808 - DNA, 2976 bp, Muscodor strobelii; identical to SEQ ID NO: 14802
  misc_feature: SGI EST ID NO. CUFF.35270.0
  misc_feature: Variant of the nucleotide sequence at SEQ ID NO 14806

SEQ ID NO: 14809 - DNA, 1311 bp, Muscodor strobelii
  misc_feature: SGI cDNA ID NO. 564890
  misc_feature: Encodes the peptide sequence at SEQ ID NO 14810
atgcacccggtcgacccctccagcactaatccaaatattgactttacgaagtggcggctcaactcttgtcgcaaaccgcgccgcgaccgcgttttacagctccaaacgacagaatacggcgaaatcaagatgtcgtccgccaattcagataccgagctcttgactgagcatttcggatatcctcccgtcagtctaatagacgacataataaacagcgtcaacattctcgccgagcgagctctcaactccgtcgaaaccggtctcctcaacgtctctccagcaactctcggtttcaagccctccaaatcaacctccaaatccacgcccgccgataaagaaagggaaaaagagcttgcagcagaacgctgcaaaaccgaagtcgaagcaggaacacaccaactcgagaccctactctgcgccagcatcgatcggaacttcgacaaattcgagatctacgtgctgcgcaatctcctgactgttaagacggagttgagggattggataaggcttcgtcattacgagggattggacttctcgactaccacctctgcgagttcagcaaacacggatttggcacataatgagaacccgaaagacagaccgacgatcgagtctaatactaggctgaggaacagattaagagagtcgatgaaactcaacgccctcctcacagcggagaaaaaacgcaacgatgtcctgttaggggatttacgaagacttgtgggcgatccggggtcgacgcatatcaagaccgagaccaatccagaccaagatggcaacgtagacatagagaggagtccatttgcgttcctccacgaaaaagcagatttagcgtcttcaggcggtggatcacttcccctctcaacaaccgctgcgttcacgctctctcagatggaggctcttcgttctttatcctcttctctgaggacaatatcgtcggacctgaaatcccttccccaaccccatacaaacacctcacatacaaacaccaacgaaaacgagattgaaagtgacgctagtcatgatgaagatgacggggatagtcgtggtgtgggggataagagtggcaagaagagctggaggagagaaagagtagagtacgtcgagggcgctactcgacgccatctcgaacatgtgcagggactagaactcggaagattaggcgaggttagggatggggagtggcagggaggacggggctttgataggggggcgttgggtgttcttgaggatgtcgttgcggctttggggaatgagagaccgcaaggtggagctgcgagctctgggagcggagaggcaatggaggaatga

SEQ ID NO: 14810 - protein, 436 aa, Muscodor strobelii
  misc_feature: SGI Peptide ID NO. 564890
  misc_feature (53)..(220): Pfam Id: PF05859 Pfam Desc: Mis12 protein
  misc_feature (126)..(160): Pfam Id: PF05859 Pfam Desc: Mis12 protein
  misc_feature (53)..(85): Pfam Id: PF05859 Pfam Desc: Mis12 protein
  misc_feature (45)..(419): NCBI GI: 39976803 Blast Desc: MGG_06304 [Magnaporthe grisea 70-15] gi|145016298|gb|EDK00788.1| MGG_06304 [Magnaporthe grisea 70-15]
  misc_feature (46)..(422): NCBI GI: 116191985 Blast Desc: CHGG_05710 [Chaetomium globosum CBS 148.51] gi|88181623|gb|EAQ89091.1| CHGG_05710 [Chaetomium globosum CBS 148.51]
  misc_feature (48)..(436): NCBI GI: 46111287 Blast Desc: FG02525.1 [Gibberella zeae PH-1]
  misc_feature (45)..(420): NCBI GI: 256726201 Blast Desc: NECHADRAFT_94563 [Nectria haematococca mpVI 77-13-4]
  misc_feature (44)..(436): NCBI GI: 156051148 Blast Desc: SS1G_06981 [Sclerotinia sclerotiorum 1980] gi|154704759|gb|EDO04498.1| SS1G_06981 [Sclerotinia sclerotiorum 1980]
  misc_feature (57)..(399): NCBI GI: 164425070 Blast Desc: NCU06463 [Neurospora crassa OR74A] gi|157070777|gb|EAA28118.2| [Neurospora crassa OR74A]
  misc_feature (44)..(436): NCBI GI: 154299164 Blast Desc: BC1G_11760 [Botryotinia fuckeliana B05.10] gi|150857463|gb|EDN32655.1| BC1G_11760 [Botryotinia fuckeliana B05.10]
  misc_feature (48)..(419): NCBI GI: 225561358 Blast Desc: Mis12 domain-containing protein [Ajellomyces capsulatus G186AR]
  misc_feature (48)..(419): NCBI GI: 240274463 Blast Desc: Mis12 domain-containing protein [Ajellomyces capsulatus H143]
  misc_feature (48)..(419): NCBI GI: 154282465 Blast Desc: conserved [Ajellomyces capsulatus NAm1] gi|150410208|gb|EDN05596.1| conserved [Ajellomyces capsulatus NAm1]
MHPVDPSSTNPNIDFTKWRLNSCRKPRRDRVLQLQTTEYGEIKMSSANSDTELLTEHFGYPPVSLIDDIINSVNILAERALNSVETGLLNVSPATLGFKPSKSTSKSTPADKEREKELAAERCKTEVEAGTHQLETLLCASIDRNFDKFEIYVLRNLLTVKTELRDWIRLRHYEGLDFSTTTSASSANTDLAHNENPKDRPTIESNTRLRNRLRESMKLNALLTAEKKRNDVLLGDLRRLVGDPGSTHIKTETNPDQDGNVDIERSPFAFLHEKADLASSGGGSLPLSTTAAFTLSQMEALRSLSSSLRTISSDLKSLPQPHTNTSHTNTNENEIESDASHDEDDGDSRGVGDKSGKKSWRRERVEYVEGATRRHLEHVQGLELGRLGEVRDGEWQGGRGFDRGALGVLEDVVAALGNERPQGGAASSGSGEAMEE

SEQ ID NO: 14811 - DNA, 1454 bp, Muscodor strobelii
  misc_feature: SGI EST ID NO. CUFF.35296.0
  misc_feature: Variant of the nucleotide sequence at SEQ ID NO 14809
caaaccgcgccgcgaccgcgttttacagctccaaacgacagaatacggcgaaatcaagatgtcgtccgccaattcagataccgagctcttgactgagcatttcggatatcctcccgtcagtctaatagacgacataataaacagcgtcaacattctcgccgagcgagctctcaactccgtcgaaaccggtctcctcaacgtctctccagcaactctcggtttcaagccctccaaatcaacctccaaatccacgcccgccgataaagaaagggaaaaagagcttgcagcagaacgctgcaaaaccgaagtcgaagcaggaacacaccaactcgagaccctactctgcgccagcatcgatcggaacttcgacaaattcgagatctacgtgctgcgcaatctcctgactgttaagacggagttgagggattggataaggcttcgtcattacgagggattggacttctcgactaccacctctgcgagttcagcaaacacggatttggcacataatgagaacccgaaagacagaccgacgatcgagtctaatactaggctgaggaacagattaagagagtcgatgaaactcaacgccctcctcacagcggagaaaaaacgcaacgatgtcctgttaggggatttacgaagacttgtgggcgatccggggtcgacgcatatcaagaccgagaccaatccagaccaagatggcaacgtagacatagagaggagtccatttgcgttcctccacgaaaaagcagatttagcgtcttcaggcggtggatcacttcccctctcaacaaccgctgcgttcacgctctctcagatggaggctcttcgttctttatcctcttctctgaggacaatatcgtcggacctgaaatcccttccccaaccccatacaaacacctcacatacaaacaccaacgaaaacgagattgaaagtgacgctagtcatgatgaagatgacggggatagtcgtggtgtgggggataagagtggcaagaagagctggaggagagaaagagtagagtacgtcgagggcgctactcgacgccatctcgaacatgtgcagggactagaactcggaagattaggcgaggttagggatggggagtggcagggaggacggggctttgataggggggcgttgggtgttcttgaggatgtcgttgcggctttggggaatgagagaccgcaaggtggagctgcgagctctgggagcggagaggcaatggaggaatgagtggtgttgttccctcgagggtatggacggggttgtgaggaatgatgggagagtcgtatatgcggtcttgtatgatgatgatgaaatgatgggtggtgtttaggatccggcgttggtgctgggtataccaatgatgagttttgcgacgcatgaatgaacaaaaatgatattctgtgatattctacgagcttttgttacgaatctttcattcgac

SEQ ID NO: 14812 - DNA, 951 bp, Muscodor strobelii
  misc_feature: SGI cDNA ID NO. 564891
  misc_feature: Reduced expression when VOC is produced
  misc_feature: Encodes the peptide sequence at SEQ ID NO 14813
atgtcaggaggaggatggaaaggtattgtgaaaaatggctggcatccagataccggagatggatcgatacgagggcaggtcaaaggactgataggccgtggcgattcctcatcctcgtccaatcgcgagggtcatgtcgcaatgcccatatcctctctccgggacccgtcatccttcgctccaccgccaaagcacgttgcagcttacggaaatactgacttgaatacctcaccgacccgatctacagctacgccatcctgcgcacccgctccggcagcaaattacgcgcaatcacctacctcatatactcaatcgccggcctatagcgggggacaagaacagcattatcaacaagcacatccagtagaggaagagaaaccggagccgaaaccctaccgcaccaatacatccggtctctcaactacgcatctcccgccgcctccaatgcgccgcgacggcgcagacggtcgggcgcaacagcctcaagcccaggcaccgcctgcatattcagtaacgaccgcaccggtggccaagaagccacctccatctttacctccacgactgcctgctcgtagtacaggaagcacgcccagtccaacccgagcaagtggtcacatagacacgggacgagggcaggtaaaccagggagcagtagatagactcggggctgctggtatatcagtgccggggttcggaataggggcaagcaaaccgccgccatctcccgtaaagagctccggaagaccagcgccggggcaaggccaggtcaacgagttgcaagcccgcttcgcacgtatgggtacttcggcggtgtcgcaaaacccgccatcagttgctgggaagcagaaaccaccgcctccaccggcgtcgaagaagccaatcgtgccaggtttagatggtggttccaatgcgcctcctcctgttccgttagcctcaaagcccaagttctga

SEQ ID NO: 14813 - protein, 316 aa, Muscodor strobelii
  misc_feature: SGI Peptide ID NO. 564891
  misc_feature (6)..(267): NCBI GI: 46111285 Blast Desc: FG02524.1 [Gibberella zeae PH-1]
  misc_feature (5)..(269): NCBI GI: 119494383 Blast Desc: NFIA_008670 [Neosartorya fischeri NRRL 181] gi|119412249|gb|EAW22190.1| conserved [Neosartorya fischeri NRRL 181]
  misc_feature (5)..(268): NCBI GI: 145230281 Blast Desc: An01g10310 [Aspergillus niger] gi|134055566|emb|CAK37212.1| [Aspergillus niger]
  misc_feature (5)..(268): NCBI GI: 212533679 Blast Desc: conserved [Penicillium marneffei ATCC 18224] gi|210072360|gb|EEA26449.1| conserved [Penicillium marneffei ATCC 18224]
  misc_feature (2)..(277): NCBI GI: 256725801 Blast Desc: NECHADRAFT_94564 [Nectria haematococca mpVI 77-13-4]
  misc_feature (5)..(266): NCBI GI: 154316281 Blast Desc: BC1G_03726 [Botryotinia fuckeliana B05.10] gi|150846512|gb|EDN21705.1| BC1G_03726 [Botryotinia fuckeliana B05.10]
  misc_feature (5)..(269): NCBI GI: 255930233 Blast Desc: Pc06g00620 [Penicillium chrysogenum Wisconsin 54-1255] gi|211581289|emb|CAP79055.1| Pc06g00620 [Penicillium chrysogenum Wisconsin 54-1255]
  misc_feature (6)..(266): NCBI GI: 169599266 Blast Desc: SNOG_02451 [Phaeosphaeria nodorum SN15] gi|111069543|gb|EAT90663.1| SNOG_02451 [Phaeosphaeria nodorum SN15]
  misc_feature (5)..(269): NCBI GI: 67517503 Blast Desc: AN0982.2 [Aspergillus nidulans FGSC A4] gi|40746855|gb|EAA66011.1| AN0982.2 [Aspergillus nidulans FGSC A4] gi|259488725|tpe|CBF88398.1| TPA: [Aspergillus nidulans FGSC
  misc_feature (6)..(266): NCBI GI: 189208662 Blast Desc: conserved [Pyrenophora tritici-repentis Pt-1C-BFP] gi|187976757|gb|EDU43383.1| conserved [Pyrenophora tritici-repentis Pt-1C-BFP]
  misc_feature: Useful for introducing or modulating the production of volatile compounds
MSGGGWKGIVKNGWHPDTGDGSIRGQVKGLIGRGDSSSSSNREGHVAMPISSLRDPSSFAPPPKHVAAYGNTDLNTSPTRSTATPSCAPAPAANYAQSPTSYTQSPAYSGGQEQHYQQAHPVEEEKPEPKPYRTNTSGLSTTHLPPPPMRRDGADGRAQQPQAQAPPAYSVTTAPVAKKPPPSLPPRLPARSTGSTPSPTRASGHIDTGRGQVNQGAVDRLGAAGISVPGFGIGASKPPPSPVKSSGRPAPGQGQVNELQARFARMGTSAVSQNPPSVAGKQKPPPPPASKKPIVPGLDGGSNAPPPVPLASKPKF

SEQ ID NO: 14814 - DNA, 2588 bp, Muscodor strobelii
  misc_feature: SGI EST ID NO. CUFF.35760.0
  misc_feature: Variant of the nucleotide sequence at SEQ ID NO 14812
tcgcaatccacttcatacgggtggaaatgcttgatagaatgaccttttaaattgcattgtctcgattttttcattaacatagaatttctacttattttactttaagtctctttgcttcctgcgctcccggtccttcaacgatctctcacgaactttcaaaatgtcaggaggaggatggaaaggtattgtgaaaaatggctggcatccagataccggagatggatcgatacgagggcaggtcaaaggactgataggccgtggcgattcctcatcctcgtccaatcgcgagggtcatgtcgcaatgcccatatcctctctccgggacccgtcatccttcgctccaccgccaaagcacgttgcagcttacggaaatactgacttgaatacctcaccgacccgatctacagctacgccatcctgcgcacccgctccggcagcaaattacgcgcaatcacctacctcatatactcaatcgccggcctatagcgggggacaagaacagcattatcaacaagcacatccagtagaggaagagaaaccggagccgaaaccctaccgcaccaatacatccggtctctcaactacgcatctcccgccgcctccaatgcgccgcgacggcgcagacggtcgggcgcaacagcctcaagcccaggcaccgcctgcatattcagtaacgaccgcaccggtggccaagaagccacctccatctttacctccacgactgcctgctcgtagtacaggaagcacgcccagtccaacccgagcaagtggtcacatagacacgggacgagggcaggtaaaccagggagcagtagatagactcggggctgctggtatatcagtgccggggttcggaataggggcaagcaaaccgccgccatctcccgtaaagagctccggaagaccagcgccggggcaaggccaggtcaacgagttgcaagcccgcttcgcacgtatgggtacttcggcggtgtcgcaaaacccgccatcagttgctgggaagcagaaaccaccgcctccaccggcgtcgaagaagccaatcgtgccaggtttagatggtggttccaatgcgcctcctcctgttccgttagcctcaaagcccaagttctgagcgaataatgcttgagattagtagtcagtatgtccttgccctaaagaagagagagaaaagcagagacaagtcgaatcaacaccacagcatatcgatattgggagagaaatgattttttgctaaggcctgtcggcctcagttgtgtgtccttcattgggcgcgtgatagagttatatctatctaagagacgtctttttgccacgtcgtaaacaaagaaaaataagtactagctgcgtcgtgcatcgtttctctccctctagagtggaggcatcatcatgacatttttcttggtggttttgttgatcaaccgccgcttagaccttcatctggtcgagaccgtgcttccagacaacgacgtagggggtgacaccgtcgtcacggtagttgaggagtacgaccctacagagatgtattgtcagttttaccaagtctagcctcgggagaatcacagagctgagcatgacaatggggaggaagacatacattccgtcgacgtccatgctctcgccagtgtaaaattcgtagtccttgaagttgccgaggaccttcttggagtaggcagcggcaccggtcttgaaggcagtgacctcggactcgggggcattggtcttggcaaggtgggcaaggacagccttcatgtaacctacagcatctgatcagtgatcgttctttatacgcactattttgtggattggaagcctacccttcaggtactttccataagagctcttgtcgaagctggtgggctggagacggaaagagtggatgatgttgttgaccttctgagcagagtcctcggtaccctcgtcagcctcctcggcggaagcgttggcaccagtgtctacaggggggcagcggatattagtatatttcgtggaatattaggtgaatgcgctgaggctgaagatggagcgctggcgtcacgtaccgacatcgacggcaccaatctcgatcatagcgcagtcggcctcgtagacgacaccgtcgacctccttgaagtcgaaagagtcggagagcagctcatccttgctatcggtaatggcgtcctaaggcggggttgcaggtcagtacgcgccgcatcatttctctgggtattctagaagatggagggttccatacacggaagataatcatattggcggtaggaggaggatgagtgactataagaagctgatgccgaagcgaatgtagttggggttggagagatgaagacgtgaggcgagaaagagacggcgggcgtgaaataaaaaggacgacgggggttttgcgaaataatgaggggcagatagattttggcaggcgcttctgagtggcccctcatttttcttgaatgtggaaaaagcggggctaacaggctagaatagttcaatatggactcaatggaggggcaacaggctggctagcagacactagttgaggtccctcgtttttttcttgctcattgcacgatgcacctcagattacatgcattttgtta

SEQ ID NO: 14815 - DNA, 516 bp, Muscodor strobelii
  misc_feature: SGI cDNA ID NO. 564892
  misc_feature: Encodes the peptide sequence at SEQ ID NO 14816
atgattatcttccgtgacgccattaccgatagcaaggatgagctgctctccgactctttcgacttcaaggaggtcgacggtgtcgtctacgaggccgactgcgctatgatcgagattggtgccgtcgatgtcgacactggtgccaacgcttccgccgaggaggctgacgagggtaccgaggactctgctcagaaggtcaacaacatcatccactctttccgtctccagcccaccagcttcgacaagagctcttatggaaagtacctgaagggttacatgaaggctgtccttgcccaccttgccaagaccaatgcccccgagtccgaggtcactgccttcaagaccggtgccgctgcctactccaagaaggtcctcggcaacttcaaggactacgaattttacactggcgagagcatggacgtcgacggaatggtcgtactcctcaactaccgtgacgacggtgtcaccccctacgtcgttgtctggaagcacggtctcgaccagatgaaggtctaa

SEQ ID NO: 14816 - protein, 171 aa, Muscodor strobelii
  misc_feature: SGI Peptide ID NO. 564892
  misc_feature (1)..(168): Pfam Id: PF00838 Pfam Desc: Translationally controlled tumour protein
  misc_feature (1)..(171): NCBI GI: 209736122 Blast Desc: Translationally-controlled tumor protein homolog [Salmo salar]
  misc_feature (1)..(171): NCBI GI: 116191963 Blast Desc: CHGG_05699 [Chaetomium globosum CBS 148.51] gi|88181612|gb|EAQ89080.1| CHGG_05699 [Chaetomium globosum CBS 148.51]
  misc_feature (1)..(171): NCBI GI: 255722557 Blast Desc: CTRG_00995 [Candida tropicalis MYA-3404] gi|240136702|gb|EER36255.1| CTRG_00995 [Candida tropicalis MYA-3404]
  misc_feature (1)..(171): NCBI GI: 241957938 Blast Desc: microtubule and mitochondria-interacting protein, ; translation machinery-associated protein, ; translationally-controlled tumor protein homolog, [Candida CD36]
  misc_feature (1)..(171): NCBI GI: 68476035 Blast Desc: CaO19.3268 [Candida albicans SC5314] gi|68476166|ref|XP_717892.1| CaO19.10778 [Candida albicans SC5314] gi|74586298|sp|Q5A860.1|TCTP_CANAL RecName: tumor protein
  misc_feature (1)..(171): NCBI GI: 256726202 Blast Desc: NECHADRAFT_70417 [Nectria haematococca mpVI 77-13-4]
  misc_feature (1)..(171): NCBI GI: 85084653 Blast Desc: NCU06464 [Neurospora crassa OR74A] gi|74628441|sp|Q7RYV5.1|TCTP_NEUCR RecName: Full=Translationally-controlled tumor protein homolog; Short=TCTP
  misc_feature (1)..(171): NCBI GI: 126138712 Blast Desc: Translationally controlled tumor protein homolog (TCTP) [Pichia stipitis CBS 6054] gi|126093157|gb|ABN67850.1| Translationally controlled tumor protein homolog (TCTP) [Pichia
  misc_feature (1)..(171): NCBI GI: 112824341 Blast Desc: TCTP [Alternaria alternata]
  misc_feature (1)..(171): NCBI GI: 254568654 Blast Desc: Protein that associates with ribosomes [Pichia pastoris GS115] gi|238031234|emb|CAY69157.1| Protein that associates with ribosomes [Pichia pastoris GS115]
MIIFRDAITDSKDELLSDSFDFKEVDGVVYEADCAMIEIGAVDVDTGANASAEEADEGTEDSAQKVNNIIHSFRLQPTSFDKSSYGKYLKGYMKAVLAHLAKTNAPESEVTAFKTGAAAYSKKVLGNFKDYEFYTGESMDVDGMVVLLNYRDDGVTPYVVVWKHGLDQMKV

SEQ ID NO: 14817 - DNA, 2269 bp, Muscodor strobelii
  misc_feature: SGI EST ID NO. CUFF.35761.1
  misc_feature: Variant of the nucleotide sequence at SEQ ID NO 14815
gctagccagcctgttgcccctccattgagtccatattgaactattctagcctgttagccccgctttttccacattcaagaaaaatgaggggccactcagaagcgcctgccaaaatctatctgcccctcattatttcgcaaaacccccgtcgtcctttttatttcacgcccgccgtctctttctcgcctcacgtcttcatctctccaaccccaactacattcgcttcggcatcagcttcttatagtcactcatcctcctcctaccgccaatatgattatcttccgtgacgccattaccgatagcaaggatgagctgctctccgactctttcgacttcaaggaggtcgacggtgtcgtctacgaggccgactgcgctatgatcgagattggtgccgtcgatgtcgacactggtgccaacgcttccgccgaggaggctgacgagggtaccgaggactctgctcagaaggtcaacaacatcatccactctttccgtctccagcccaccagcttcgacaagagctcttatggaaagtacctgaagggttacatgaaggctgtccttgcccaccttgccaagaccaatgcccccgagtccgaggtcactgccttcaagaccggtgccgctgcctactccaagaaggtcctcggcaacttcaaggactacgaattttacactggcgagagcatggacgtcgacggaatggtcgtactcctcaactaccgtgacgacggtgtcaccccctacgtcgttgtctggaagcacggtctcgaccagatgaaggtctaagcggcggttgatcaacaaaaccaccaagaaaaatgtcatgatgatgcctccactctagagggagagaaacgatgcacgacgcagctagtacttatttttctttgtttacgacgtggcaaaaagacgtctcttagatagatataactctatcacgcgcccaatgaaggacacacaactgaggccgacaggccttagcaaaaaatcatttctctcccaatatcgatatgctgtggtgttgattcgacttgtctctgcttttctctctcttctttagggcaaggacatactgactactaatctcaagcattattcgctcagaacttgggctttgaggctaacggaacaggaggaggcgcattggaaccaccatctaaacctggcacgattggcttcttcgacgccggtggaggcggtggtttctgcttcccagcaactgatggcgggttttgcgacaccgccgaagtacccatacgtgcgaagcgggcttgcaactcgttgacctggccttgccccggcgctggtcttccggagctctttacgggagatggcggcggtttgcttgcccctattccgaaccccggcactgatataccagcagccccgagtctatctactgctccctggtttacctgccctcgtcccgtgtctatgtgaccacttgctcgggttggactgggcgtgcttcctgtactacgagcaggcagtcgtggaggtaaagatggaggtggcttcttggccaccggtgcggtcgttactgaatatgcaggcggtgcctgggcttgaggctgttgcgcccgaccgtctgcgccgtcgcggcgcattggaggcggcgggagatgcgtagttgagagaccggatgtattggtgcggtagggtttcggctccggtttctcttcctctactggatgtgcttgttgataatgctgttcttgtcccccgctataggccggcgattgagtatatgaggtaggtgattgcgcgtaatttgctgccggagcgggtgcgcaggatggcgtagctgtagatcgggtcggtgaggtattcaagtcagtatttccgtaagctgcaacgtgctttggcggtggagcgaaggatgacgggtcccggagagaggatatgggcattgcgacatgaccctcgcgattggacgaggatgaggaatcgccacggcctatcagtcctttctgtatgatggtaagttaagagaagtgaaagcgaaaagaagcatatgaggcgacatacgacctgccctcgtatcgatccatctccggtatctggatgccagccatttttcacaatacctttccatcctcctcctgacattttgaaagttcgtgagagatcgttgaaggaccgggagcgcaggaagcaaagagacttaaagtaaaataagtagaaattctatgttaatgaaaaaatcgagacaatgcaatttaaaaggtcattctatcaagcatttccacccgtatgaagtggattgcga

SEQ ID NO: 14818 - DNA, 525 bp, Muscodor strobelii
  misc_feature: SGI cDNA ID NO. 564893
  misc_feature: Encodes the peptide sequence at SEQ ID NO 14819
atgattatcttccgtgacgccattaccgatagcaaggatgagctgctctccgactctttcgacttcaaggaggtcgacggtgtcgtctacgaggccgactgcgctatgatcgagattggtgccgtcgatgtcgacactggtgccaacgcttccgccgaggaggctgacgagggtaccgaggactctgctcagaaggtcaacaacatcatccactctttccgtctccagcccaccagcttcgacaagagctcttatggaaagtacctgaaggatgctgtaggttacatgaaggctgtccttgcccaccttgccaagaccaatgcccccgagtccgaggtcactgccttcaagaccggtgccgctgcctactccaagaaggtcctcggcaacttcaaggactacgaattttacactggcgagagcatggacgtcgacggaatggtcgtactcctcaactaccgtgacgacggtgtcaccccctacgtcgttgtctggaagcacggtctcgaccagatgaaggtctaa

SEQ ID NO: 14819 - protein, 174 aa, Muscodor strobelii
  misc_feature: SGI Peptide ID NO. 564893
  misc_feature (1)..(171): Pfam Id: PF00838 Pfam Desc: Translationally controlled tumour protein
  misc_feature (1)..(174): NCBI GI: 209736122 Blast Desc: Translationally-controlled tumor protein homolog [Salmo salar]
  misc_feature (1)..(174): NCBI GI: 116191963 Blast Desc: CHGG_05699 [Chaetomium globosum CBS 148.51] gi|88181612|gb|EAQ89080.1| CHGG_05699 [Chaetomium globosum CBS 148.51]
  misc_feature (1)..(174): NCBI GI: 255722557 Blast Desc: CTRG_00995 [Candida tropicalis MYA-3404] gi|240136702|gb|EER36255.1| CTRG_00995 [Candida tropicalis MYA-3404]
  misc_feature (1)..(174): NCBI GI: 241957938 Blast Desc: microtubule and mitochondria-interacting protein, ; translation machinery-associated protein, ; translationally-controlled tumor protein homolog, [Candida CD36]
  misc_feature (1)..(174): NCBI GI: 68476035 Blast Desc: CaO19.3268 [Candida albicans SC5314] gi|68476166|ref|XP_717892.1| CaO19.10778 [Candida albicans SC5314] gi|74586298|sp|Q5A860.1|TCTP_CANAL RecName: tumor protein
  misc_feature (1)..(174): NCBI GI: 85084653 Blast Desc: NCU06464 [Neurospora crassa OR74A] gi|74628441|sp|Q7RYV5.1|TCTP_NEUCR RecName: Full=Translationally-controlled tumor protein homolog; Short=TCTP
  misc_feature (1)..(174): NCBI GI: 256726202 Blast Desc: NECHADRAFT_70417 [Nectria haematococca mpVI 77-13-4]
  misc_feature (1)..(174): NCBI GI: 126138712 Blast Desc: Translationally controlled tumor protein homolog (TCTP) [Pichia stipitis CBS 6054] gi|126093157|gb|ABN67850.1| Translationally controlled tumor protein homolog (TCTP) [Pichia
  misc_feature (1)..(174): NCBI GI: 112824341 Blast Desc: TCTP [Alternaria alternata]
  misc_feature (1)..(174): NCBI GI: 254568654 Blast Desc: Protein that associates with ribosomes [Pichia pastoris GS115] gi|238031234|emb|CAY69157.1| Protein that associates with ribosomes [Pichia pastoris GS115]
MIIFRDAITDSKDELLSDSFDFKEVDGVVYEADCAMIEIGAVDVDTGANASAEEADEGTEDSAQKVNNIIHSFRLQPTSFDKSSYGKYLKDAVGYMKAVLAHLAKTNAPESEVTAFKTGAAAYSKKVLGNFKDYEFYTGESMDVDGMVVLLNYRDDGVTPYVVVWKHGLDQMKV

SEQ ID NO: 14820 - DNA, 2269 bp, Muscodor strobelii; identical to SEQ ID NO: 14817
  misc_feature: SGI EST ID NO. CUFF.35761.1
  misc_feature: Variant of the nucleotide sequence at SEQ ID NO 14818

SEQ ID NO: 14821 - DNA, 1113 bp, Muscodor strobelii
  misc_feature: SGI cDNA ID NO. 564894
  misc_feature: Reduced expression when VOC is produced
  misc_feature: Encodes the peptide sequence at SEQ ID NO 14822
atggcgacgaatttgacggtctcgacagacctccctcccctcccgtcctacaccttatccgaggctcccgacttcatatcatggcttccagacttctacatgtctgcggtcggccccgtcatcgcctactggggtctctctcttattttccacatcatcgacgtctatgatcttttcccgcagtaccgactacacacgcccgccgagatcgcccagcgcaaccgagctacccgcttcgaagtcttcaaagatgttatcgttcagcagcttatccagattggattggccattgtcctgaccctgaccgacccgccgcagatggtgggaagcgaagaatacgacgtcgccgtctgggctaccagggttcgtctcgcgcagaggggtctgcctgcgcttctgggtttgctaggcatcaatgctgcctcggtctctaagaatatggccttgtcgcatccgttcttggccggcgcacttgctggaggccactatcctttcctaaccaccatggccgacgcaacggacggcagctctgttgcctccttcgccacctgggaactcatggtcgccaaggcaatctactggcttatcattcctagcatccagttcatcacggctgtcatcgtggtggatacctggcagtactttgtgcatcgtggcatgcacatgaacaagtgggcttacacccagttccacgcacgacaccaccgactctacgtcccctatgcttacggggcactgtacaacacccccttcgaggcactgaccgatactctcggtgcaggacttgcttacaaagtcggatttctgagcgtcaaacagggcatcgtcttcttcatcttctcgacgatcaagactgttgatgaccactgcggatatgcactgccatgggacccactccagcatataaccggcaacaacgccacttaccacgacattcaccaccaaagctggggaatcaagaccaacttctcacagcccttcttcaccttctgggaccgtgtgctaggcacgatttggaaaggcgacacaaggctccgatacgagcgctcgagaaacaacgcggcaagcatcctagaagccgaggctaagaaagcatctgccaaggcccaatga

SEQ ID NO: 14822 - protein, 370 aa, Muscodor strobelii
  misc_feature: SGI Peptide ID NO. 564894
  misc_feature (202)..(315): Pfam Id: PF04116 Pfam Desc: Fatty acid hydroxylase superfamily
  misc_feature (2)..(344): NCBI GI: 261354282 Blast Desc: sphingolipid C4-hydroxylase SUR2 [Verticillium albo-atrum VaMs.102]
  misc_feature (9)..(368): NCBI GI: 156037614 Blast Desc: SS1G_12521 [Sclerotinia sclerotiorum 1980] gi|154697929|gb|EDN97667.1| SS1G_12521 [Sclerotinia sclerotiorum 1980]
  misc_feature (9)..(368): NCBI GI: 154316275 Blast Desc: BC1G_03723 [Botryotinia fuckeliana B05.10] gi|150846509|gb|EDN21702.1| BC1G_03723 [Botryotinia fuckeliana B05.10]
  misc_feature (4)..(349): NCBI GI: 39976695 Blast Desc: MGG_06250 [Magnaporthe grisea 70-15] gi|145016356|gb|EDK00846.1| MGG_06250 [Magnaporthe grisea 70-15]
  misc_feature (1)..(368): NCBI GI: 121700641 Blast Desc: sphinganine hydroxylase Sur2, [Aspergillus clavatus NRRL 1] gi|119396728|gb|EAW07159.1| sphinganine hydroxylase Sur2, [Aspergillus clavatus NRRL 1]
  misc_feature (8)..(364): NCBI GI: 256725802 Blast Desc: [Nectria haematococca mpVI 77-13-4]
  misc_feature (1)..(370): NCBI GI: 67516717 Blast Desc: AN0640.2 [Aspergillus nidulans FGSC A4] gi|40746027|gb|EAA65183.1| AN0640.2 [Aspergillus nidulans FGSC A4] gi|259489093|tpe|CBF89079.1| TPA: sphinganine hydroxylase A4]
  misc_feature (48)..(351): NCBI GI: 164425073 Blast Desc: protein SUR2 [Neurospora crassa OR74A] gi|157070778|gb|EAA28120.2| protein SUR2 [Neurospora crassa OR74A]
  misc_feature (1)..(370): NCBI GI: 119494351 Blast Desc: sphinganine hydroxylase Sur2, [Neosartorya fischeri NRRL 181] gi|119412233|gb|EAW22174.1| sphinganine hydroxylase Sur2, [Neosartorya fischeri NRRL 181]
  misc_feature (1)..(361): NCBI GI: 70996596 Blast Desc: sphinganine hydroxylase Sur2 [Aspergillus fumigatus Af293] gi|66850688|gb|EAL91015.1| sphinganine hydroxylase Sur2, [Aspergillus fumigatus Af293] gi|159131789|gb|EDP56902.1| Sur2,
  misc_feature (145)..(337): SWISSPROT Homolog: EC 1.14.13.72 Methylsterol monooxygenase
  misc_feature: Useful for introducing or modulating the production of volatile compounds
MATNLTVSTDLPPLPSYTLSEAPDFISWLPDFYMSAVGPVIAYWGLSLIFHIIDVYDLFPQYRLHTPAEIAQRNRATRFEVFKDVIVQQLIQIGLAIVLTLTDPPQMVGSEEYDVAVWATRVRLAQRGLPALLGLLGINAASVSKNMALSHPFLAGALAGGHYPFLTTMADATDGSSVASFATWELMVAKAIYWLIIPSIQFITAVIVVDTWQYFVHRGMHMNKWAYTQFHARHHRLYVPYAYGALYNTPFEALTDTLGAGLAYKVGFLSVKQGIVFFIFSTIKTVDDHCGYALPWDPLQHITGNNATYHDIHHQSWGIKTNFSQPFFTFWDRVLGTIWKGDTRLRYERSRNNAASILEAEAKKASAKAQ

SEQ ID NO: 14823 - DNA, 3160 bp, Muscodor strobelii
  misc_feature: SGI EST ID NO. CUFF.36344.0
  misc_feature: Variant of the nucleotide sequence at SEQ ID NO 14821
cgcgtgccaatcttttcgatcaatgcgccgtacactcctcgtcgagccaaactcggacgtgggagcaggcgacacaattcctagctattcctagcgcaacccaaacctttcgatcgaccctcgtcttacttattataccttcatttcagcccgctcactcccggcttaatctccctctcacttaacgacactccttcaatcgcttccttgcctcatttgttttcttccagattctctatactattgtaattgtcctcgtctccccacctgtctggctccttaacccgccatggcgacgaatttgacggtctcgacagacctccctcccctcccgtcctacaccttatccgaggctcccgacttcatatcatggcttccagacttctacatgtctgcggtcggccccgtcatcgcctactggggtctctctcttattttccacatcatcgacgtctatgatcttttcccgcagtaccgactacacacgcccgccgagatcgcccagcgcaaccgagctacccgcttcgaagtcttcaaagatgttatcgttcagcagcttatccagattggattggccattgtcctgaccctgaccgacccgccgcagatggtgggaagcgaagaatacgacgtcgccgtctgggctaccagggttcgtctcgcgcagaggggtctgcctgcgcttctgggtttgctaggcatcaatgctgcctcggtctctaagaatatggccttgtcgcatccgttcttggccggcgcacttgctggaggccactatcctttcctaaccaccatggccgacgcaacggacggcagctctgttgcctccttcgccacctgggaactcatggtcgccaaggcaatctactggcttatcattcctagcatccagttcatcacggctgtcatcgtggtggatacctggcagtactttgtgcatcgtggcatgcacatgaacaagtgggcttacacccagttccacgcacgacaccaccgactctacgtcccctatgcttacggggcactgtacaacacccccttcgaggcactgaccgatactctcggtgcaggacttgcttacaaagtcggatttctgagcgtcaaacagggcatcgtcttcttcatcttctcgacgatcaagactgttgatgaccactgcggatatgcactgccatgggacccactccagcatataaccggcaacaacgccacttaccacgacattcaccaccaaagctggggaatcaagaccaacttctcacagcccttcttcaccttctgggaccgtgtgctaggcacgatttggaaaggcgacacaaggctccgatacgagcgctcgagaaacaacgcggcaagcatcctagaagccgaggctaagaaagcatctgccaaggcccaatgaaacgacctttaatcatagtaagagaaaaagaaagacttcgattcgttgtatcaaatatagggtttgccggtttcattgtattggtcatcaggaagcgagggaaatatttaggattgagtcacgtgtcggagaaaagaagaggaacgactgttgccatccagtaaatggggtgacatgagaagcacgcccatttactgttcgattctgaaaaggggagagcttctcccgcgaccacagcacatcatacaacaactccatccgcgctgtgttgtaacactctgtacatcaccatcaaatcaacttgtaccagcactcagcagtctttcgagaattgacaaaacgcgaccaatttccacgcattgcgagaataggcattgccggactgagcatttggataaaggacgggcgggaacccggacacgaatgagtagtgtttgcgcctggaacctttacacataccaaatttatgcttggcaactaatgataatataccttttttactcaattcatgactagctctaagatcttgaggccttatgatcgtacagtttctatataaccctttcatctattttttctcatctggcctctgttaatgccagttcgaacacaatgattccctagaccttatcaatgtcatcgtaatcataccctagttcatatttcctcggaaatccccataatgaagtcttcctcaactcatccttgcccttgccacctcttttctccaacctactcactcaccaccctccaacaccgtccccctaagccttcttccccttcaccccgctccccgccccaacacgtccaaagactcccaacaacgtcataatcctaataacattaagcacagcacttactccaaccccaccagcgagcatatcattccactcggaaggattgaagaacaattcagggcctacgccgacgtagcaggaccagatatggccgtagtctgccagtccgacggcgaagagataccattttgtggtgggggagtttgtggtccagcagcagattaacgccattgcggcgaggagcgcgtatacgtttactagttggagggttattatttgggcctgttgggggttttcgttagctaagggggtttttgagggatcgaagacggtttggggtgacggttagttgttatataagagttgagtatttatttaggggatgagatgaggggagatttgtgagatgtgagatagctgggggcgtacttgtggtgggaaggctgagacgtcggcgggtgggagagggagttcgtggttttgcgcttgggctgcgtagtaggtgtatgggtctgccattgaggttatgtatgcccagaccctggtaaagcgttagtgaactgtggtttctttgcaaaatacaagaatgaggttacgtacaacagggctggctcgatgacgccgaagacgaagaaggggatcttcgggagacaggttatcgccatttttgctttgcgatgtgggcggtgttggcgttggcgttggtgtggtttagatgcggtgttgcggacgatgcggaacgggccgggtagatcggacttggtgttaagtgttccgattgggaaaaagtgaagatattcagggtccgcgatcttgagcaatcaaaattaagacaagagaaaatatgatgattgcgagggaaggtgttggttccgtctcagttacgattactctacctgcaaggagactcccattcgatctatcaactctcacatgcatgtcctgcctatcgaggttgcaa

SEQ ID NO: 14824 - DNA, 492 bp, Muscodor strobelii
  misc_feature: SGI cDNA ID NO. 564895
  misc_feature: Elevated expression when VOC is produced
  misc_feature: Encodes the peptide sequence at SEQ ID NO 14825
atggcgataacctgtctcccgaagatccccttcttcgtcttcggcgtcatcgagccagccctgttggtctgggcatacataacctcaatggcagacccatacacctactacgcagcccaagcgcaaaaccacgaactccctctcccacccgccgacgtctcagccttcccaccacaagcccaaataataaccctccaactagtaaacgtatacgcgctcctcgccgcaatggcgttaatctgctgctggaccacaaactcccccaccacaaaatggtatctcttcgccgtcggactggcagactacggccatatctggtcctgctacgtcggcgtaggccctgaattgttcttcaatccttccgagtggaatgatatgctcgctggtggggttggagtaagtgctgtgcttaatgttattaggattatgacgttgttgggagtctttggacgtgttggggcggggagcggggtgaaggggaagaaggcttag

SEQ ID NO: 14825 - protein, 163 aa, Muscodor strobelii
  misc_feature: SGI Peptide ID NO. 564895
  misc_feature (1)..(161): NCBI GI: 171691550 Blast Desc: protein product [Podospora anserina] gi|170945723|emb|CAP71836.1| protein product [Podospora anserina]
  misc_feature (56)..(163): NCBI GI: 171677031 Blast Desc: protein product [Podospora anserina] gi|170936583|emb|CAP61242.1| protein product [Podospora anserina]
  misc_feature (1)..(162): NCBI GI: 67537252 Blast Desc: AN4796.2 [Aspergillus nidulans FGSC A4] gi|40741176|gb|EAA60366.1| AN4796.2 [Aspergillus nidulans FGSC A4] gi|259482358|tpe|CBF76765.1| TPA: conserved [Aspergillus FGSC
  misc_feature (4)..(162): NCBI GI: 225559266 Blast Desc: conserved [Ajellomyces capsulatus G186AR]
  misc_feature (4)..(161): NCBI GI: 121704884 Blast Desc: conserved [Aspergillus clavatus NRRL 1] gi|119398851|gb|EAW09279.1| conserved [Aspergillus clavatus NRRL 1]
  misc_feature (4)..(162): NCBI GI: 240282200 Blast Desc: conserved [Ajellomyces capsulatus H143]
  misc_feature (4)..(159): NCBI GI: 212544584 Blast Desc: PMAA_003000 [Penicillium marneffei ATCC 18224] gi|210065415|gb|EEA19509.1| PMAA_003000 [Penicillium marneffei ATCC 18224]
  misc_feature (4)..(162): NCBI GI: 154273929 Blast Desc: conserved [Ajellomyces capsulatus NAm1] gi|150415424|gb|EDN10777.1| conserved [Ajellomyces capsulatus NAm1]
  misc_feature (1)..(150): NCBI GI: 115402487 Blast Desc: conserved [Aspergillus terreus NIH2624] gi|114189166|gb|EAU30866.1| conserved [Aspergillus terreus NIH2624]
  misc_feature (4)..(159): NCBI GI: 242812877 Blast Desc: TSTA_100560 [Talaromyces stipitatus ATCC 10500] gi|218714389|gb|EED13812.1| TSTA_100560 [Talaromyces stipitatus ATCC 10500]
  misc_feature: Useful for introducing or modulating the production of volatile compounds
MAITCLPKIPFFVFGVIEPALLVWAYITSMADPYTYYAAQAQNHELPLPPADVSAFPPQAQIITLQLVNVYALLAAMALICCWTTNSPTTKWYLFAVGLADYGHIWSCYVGVGPELFFNPSEWNDMLAGGVGVSAVLNVIRIMTLLGVFGRVGAGSGVKGKKA

SEQ ID NO: 14826 - DNA, 3027 bp, Muscodor strobelii
  misc_feature: SGI EST ID NO. CUFF.36345.1
  misc_feature: Variant of the nucleotide sequence at SEQ ID NO 14824
gcacgattgattgcaacctcgataggcaggacatgcatgtgagagttgatagatcgaatgggagtctccttgcaggtagagtaatcgtaactgagacggaaccaacaccttccctcgcaatcatcatattttctcttgtcttaattttgattgctcaagatcgcggaccctgaatatcttcactttttcccaatcggaacacttaacaccaagtccgatctacccggcccgttccgcatcgtccgcaacaccgcatctaaaccacaccaacgccaacgccaacaccgcccacatcgcaaagcaaaaatggcgataacctgtctcccgaagatccccttcttcgtcttcggcgtcatcgagccagccctgttggtctgggcatacataacctcaatggcagacccatacacctactacgcagcccaagcgcaaaaccacgaactccctctcccacccgccgacgtctcagccttcccaccacaagcccaaataataaccctccaactagtaaacgtatacgcgctcctcgccgcaatggcgttaatctgctgctggaccacaaactcccccaccacaaaatggtatctcttcgccgtcggactggcagactacggccatatctggtcctgctacgtcggcgtaggccctgaattgttcttcaatccttccgagtggaatgatatgctcgctggtggggttggagtaagtgctgtgcttaatgttattaggattatgacgttgttgggagtctttggacgtgttggggcggggagcggggtgaaggggaagaaggcttagggggacggtgttggagggtggtgagtgagtaggttggagaaaagaggtggcaagggcaaggatgagttgaggaagacttcattatggggatttccgaggaaatatgaactagggtatgattacgatgacattgataaggtctagggaatcattgtgttcgaactggcattaacagaggccagatgagaaaaaatagatgaaagggttatatagaaactgtacgatcataaggcctcaagatcttagagctagtcatgaattgagtaaaaaaggtatattatcattagttgccaagcataaatttggtatgtgtaaaggttccaggcgcaaacactactcattcgtgtccgggttcccgcccgtcctttatccaaatgctcagtccggcaatgcctattctcgcaatgcgtggaaattggtcgcgttttgtcaattctcgaaagactgctgagtgctggtacaagttgatttgatggtgatgtacagagtgttacaacacagcgcggatggagttgttgtatgatgtgctgtggtcgcgggagaagctctccccttttcagaatcgaacagtaaatgggcgtgcttctcatgtcaccccatttactggatggcaacagtcgttcctcttcttttctccgacacgtgactcaatcctaaatatttccctcgcttcctgatgaccaatacaatgaaaccggcaaaccctatatttgatacaacgaatcgaagtctttctttttctcttactatgattaaaggtcgtttcattgggccttggcagatgctttcttagcctcggcttctaggatgcttgccgcgttgtttctcgagcgctcgtatcggagccttgtgtcgcctttccaaatcgtgcctagcacacggtcccagaaggtgaagaagggctgtgagaagttggtcttgattccccagctttggtggtgaatgtcgtggtaagtggcgttgttgccggttatatgctggagtgggtcccatggcagtgcatatccgcagtggtcatcaacagtcttgatcgtcgagaagatgaagaagacgatgccctgtttgacgctcagaaatccgactttgtaagcaagtcctgcaccgagagtatcggtcagtgcctcgaagggggtgttgtacagtgccccgtaagcataggggacgtagagtcggtggtgtcgtgcgtggaactgggctatcgcattgttagttgcttgccggcctacgtaaactccaagctacatcggttggaactcactgtaagcccacttgttcatgtgcatgccacgatgcacaaagtactgccaggtatccaccacgatgacagccgtgatgaactggatgctaggaatgataagccagtagattgccttggcgaccatgagttcccaggtggcgaaggaggcaacagagctgccgtccgttgcgtcggccatggtggttaggaaaggatagtggcctccagcaagtgcgccggccaagaacggatgcgacaaggccatattcttagagaccgaggcagcattgatgcctagcaaacccagaagcgcaggcagacccctctgcgcgagacgaaccctggtagcccagacggcgacgtcgtattcttcgcttcccaccatctgcggcgggtcggtcagggtcaggacaatggccaatccaatctggataagctgctgaacgataacatctttgaagacttcgaagcgggtagctcggttgcgctgggcgatctcggcgggcgtgtgtagtcggtactgcgggaaaagatcatagacgtcgatgatgtggaaaataagagagagaccccagtaggcgatgacggggccgaccgcagacatgtagaagtctggaagccatgatatgaagtcgggagcctcggataaggtgtaggacgggaggggagggaggtctgtcgagaccgtcaaattcgtcgccatggcgggttaaggagccagacaggtggggagacgaggacaattacaatagtatagagaatctggaagaaaacaaatgaggcaaggaagcgattgaaggagtgtcgttaagtgagagggagattaagccgggagtgagcgggctgaaatgaaggtataataagtaagacgagggtcgatcgaaaggtttgggttgcgctaggaatagctaggaattgtgtcgcctgctcccacgtccgagtttggctcgacgaggagtgtacggcgcattgatcgaaaagattggcacgcg

SEQ ID NO: 14827 - DNA, 1551 bp, Muscodor strobelii
  misc_feature: SGI cDNA ID NO. 564896
  misc_feature: Elevated expression when VOC is produced
  misc_feature: Encodes the peptide sequence at SEQ ID NO 14828
atggaaattgcacccaagatatttcctcctcctgccacaacagcgaaagctgtaaagctaccacggggaagtttcatgatcttcgtcaagctctaccgcggcaggatcgtccctattcccgttcgcaaatcggactcattagatgcgctgatggaggcaatctggcagaaaatgggaatgccaccggatcagcagcgcgtcatttttggcggtctacagctagagagaaatcgcacgatggaagactatggcatagaaaagggttcggttgtgcatttagtcctgagacttaggggcggagccaccgtcttgccaggtactgagctaagggagctcgacgttgttcgcggacctcatcagccacagcctccagaatctctcaagctgaaaaaataccaactactgctctcatggatcagagctaagagaggatatgactcgactatgtggagggttcttggtcaattccagctagtgctttggaattcctggcagcatattttgatattggccattcctgtgggactggtcctgagatatatgggctaccagtcgccagccgtattcgtaattaacttcgtcgccgtcctaccaagtgcgtacaacattgaggaagcggtcttcagtctcactcagtatgctaatgagaccatgggtgggctgcttaggatgtcacttgacaatattgttcaactcatcacatcggtgatacttcttcgcaacgaccaggtgcctgtgctcaaaacatcccttatcgggactgttttgtcaaacgtccttctgatgagcggattgtctttcttcgctggtggcatacaacgacgcgatcagtattttgacgggacacgcgcccaggtctgggggagtatactacttttggttgtcgtcagcctcttggctcctacgatatctcatctgctcaacatctctgacttgaatgacgtgctcgtacaatctcgagggtcttctgttctcctccttgggtcgtatggtctctacgtcttgtactgtctcaagactcataacgaacccgattatgagaccgatagaggagataatgaagatgcagtgacagaagaacctaaggaccgtccgtatttgactctcccagcggcgattctcacattggccatatttggcactttgctgggtttcaacattcagcttgcagcggacagtctacagtcactcctcgagaataccactctcaccccaacatttgtcgggctcgtcatcatgcctctactgaatacaaaccacctgccactcctccttgcatacaaagatcagatagatctgagcctcgacctgaccatcactaaatctatacagactgtgttggtcgtagtaccgcttaccgtcctggtctcatggggcatggatggcgaagagatgactctactcttcagcgggttcgaggtctcatccgtattcgccgccgtcctggtcgtgaaccacgtgttaagcagtggacggagcgattggttgcaaggggctttgatgacgcaggcttatgtgattatctctgttgcgtccttttttgtgccgtga

SEQ ID NO: 14828 - protein, 516 aa, Muscodor strobelii
  misc_feature: SGI Peptide ID NO. 564896
  misc_feature (30)..(98): Pfam Id: PF00240 Pfam Desc: Ubiquitin family
  misc_feature (144)..(516): NCBI GI: 261188600 Blast Desc: calcium/proton exchanger [Ajellomyces dermatitidis SLH14081] gi|239593072|gb|EEQ75653.1| calcium/proton exchanger [Ajellomyces dermatitidis SLH14081]
  misc_feature (144)..(516): NCBI GI: 239606223 Blast Desc: calcium/proton exchanger [Ajellomyces dermatitidis ER-3]
  misc_feature (144)..(516): NCBI GI: 225558416 Blast Desc: vacuolar H+/Ca2+ exchanger [Ajellomyces capsulatus G186AR]
  misc_feature (146)..(514): NCBI GI: 67901046 Blast Desc: AN7510.2 [Aspergillus nidulans FGSC A4] gi|40742900|gb|EAA62090.1| AN7510.2 [Aspergillus nidulans FGSC A4] gi|259483823|tpe|CBF79529.1| TPA: Vacuolar Ca(2+)/H(+) FGSC
  misc_feature (150)..(513): NCBI GI: 238501804 Blast Desc: vacuolar H+/Ca2+ exchanger [Aspergillus flavus NRRL3357] gi|220692373|gb|EED48720.1| vacuolar H+/Ca2+ exchanger [Aspergillus flavus NRRL3357]
  misc_feature (150)..(513): NCBI GI: 169769330 Blast Desc: [Aspergillus oryzae RIB40] gi|83766993|dbj|BAE57133.1| protein product [Aspergillus oryzae]
  misc_feature (128)..(515): NCBI GI: 255948360 Blast Desc: Pc22g09350 [Penicillium chrysogenum Wisconsin 54-1255] gi|211591964|emb|CAP98223.1| Pc22g09350 [Penicillium chrysogenum Wisconsin 54-1255]
  misc_feature (151)..(494): NCBI GI: 154319732 Blast Desc: BC1G_02347 [Botryotinia fuckeliana B05.10] gi|150856005|gb|EDN31197.1| BC1G_02347 [Botryotinia fuckeliana B05.10]
  misc_feature (139)..(511): NCBI GI: 242826234 Blast Desc: conserved [Talaromyces stipitatus ATCC 10500] gi|218712417|gb|EED11843.1| conserved [Talaromyces stipitatus ATCC 10500]
  misc_feature (142)..(516): NCBI GI: 255710815 Blast Desc: KLTH0A05368p [Lachancea thermotolerans] gi|238933068|emb|CAR21249.1| KLTH0A05368p [Lachancea thermotolerans]
  misc_feature: Useful for introducing or modulating the production of volatile compounds
MEIAPKIFPPPATTAKAVKLPRGSFMIFVKLYRGRIVPIPVRKSDSLDALMEAIWQKMGMPPDQQRVIFGGLQLERNRTMEDYGIEKGSVVHLVLRLRGGATVLPGTELRELDVVRGPHQPQPPESLKLKKYQLLLSWIRAKRGYDSTMWRVLGQFQLVLWNSWQHILILAIPVGLVLRYMGYQSPAVFVINFVAVLPSAYNIEEAVFSLTQYANETMGGLLRMSLDNIVQLITSVILLRNDQVPVLKTSLIGTVLSNVLLMSGLSFFAGGIQRRDQYFDGTRAQVWGSILLLVVVSLLAPTISHLLNISDLNDVLVQSRGSSVLLLGSYGLYVLYCLKTHNEPDYETDRGDNEDAVTEEPKDRPYLTLPAAILTLAIFGTLLGFNIQLAADSLQSLLENTTLTPTFVGLVIMPLLNTNHLPLLLAYKDQIDLSLDLTITKSIQTVLVVVPLTVLVSWGMDGEEMTLLFSGFEVSSVFAAVLVVNHVLSSGRSDWLQGALMTQAYVIISVASFFVP

SEQ ID NO: 14829 - DNA, 2081 bp, Muscodor strobelii
  misc_feature: SGI EST ID NO. CUFF.35329.0
  misc_feature: Variant of the nucleotide sequence at SEQ ID NO 14827
gaaatttccgagcttgttcttatattgtagtgtgcactattttgccggtgtttccctagtgcgaaaatgtgtaaggatgtaatagtcgccaaatgaatagtcgctgatgtactccagttggtcgaatattccgagctttcagaagctcattcagtgacaatgcggagagtccagagtatcggccgctcttaggttcgtctcagaggggttatgatgaagagcagcgcatcgggtcatcggggccgacacaactggcgcatacaggtcgacaggccatcagccaaaatcatggcacgatggaaattgcacccaagatatttcctcctcctgccacaacagcgaaagctgtaaagctaccacggggaagtttcatgatcttcgtcaagctctaccgcggcaggatcgtccctattcccgttcgcaaatcggactcattagatgcgctgatggaggcaatctggcagaaaatgggaatgccaccggatcagcagcgcgtcatttttggcggtctacagctagagagaaatcgcacgatggaagactatggcatagaaaagggttcggttgtgcatttagtcctgagacttaggggcggagccaccgtcttgccaggtactgagctaagggagctcgacgttgttcgcggacctcatcagccacagcctccagaatctctcaagctgaaaaaataccaactactgctctcatggatcagagctaagagaggatatgactcgactatgtggagggttcttggtcaattccagctagtgctttggaattcctggcagcatattttgatattggccattcctgtgggactggtcctgagatatatgggctaccagtcgccagccgtattcgtaattaacttcgtcgccgtcctaccaagtgcgtacaacattgaggaagcggtcttcagtctcactcagtatgctaatgagaccatgggtgggctgcttaggatgtcacttgacaatattgttcaactcatcacatcggtgatacttcttcgcaacgaccaggtgcctgtgctcaaaacatcccttatcgggactgttttgtcaaacgtccttctgatgagcggattgtctttcttcgctggtggcatacaacgacgcgatcagtattttgacgggacacgcgcccaggtctgggggagtatactacttttggttgtcgtcagcctcttggctcctacgatatctcatctgctcaacatctctgacttgaatgacgtgctcgtacaatctcgagggtcttctgttctcctccttgggtcgtatggtctctacgtcttgtactgtctcaagactcataacgaacccgattatgagaccgatagaggagataatgaagatgcagtgacagaagaacctaaggaccgtccgtatttgactctcccagcggcgattctcacattggccatatttggcactttgctgggtttcaacattcagcttgcagcggacagtctacagtcactcctcgagaataccactctcaccccaacatttgtcgggctcgtcatcatgcctctactgaatacaaaccacctgccactcctccttgcatacaaagatcagatagatctgagcctcgacctgaccatcactaaatctatacagactgtgttggtcgtagtaccgcttaccgtcctggtctcatggggcatggatggcgaagagatgactctactcttcagcgggttcgaggtctcatccgtattcgccgccgtcctggtcgtgaaccacgtgttaagcagtggacggagcgattggttgcaaggggctttgatgacgcaggcttatgtgattatctctgttgcgtccttttttgtgccgtgagtatgtatttagaaccagctcagcgtgagcacatcgacatatatgaatttgctggatggaatgtagaaagattgtcacagaccattttagatcaaatgattttaggcgatctgaacgccaccgatgtgttcgataatgcgtgtatcagcttaactaaatgcagaggatagtcctgagtcgatgttcatgtctcagtggcagacaaggactgaaacgatgaaactgctacagtga

SEQ ID NO: 14830 - DNA, 1380 bp, Muscodor strobelii
  misc_feature: SGI cDNA ID NO. 564897
  misc_feature: Reduced expression when VOC is produced
  misc_feature: Encodes the peptide sequence at SEQ ID NO 14831
atggagcgtgacattcgacgtgataaaacggaatggcgaggactacattccttcaataagatcgtcgccgatggcgatcgtgctacaactgctgaacgacgtgctggtttgaaacagggccagatatattattattattacgaggtggatggttcaacagaaacttacaacccggcgcaacctgtcacgactacgtgcccgttccttcctggtcagacggtgaacactctggaaatgcccgtggaacgccgcatgaggatgaagagcgcgtcgatgaactccctgcgcagttccgattacaagacgatgaacccagctgatagattcataacaccacgttcgcaggcgaaagcacatacaccagcaggtcgagatttccgtatcgcttcgtcttctgcactgttaccgaagagatctgctcgttccgtctcgccagcctctggatggaccggtaccgcacgccggttattaagcttcaagtcacaacatcaagatcctgatcgtggcagaaagtgcgctggagacgaaccccttcggttatcggttgatgaacagaactcacagcctgagacgcgcagcacaacaccgtctggtagcgtaaaatctcgtgacatgtcgcctgagtcattaagaagatttctatccgaagatctaccatgttcagccacagccgccgattcgacacctgtactggcgattcctgatgatattgcggaggagaacgaggagaacgacgacgacgacgaagatgacgataattttgctgcgtcgccgactgcgatgaatgacaacgcacctttcacaactctatcgcctcctccgtttatgggtggtttatctgcaccgccttcgagacatgcgaaatacgctcttggtcccaagccgccgctgacttcgggacatcgactacctgtttcccccttctcgcttgacgtttccagaagtcgtggaccgttatctgcgacatcatccgccctcccatcaccaacctcaccagtctcgaatgtttctcacgccatgagccagttctctttctttgacgactccgacgatgacgaagaggaccttgtctcacctcctggggacgaaacattgttagctggtactggatccaatcacgaccatacttctaaactcgagactgaatctccgataacgagttacggcctgcctcaagctttgacagatagaaaacgcttgaactcggaaccgatcgtagccccgaccatggaaaagtcgcccttggccgctggaagcgaagccactatgcctgttagctccactggtctcttcagtctcccaaatgttgacatcggcatcgacgatctgatgggcgacatgaactggatgacagatgttatccgtcctaagctcatttaa

SEQ ID NO: 14831 - protein, 459 aa, Muscodor strobelii
  misc_feature: SGI Peptide ID NO. 564897
  misc_feature (1)..(457): NCBI GI: 256725803 Blast Desc: NECHADRAFT_70422 [Nectria haematococca mpVI 77-13-4]
  misc_feature (1)..(454): NCBI GI: 261354284 Blast Desc: conserved [Verticillium albo-atrum VaMs.102]
  misc_feature (1)..(309): NCBI GI: 171686868 Blast Desc: protein product [Podospora anserina] gi|170943395|emb|CAP69048.1| protein product [Podospora anserina]
  misc_feature (1)..(458): NCBI GI: 46111279 Blast Desc: FG02521.1 [Gibberella zeae PH-1]
  misc_feature (5)..(274): NCBI GI: 116191967 Blast Desc: CHGG_05701 [Chaetomium globosum CBS 148.51] gi|88181614|gb|EAQ89082.1| CHGG_05701 [Chaetomium globosum CBS 148.51]
  misc_feature (42)..(274): NCBI GI: 145608938 Blast Desc: MGG_06251 [Magnaporthe grisea 70-15] gi|145016354|gb|EDK00844.1| MGG_06251 [Magnaporthe grisea 70-15]
  misc_feature (47)..(455): NCBI GI: 164425075 Blast Desc: NCU06467 [Neurospora crassa OR74A] gi|157070779|gb|EAA28122.2| [Neurospora crassa OR74A]
  misc_feature (1)..(354): NCBI GI: 154316269 Blast Desc: BC1G_03720 [Botryotinia fuckeliana B05.10] gi|150846506|gb|EDN21699.1| BC1G_03720 [Botryotinia fuckeliana B05.10]
  misc_feature (1)..(150): NCBI GI: 145231078 Blast Desc: An01g14040 [Aspergillus niger] gi|134055931|emb|CAK37408.1| protein product [Aspergillus niger]
  misc_feature (1)..(113): NCBI GI: 255930465 Blast Desc: Pc06g01870 [Penicillium chrysogenum Wisconsin 54-1255] gi|211581405|emb|CAP79180.1| Pc06g01870 [Penicillium chrysogenum Wisconsin 54-1255]
  misc_feature: Useful for introducing or modulating the production of volatile compounds
MERDIRRDKTEWRGLHSFNKIVADGDRATTAERRAGLKQGQIYYYYYEVDGSTETYNPAQPVTTTCPFLPGQTVNTLEMPVERRMRMKSASMNSLRSSDYKTMNPADRFITPRSQAKAHTPAGRDFRIASSSALLPKRSARSVSPASGWTGTARRLLSFKSQHQDPDRGRKCAGDEPLRLSVDEQNSQPETRSTTPSGSVKSRDMSPESLRRFLSEDLPCSATAADSTPVLAIPDDIAEENEENDDDDEDDDNFAASPTAMNDNAPFTTLSPPPFMGGLSAPPSRHAKYALGPKPPLTSGHRLPVSPFSLDVSRSRGPLSATSSALPSPTSPVSNVSHAMSQFSFFDDSDDDEEDLVSPPGDETLLAGTGSNHDHTSKLETESPITSYGLPQALTDRKRLNSEPIVAPTMEKSPLAAGSEATMPVSSTGLFSLPNVDIGIDDLMGDMNWMTDVIRPKLI

SEQ ID NO: 14832 - DNA, 2456 bp, Muscodor strobelii
  misc_feature: SGI EST ID NO. CUFF.35462.0
  misc_feature: Variant of the nucleotide sequence at SEQ ID NO 14830
gggtccctggtccttcagccctgcacactactcacctttttcgctttttctgtcttgagctgtacaactgtacaagtggaattcgaacacgtcaaacagggactgggctagtgaccctagtaaccccaggtgcccagttgtcttttacatgtacaagaataagagtcattcgtctcacaggcagctatcgggagacactatcaacaaccattacctcttttgacatgggtctgattcatctcgctggattcataaaagctgacctctccccacagccagacacacccttccgttcagtcggttcagctgttagggtcgtgggataatttcagcatactacacaacatggagcgtgacattcgacgtgataaaacggaatggcgaggactacattccttcaataagatcgtcgccgatggcgatcgtgctacaactgctgaacgacgtgctggtttgaaacagggccagatatattattattattacgaggtggatggttcaacagaaacttacaacccggcgcaacctgtcacgactacgtgcccgttccttcctggtcagacggtgaacactctggaaatgcccgtggaacgccgcatgaggatgaagagcgcgtcgatgaactccctgcgcagttccgattacaagacgatgaacccagctgatagattcataacaccacgttcgcaggcgaaagcacatacaccagcaggtcgagatttccgtatcgcttcgtcttctgcactgttaccgaagagatctgctcgttccgtctcgccagcctctggatggaccggtaccgcacgccggttattaagcttcaagtcacaacatcaagatcctgatcgtggcagaaagtgcgctggagacgaaccccttcggttatcggttgatgaacagaactcacagcctgagacgcgcagcacaacaccgtctggtagcgtaaaatctcgtgacatgtcgcctgagtcattaagaagatttctatccgaagatctaccatgttcagccacagccgccgattcgacacctgtactggcgattcctgatgatattgcggaggagaacgaggagaacgacgacgacgacgaagatgacgataattttgctgcgtcgccgactgcgatgaatgacaacgcacctttcacaactctatcgcctcctccgtttatgggtggtttatctgcaccgccttcgagacatgcgaaatacgctcttggtcccaagccgccgctgacttcgggacatcgactacctgtttcccccttctcgcttgacgtttccagaagtcgtggaccgttatctgcgacatcatccgccctcccatcaccaacctcaccagtctcgaatgtttctcacgccatgagccagttctctttctttgacgactccgacgatgacgaagaggaccttgtctcacctcctggggacgaaacattgttagctggtactggatccaatcacgaccatacttctaaactcgagactgaatctccgataacgagttacggcctgcctcaagctttgacagatagaaaacgcttgaactcggaaccgatcgtagccccgaccatggaaaagtcgcccttggccgctggaagcgaagccactatgcctgttagctccactggtctcttcagtctcccaaatgttgacatcggcatcgacgatctgatgggcgacatgaactggatgacagatgttatccgtcctaagctcatttaacatcatctcgacttgtcatctttcactttcaaaattcttcactcttatatcacggcttcacacgaatggggactaccgacgtcccaaaattagaatattgcccggattgttctcacgaacgcaaaaccggccaagggggtttcaatctaagcattatcggagttcactacttgcatttggcggcattggcataccaacatcatgaacacatttctgcatacaaaacggcgcttggatttacaatttacggacagattaatctaggacttggttgggtatttgccttcggcgagaggaattttgcctgttgggcaaaggcttcgaaagtcgtctcaccggcacatatgatctcatgcccatatttgtacaatagcggtgtaatgggcgaggacgtctggaacgccacgtgtcatacatgccatacatgcacgaggaaaacaacgcatcacctccaagaatttgatgttggcaggacagacaggataacacttatgcacctgtgttcaggttgaattaaaccaatacccttcctgccatcttgaaactattgtctgtgttctatgtgcctgttgtgacggtctaggttgtttcagtgaaccatctgcgccataattgatcatggtcttccatgccaggttgccgggttcctggttctcgctaggcagtccgaagttagcatagcttacattaggaatgaactagcattagtcttatgcataagctgatcatat

SEQ ID NO: 14833 - DNA, 555 bp, Muscodor strobelii
  misc_feature: SGI cDNA ID NO. 564898
  misc_feature: Encodes the peptide sequence at SEQ ID NO 14834
atgggtggtttatctgcaccgccttcgagacatgcgaaatacgctcttggtcccaagccgccgctgacttcgggacatcgactacctgtttcccccttctcgcttgacgtttccagaagtcgtggaccgttatctgcgacatcatccgccctcccatcaccaacctcaccagtctcgaatgtttctcacgccatgagccagttctctttctttgacgactccgacgatgacgaagaggaccttgtctcacctcctggggacgaaacattgttagctggtactggatccaatcacgaccatacttctaaactcgagactgaatctccgataacgagttacggcctgcctcaagctttgacagatagaaaacgcttgaactcggaaccgatcgtagccccgaccatggaaaagtcgcccttggccgctggaagcgaagccactatgcctgttagctccactggtctcttcagtctcccaaatgttgacatcggcatcgacgatctgatgggcgacatgaactggatgacagatgttatccgtcctaagctcatttaa

SEQ ID NO: 14834 - protein, 184 aa, Muscodor strobelii
  misc_feature: SGI Peptide ID NO. 564898
MGGLSAPPSRHAKYALGPKPPLTSGHRLPVSPFSLDVSRSRGPLSATSSALPSPTSPVSNVSHAMSQFSFFDDSDDDEEDLVSPPGDETLLAGTGSNHDHTSKLETESPITSYGLPQALTDRKRLNSEPIVAPTMEKSPLAAGSEATMPVSSTGLFSLPNVDIGIDDLMGDMNWMTDVIRPKLI

SEQ ID NO: 14835 - DNA, 2456 bp, Muscodor strobelii; identical to SEQ ID NO: 14832
  misc_feature: SGI EST ID NO. CUFF.35462.0
  misc_feature: Variant of the nucleotide sequence at SEQ ID NO 14833

SEQ ID NO: 14836 - DNA, 1605 bp, Muscodor strobelii
  misc_feature: SGI cDNA ID NO. 564899
  misc_feature: Encodes the peptide sequence at SEQ ID NO 14837
atgcgtctcttgagatgccaggacgacggcacgttccggctcactcacgatattctggaaagggatattcccgggtacccttatgctatcttgtctcatagatgggggagagcaaatgaggaagttttgtttgaggatattgaaaacggctcaggtcgacataagattgggtacaaaaagctagagttttgtgcacaacaagctgcagcggacggcttgaattgcttctggattgacacttgttgcatcaagaagtctagtagcgctgagctcacggagtcaattaactctatgttccgatggtacagcagggcgacgaaatgctatgtttacttgtcggatgtctccattggccaagatgacaatacgtggaaagagcttttcatggcgagtgaatggttcactcgcggctggactctccaggagctgcttgctccgaattccgtcgagttcttctcacaagagcgaaggcggcttggtgataaacactctctacgtcaaacaattcacgacatcacgggtatcgccatttctgcacttgcaggaacatctttgtctcagttcagcattgagctgcgcttcaaatgggcccaaaaccgcagtacaacgcgagatgaagatttagcgtactgtcttttgggtatctttaacgtttcgatgccagtcatatacggtgaaggcagagagagggcatttttccggctccgagagcaagttgccgcacattcttcaatggaagtcattgatccgagagagagacaacgccgtttttcaagactgatgacttctgctgggaacttggacttggagggcgtgaaatctgcgataaatgacggtgcggacgtaaacgcttcagatatgactcctggtcgtcgaaaggaactggaagagtcattagcacatgttcctctcgcaaaaattaccgcgaaaatctggggggaatacatggaatccaaatacgcaacagcactacaggcggctgtaagtgcaaaacaaacattctccgagcctcaaactgagactacccgaaggactaggttagagatttgccgactacttctccaacatggcgcagatgtgaacgcgacgagtcctgatcacggggatgcccttcaagttgcaatcttcagcgatgataaggatatagcggcactactcttagaccatggtgcggatgtcaatgccaaccgcccgggaccgtattgcacggcacttcaggcagctgcgtctaacaggctacatcaaggtatagatatgatgaagttactactcgaccggggtgccaaagttaatgcggtaggcggtcctgctggatcggctcttgctgctgctgcttgcaatattgacggcgaagattttgttcgtttcctgcttctgaatggggcattcgcaaatcttcatggtggtccgggagccaaatttgtcactcctcttcacgctgccgttgtgcatccaagaggcggcaacggtcgtcctcctggggaaccacgcgaagctgccgtaaagatgctggtgcaatccggcgcacaggtcagtgatatcccaaagcaatggcgtaatgaagtgcagaagatcatcgacccttcttcttgctctgttcagtga

SEQ ID NO: 14837 - protein, 534 aa, Muscodor strobelii
  misc_feature: SGI Peptide ID NO. 564899
  misc_feature (28)..(142): Pfam Id: PF06985 Pfam Desc: Heterokaryon incompatibility protein (HET)
  misc_feature (319)..(365): Pfam Id: PF00023 Pfam Desc: Ankyrin repeat
  misc_feature (366)..(395): Pfam Id: PF00023 Pfam Desc: Ankyrin repeat
  misc_feature (28)..(121): Pfam Id: PF06985 Pfam Desc: Heterokaryon incompatibility protein (HET)
  misc_feature (122)..(142): Pfam Id: PF06985 Pfam Desc: Heterokaryon incompatibility protein (HET)
  misc_feature (1)..(260): NCBI GI: 156051486 Blast Desc: SS1G_07150 [Sclerotinia sclerotiorum 1980] gi|154704928|gb|EDO04667.1| SS1G_07150 [Sclerotinia sclerotiorum 1980]
  misc_feature (1)..(260): NCBI GI: 156056268 Blast Desc: SS1G_05486 [Sclerotinia sclerotiorum 1980] gi|154703270|gb|EDO03009.1| SS1G_05486 [Sclerotinia sclerotiorum 1980]
  misc_feature (1)..(260): NCBI GI: 156048486 Blast Desc: SS1G_08974 [Sclerotinia sclerotiorum 1980] gi|154693371|gb|EDN93109.1| SS1G_08974 [Sclerotinia sclerotiorum 1980]
  misc_feature (1)..(268): NCBI GI: 154936836 Blast Desc: HNWD1 [Podospora anserina]
  misc_feature (1)..(268): NCBI GI: 171677548 Blast Desc: protein product [Podospora anserina] gi|170936842|emb|CAP61500.1| protein product [Podospora anserina]
  misc_feature (1)..(239): NCBI GI: 154312957 Blast Desc: BC1G_05480 [Botryotinia fuckeliana B05.10] gi|150849565|gb|EDN24758.1| BC1G_05480 [Botryotinia fuckeliana B05.10]
  misc_feature (1)..(249): NCBI GI: 154294222 Blast Desc: BC1G_13797 [Botryotinia fuckeliana B05.10] gi|150844807|gb|EDN20000.1| BC1G_13797 [Botryotinia fuckeliana B05.10]
  misc_feature (1)..(257): NCBI GI: 171677728 Blast Desc: protein product [Podospora anserina] gi|154936838|emb|CAL30215.1| HET-E [Podospora anserina] gi|170936932|emb|CAP61591.1| protein product [Podospora anserina]
  misc_feature (1)..(260): NCBI GI: 156056358 Blast Desc: SS1G_05532 [Sclerotinia sclerotiorum 1980] gi|154703315|gb|EDO03054.1| SS1G_05532 [Sclerotinia sclerotiorum 1980]
  misc_feature (1)..(257): NCBI GI: 154936840 Blast Desc: HET-D [Podospora anserina]
MRLLRCQDDGTFRLTHDILERDIPGYPYAILSHRWGRANEEVLFEDIENGSGRHKIGYKKLEFCAQQAAADGLNCFWIDTCCIKKSSSAELTESINSMFRWYSRATKCYVYLSDVSIGQDDNTWKELFMASEWFTRGWTLQELLAPNSVEFFSQERRRLGDKHSLRQTIHDITGIAISALAGTSLSQFSIELRFKWAQNRSTTRDEDLAYCLLGIFNVSMPVIYGEGRERAFFRLREQVAAHSSMEVIDPRERQRRFSRLMTSAGNLDLEGVKSAINDGADVNASDMTPGRRKELEESLAHVPLAKITAKIWGEYMESKYATALQAAVSAKQTFSEPQTETTRRTRLEICRLLLQHGADVNATSPDHGDALQVAIFSDDKDIAALLLDHGADVNANRPGPYCTALQAAASNRLHQGIDMMKLLLDRGAKVNAVGGPAGSALAAAACNIDGEDFVRFLLLNGAFANLHGGPGAKFVTPLHAAVVHPRGGNGRPPGEPREAAVKMLVQSGAQVSDIPKQWRNEVQKIIDPSSCSVQ

SEQ ID NO: 14838 - DNA, 465 bp, Muscodor strobelii
  misc_feature: SGI EST ID NO. CUFF.35355.0
  misc_feature: Variant of the nucleotide sequence at SEQ ID NO 14836
atggaatccaaatacgcaacagcactacaggcggctgtaagtgcaaaacaaacattctccgagcctcaaactgagactacccgaaggactaggttagagatttgccgactacttctccaacatggcgcagatgtgaacgcgacgagtcctgatcacggggatgcccttcaagttgcaatcttcagcgatgataaggatatagcggcactactcttagaccatggtgcggatgtcaatgccaaccgcccgggaccgtattgcacggcacttcaggcagctgcgtctaacaggctacatcaaggtatagatatgatgaagttactactcgaccggggtgccaaagttaatgcggtaggcggtcctgctggatcggctcttgctgctgctgcttgcaatattgacggcgaagattttgttcgtttcctgcttctgaatggggcattcgcaaatcttcatggtggtccg

SEQ ID NO: 14839 - DNA, 1332 bp, Muscodor strobelii
  misc_feature: SGI cDNA ID NO. 564900
  misc_feature: Encodes the peptide sequence at SEQ ID NO 14840
atgctttcgaagctctcgttcttgttggctatcgccgcagctgatctcggcgttcatgctttagccacatcaccgctaaaagtccgtggcagcacaccaaagtatccatatgatcccaatacctccaaatattgtagctattggatcgacaatatcagctccagtgtcaaatgtactgacattcctacgaattgggacattacattagacgaattccttcgttggaatcccattcttgccccgggctgtacaaactttgaaacctcaaagtcatactgcgtagaaaccctggacgagccggcgccgaccacgtcgtcggccagtaccacgcctacccagccgagcaatggcatcactactccacaacccatacaacccggcatggtagataactgtgatgcattttacttcgtccccaaagatagctcctgccagggtatcgcgacaaagaacggtatcacccttcaggaattcctaacatggaatccgcttatagggagttcttgcagcgggctgtgggcagaagcctacgtctgtgtttccattattgggcatgaaacttcggctgctccaactgcaacgccgactcctacctctaccaaccctggcaatggcatcactacccctttgcctacccaacctgacattgttgataattgcaacaaattctactttgtcaatacggatgagagctgcgacgtagtggcttcgaagaacggcatcacaacagcacagcttttgacgtggaacaaggcaatcggatctacatgcgctggactatgggcaaaagcgtatgcatgtgtttccgtaatcggctttacgcccactacaaccacttctcccactcccagccctaccaagcctggcaacgggatcacaacacctgtgccaactcagccggatattgtagacaactgtgacaaattctacttcgtcaacaccgacgagagctgtgatgttgtggcgtctaaaaatggcattaccactgctcaactccagtcttggaataaggcaattggatctacatgcgctgggctatgggcgaatgcctatgcatgcgtgtctatcattggtcatgagcctgctaccactacgactaccaagaagacgaccacaaccaccggcaatggcattacaacacctacgccaacgcaggctggcatggttagcaactgcaaaaaattccacttcgtccaggctgatcagacgtgcgctaccatctccaagcagtatggcatcaccgaggccaacttcatcaagtggaatccggctgttggcggaacgtcttgtgcgggcctttgggctaagacgtacgcttgtgtaggtgtctga

SEQ ID NO: 14840 - protein, 443 aa, Muscodor strobelii
  misc_feature: SGI Peptide ID NO. 564900
  misc_feature (396)..(423): Pfam Id: PF01476 Pfam Desc: LysM domain
  misc_feature (1)..(443): NCBI GI: 171682716 Blast Desc: protein product [Podospora anserina] gi|170941317|emb|CAP66967.1| protein product [Podospora anserina]
  misc_feature (76)..(443): NCBI GI: 171678451 Blast Desc: protein product [Podospora anserina] gi|170937295|emb|CAP61952.1| protein product [Podospora anserina]
  misc_feature (33)..(441): NCBI GI: 256719815 Blast Desc: NECHADRAFT_56796 [Nectria haematococca mpVI 77-13-4]
  misc_feature (1)..(443): NCBI GI: 67540988 Blast Desc: AN6664.2 [Aspergillus nidulans FGSC A4] gi|40739003|gb|EAA58193.1| AN6664.2 [Aspergillus nidulans FGSC A4] gi|259480248|tpe|CBF71205.1| TPA: [Aspergillus nidulans FGSC
  misc_feature (5)..(443): NCBI GI: 67516523 Blast Desc: AN0543.2 [Aspergillus nidulans FGSC A4] gi|40747486|gb|EAA66642.1| AN0543.2 [Aspergillus nidulans FGSC A4] gi|259489198|tpe|CBF89272.1| TPA: [Aspergillus nidulans FGSC
  misc_feature (1)..(354): NCBI GI: 238841745 Blast Desc: LysM domain-containing protein [Microsporum canis CBS 113480]
  misc_feature (100)..(442): NCBI GI: 238841745 Blast Desc: LysM domain-containing protein [Microsporum canis CBS 113480]
  misc_feature (8)..(443): NCBI GI: 261361228 Blast Desc: LysM domain-containing protein [Verticillium albo-atrum VaMs.102]
  misc_feature (36)..(443): NCBI GI: 261359968 Blast Desc: LysM domain-containing protein [Verticillium albo-atrum VaMs.102]
  misc_feature (36)..(443): NCBI GI: 261359968 Blast Desc: LysM domain-containing protein [Verticillium albo-atrum VaMs.102]
MLSKLSFLLAIAAADLGVHALATSPLKVRGSTPKYPYDPNTSKYCSYWIDNISSSVKCTDIPTNWDITLDEFLRWNPILAPGCTNFETSKSYCVETLDEPAPTTSSASTTPTQPSNGITTPQPIQPGMVDNCDAFYFVPKDSSCQGIATKNGITLQEFLTWNPLIGSSCSGLWAEAYVCVSIIGHETSAAPTATPTPTSTNPGNGITTPLPTQPDIVDNCNKFYFVNTDESCDVVASKNGITTAQLLTWNKAIGSTCAGLWAKAYACVSVIGFTPTTTTSPTPSPTKPGNGITTPVPTQPDIVDNCDKFYFVNTDESCDVVASKNGITTAQLQSWNKAIGSTCAGLWANAYACVSIIGHEPATTTTTKKTTTTTGNGITTPTPTQAGMVSNCKKFHFVQADQTCATISKQYGITEANFIKWNPAVGGTSCAGLWAKTYACVGV

SEQ ID NO: 14841 - DNA, 2215 bp, Muscodor strobelii
  misc_feature: SGI EST ID NO. CUFF.35368.0
  misc_feature: Variant of the nucleotide sequence at SEQ ID NO 14839
cctcaaccgtgcggcaccgtgaaagattcatccaataacgcacctcccttcgtcgcatattggctgacaacgaaccggcctccctgttccctagcctcgcttcttcagccctatcgaagtttttcaatcatgcgtagaccgcgtacctgaacttcgggtcagtcggtctatcatgacatggtcttgaccccctaccgctgttccgatccgatctaggtctaccattcgcatcatccttctgacttgctcgcactcgcctttgagctattattgtgaaccccgttgacactgctttcctaactaggatgacgaccgaaggaatggcaatgaatatatcgattctagatgtgtctaaagcattggcaatttcttagcgacaacgtggttctaatttcatcgccgcacctccctaggtgccatcgtgagatggatcatggccccatggccccaaagctaccgacttgcactcccgtcccgattggaatggccggaaaattcccgcggaaggcaatggaagcaatgagagagactttgccaaggcccaatttgaggagtaagaatgcgtagagaatatacgtctataaatcgagtgtgcgccatttgccgttagcccatgagaaagacgcatccggcggcttctcttcgtttgttgcgtccggaatcaacactgcacgtcataaacaatgctttcgaagctctcgttcttgttggctatcgccgcagctgatctcggcgttcatgctttagccacatcaccgctaaaagtccgtggcagcacaccaaagtatccatatgatcccaatacctccaaatattgtagctattggatcgacaatatcagctccagtgtcaaatgtactgacattcctacgaattgggacattacattagacgaattccttcgttggaatcccattcttgccccgggctgtacaaactttgaaacctcaaagtcatactgcgtagaaaccctggacgagccggcgccgaccacgtcgtcggccagtaccacgcctacccagccgagcaatggcatcactactccacaacccatacaacccggcatggtagataactgtgatgcattttacttcgtccccaaagatagctcctgccagggtatcgcgacaaagaacggtatcacccttcaggaattcctaacatggaatccgcttatagggagttcttgcagcgggctgtgggcagaagcctacgtctgtgtttccattattgggcatgaaacttcggctgctccaactgcaacgccgactcctacctctaccaaccctggcaatggcatcactacccctttgcctacccaacctgacattgttgataattgcaacaaattctactttgtcaatacggatgagagctgcgacgtagtggcttcgaagaacggcatcacaacagcacagcttttgacgtggaacaaggcaatcggatctacatgcgctggactatgggcaaaagcgtatgcatgtgtttccgtaatcggctttacgcccactacaaccacttctcccactcccagccctaccaagcctggcaacgggatcacaacacctgtgccaactcagccggatattgtagacaactgtgacaaattctacttcgtcaacaccgacgagagctgtgatgttgtggcgtctaaaaatggcattaccactgctcaactccagtcttggaataaggcaattggatctacatgcgctgggctatgggcgaatgcctatgcatgcgtgtctatcattggtcatgagcctgctaccactacgactaccaagaagacgaccacaaccaccggcaatggcattacaacacctacgccaacgcaggctggcatggttagcaactgcaaaaaattccacttcgtccaggctgatcagacgtgcgctaccatctccaagcagtatggcatcaccgaggccaacttcatcaagtggaatccggctgttggcggaacgtcttgtgcgggcctttgggctaagacgtacgcttgtgtaggtgtctgattgtgatgcagtttttcagctagtacactagtacccaatctgcggttacgttaacagcggtggacgcacaagtcattaatcagtttctttgtatatattcagatacaaatagtgcatccctaattttcattgataagattatttgatatttatctttcagttttaaagcgaggtgctctcgagcttcttatcaagagaat

SEQ ID NO: 14842 - DNA, 6267 bp, Muscodor strobelii
  misc_feature: SGI cDNA ID NO. 564901
  misc_feature: Encodes the peptide sequence at SEQ ID NO 14843
atgcgacttgaggatctgcaacaatgggcatctatagctctgttggtcgtcccagtactgggtgatttcacacccaatttcagccgatcacacaagccgtgcccaagatcttgtgatgataatccgagtttcgcggattggagcagcttctattcgatcgaccggcttgaagtctgcgctgagcctatgcaattggtcttctcgaccttcaatcctatcgacgaccctaaatctcaactccgaattttagcctgcacagcaggaaatgcagagactcccatcaacgctctgacaggcactgcggtcgatgtgtcgtcagattctccaggtctagcagatctggatgtcgaaaaacgcccaaagaatgacaaaagtcggctaacaagacgtgatgacgactctgattccaagccgcccatttgtcataacgccatccagcagaattctaccgtcgaatggatcacatggaattctgtcgagggaagcacaagcggcggtgatattatgaatgatattcttacctcgataagcagcactcaagcctatcttgagcatcctaacaactgcgaagcgaatgcggtctacggttacacccgaggcgtccttgttggcgtttacgctggggatcagatccaaaaccgaggggctgctgcctacttcgtgcaagatgccatatcccgtattgcgactacgtcggcagttagcaacggccgagttgcgatccagctttgcgggcatgatgcaagtcacacgctcggtttggttgtcgatccttcaggagactttgcctggactcagactgtaatccaggcctggtcctcaggtaagtgtgtcgatgaatcctcgtctgaaggcatggccaaaactgcaaaatttggtacaactatttctgtcattcccagcgatctcaaacgatcagagcaaagtcggcgagcgaccactcctcgtcctgacggcacttgtgcgtcatacatcatcaaggaaggagacacgtgctccagcatggcaatggccgaaggcatcaagcaatccgacctatataagtataatgacaatacgtggggttggggtgggtgcaatagtttatacccagggatgcgtatttgcgttggtcccggcactccacgtctcccagcgcctaatcaagatgctgaatgtggaccgtctaagccgggaacagtcgaagaggatggtgttaagatcgaagacctcagtccttgtccgatcaaggcctgctgtaatgtttggggaaagtgtggtgtcgataaggatttctgcgtaccgacattctctgagacgggaaatccaggcaccgcagaacccaagaccaatggctgtgtacagaattgtggtctcgatctggtgacaggctctgctccgtctgagttcatcaaagtcggctattttgaagcctggaaccgcgagcggccatgtcttcatatgtcgcccggcgaaatcaatccatcgtacactaatatacactacgcctttgctgatatcacaccttccttcggtgtgtcacttggccgcttctcggacgtttttgacgagtttaaggcattgactggtcacaagaagatcgtcgcgttcggcggctgggcttttagcacagagccttctacatatcagttgtttcgaaatgctgttatgcctgcgaaccgtcagacttttgctcaagcatgtgtagactttgtcaacaaacacgggttggatggcgtcgacttcgactgggaatatcccggagagccggatatcccgggaataccggcaggtggagaagatgagggcaagaattaccttgagtttgtcaaggttgttcggtcattgatgccacagggcaagactgtgtcgattgctgctcctgcttcttactggtatctgaagcaatttcttattcaagagatgagtgaggtcctagattacatcgtgtacatgacatacgacttgcacggccagtgggactatggtaatgaatggggacagtcaggctgtaaagctggcaattgtctgcgctctcacgtcaatatgaccgaaacaatgtcctctttggtcatggttacgaaagccggcgtgccgtcaaacaagatcgtggttggagtgactagctatggacggtcattcaagatgacagattctacgattatcgatgaaggtggtgctttgaaacagtggactgatgatacccagtcaaactacatcatctacggtgacgacacttgggttgcgtacatggatgcggcaaacaagcagtccagaatcgctaagtggagatccttgaatttcagagggtcaagcgattgggcgatagatcttcaaggcgatcctggcgctatcgatgggagagatgtggtgtatcttgaccctgctgtgtataccggaactccagcacaatgttcacctccttgcctctttgtctttccaccaagctcgctatctcagccgaccactatctcgattcctccttatactacatctatccagctcagtaaaggtccaacaaccacgataactgtcaccgtcacccagttgactgtcacctcattaagctactacaacttgcatatctccagtaatcaaaatactgggacgcttcatccctacgtgagtctcaatgtaccaccggtcaccacagttatcgacggggagacgagaacgcttaggctgccgccctggccggccatcacaaacgggccgccggcaacctcgggctctggggctcctggtggtgggagctccgatccgagctcgtctggaccacctggaagtggaacatttggaaacgggacctactggcccggatatcccctgccaaccgcacctaacgacccaccattagagacaatcccaacaacaacaaagcccccattcactatgccaacggacactgacccctcagcgcctgtgtggcctttcttcggattaaaacctgtcccgactcctgtccctgatgaaggcgaggatgacgatgatgatgaaggaaagtccaagtccacctgcaagctttggttcttctttgtatgcatcagctggggtgatgattggaacatcaatattcaggggtgggaatgggactttcctgttggtacttggggacctggcccaccgccaatcgatcgtatcaagcttcctcctggttttaccatcgagggctcgctgcctccatggccgaagattacagtcccagctactggtcccatcaaaactccgccaaaaccaacagactgtacgccggccgaagcctcgctctgtttgacaacgacgtcgttcgcgacgacggtgacgaatagcgagacacgcacaacatcaagccaggtcaagtcaagatgtgaaacaatcacaggatgtaacttccgcgacgtcgaagaaactacaaccgtcaaggcgtgcacgctcaccaagaggacactggaagcaactgaattgccggagcctaccgtaggaccttcgggagaatcaccgcttaccgagcgtgcaacgcttcatgtaagagctgaacctgactggaagaattgtgaatctccagggcttgatggcatactctggccccagagccagggagatgcaactcaacgggccacaagagatattcttgagcgacgtaagcaggccctaggccatgactacatcgaattcagggcaggtgacttagatttcacggccttctattacatcaagaatatggggccaatggccttggcgtatttcaattccgatgaggtgccaagtgtcctcctcgcctactatccggagaacccatacctaccaccaggagtgaacttcaaaagggaggctctcgacttgctcgacgagcttgaaaagcaaggtttcaacgaaacagaaaatttcgacgagcgtagtcttaatgagacatccagcttccaaacaaacggggctgctattcagatggtcaaccatgagaaatcgactgctgagcaaaagcattcaggcattgacaagacttatgatgcccccagcatagacatccgcgaccatcttttcatccgcgacaatacgactatgttcggaagtatagattcctgggacacaaccacaaatgtaactgagcctgagcatgttctgtcgaagagaaccgtcaaacgatgggttaccggagcatggcatctctcgatggttacatggccaccgggcattcccttcgacaaagaaagagacgacgtgaagcatgatcccaacatggaaaagtacacgaccacagcagacgacagttggggctcgggccagacggtttacatcatggattctaattgggaaacatccacttcagaatataaagctcccagagccgaagagctgccatttcaaacatacggcaagatgccagatcaatctcagcagaagggtcatggctcacgtgtgaccgcttttgccgctggccaaggactcggaatggcaaagcttgctaaaattcggtttgcttccgttcctactaaggatgctggatccaacactgcaggcgtgggccaaggcgagatagttgagcgctttctcgaggctctaattaatatcgccaatgatgccgcgacgatacctgaaaacacgtgcgtgattaacatgtcatggggtataccaccaagatacccgattcaaagattatattggtccatcttcctccgacttatgcaggaaatgcagaaaaaatacgggtgtgtctttgtagcggctcccggcaacagcggccaacaggcgcgacattatccagcattgttctgggataaggtgccaggcatgttcgttgctggcgctgtcgatctccaaggatttccattctccggaaactcgggccaagacatcatcaatgtttatgcaccaggagtgaaggtgcctcttggtggtggtagctgggttactggcacttcatacgctgctccaatagtgtctggctttgttgcatatcttcgcgggcttccgcagtacactggaggacgagatccggccagtatattggctaagatccaggaatgggcgcggcctattaccattgatccactactacctgacgcggacgacacttcggggttgcaaatcctttggaatggccaacagttcggaaccaattgcgtatcctcgatggcgaaaagaagccttgctgggcgtcaggttgacggaggcgaggaagcaggtgatggggatggagcatcgtgccctatacggggcgatcctaacaacccgggtggtggtggtccagataacccaaacaatccgggaggaaatggaccccaggggcctcccgttgagtataaaagcggagagccaggtcctatatgctcgacaaactgcgggacgctctgctcaggcttctactgtaacccaacccccatcggcacgccgcctgatttcacgccgccaaaaacaacaacgaagcccacggccgggcctgaccccacgtcgtgtagctttccgtcgacgcttcatactactacgctctgcaacggagatcctcggggtggctcatgcaagacatccacgctgtgcgagaacgcgctgcctacgctgaccccaatagagacaccttcgccgataccatctaattgtgcctcaaccaccacatggaccagctgtgcgcttggcgttcccccaggcgtttccgcatgtctcaccagctcgtcttgcgtagcgacttcgacaacggacacacccacaccgacaccaacaccgacagaatcgacatggtcacctccttacggcctaccaacgccaacacccatccctcacgtaaaccctcactgcaacgaagacaactgcgggctgtacccaagcatcatggatgcatgcgacaaagcggctgaagtattcatcaagcatcccgacgaccagtacgggaatactggagacggagaattcttgggcacatgcatagacggctcggacaagaatactggcaagcccgtgggttgcgcgttggagtttctggttaatgcagatttcgacaacgattgccactggaaagcgctaggcgcagcgcaatggtacagcaatctcctctgttccacaatagatgacggcgagattagtggccgtgacgatatagtcataatcgttggggctggtactccaaacgtagttagatttatcatgacgattaccgaaactagttcgcaagatgtcattgccgcaaccaaagagataggtatacaaacagacggagcccccatagaaaaaggaggcacccagaccggcgtcacctcgatcacagagccagtcaccaagcaggtctgcgcctctggcctgatcagcagtaaactttga

SEQ ID NO: 14843 - protein, 2088 aa, Muscodor strobelii
  misc_feature: SGI Peptide ID NO. 564901
  misc_feature (463)..(745): Pfam Id: PF00704 Pfam Desc: Glycosyl hydrolases family 18
  misc_feature (1399)..(1679): Pfam Id: PF00082 Pfam Desc: Subtilase family
  misc_feature (463)..(743): Pfam Id: PF00704 Pfam Desc: Glycosyl hydrolases family 18
  misc_feature (324)..(371): Pfam Id: PF01476 Pfam Desc: LysM domain
  misc_feature (318)..(1232): NCBI GI: 171678449 Blast Desc: protein product [Podospora anserina] gi|170937294|emb|CAP61951.1| protein product [Podospora anserina]
  misc_feature (27)..(837): NCBI GI: 238504682 Blast Desc: class V chitinase Chi100 [Aspergillus flavus NRRL3357] gi|220691043|gb|EED47392.1| class V chitinase Chi100 [Aspergillus flavus NRRL3357]
  misc_feature (34)..(819): NCBI GI: 156059983 Blast Desc: SS1G_02128 [Sclerotinia sclerotiorum 1980] gi|154699538|gb|EDN99276.1| SS1G_02128 [Sclerotinia sclerotiorum 1980]
  misc_feature (34)..(773): NCBI GI: 70998454 Blast Desc: class V chitinase [Aspergillus fumigatus Af293] gi|66851585|gb|EAL91911.1| class V chitinase, [Aspergillus fumigatus Af293]
  misc_feature (10)..(827): NCBI GI: 70992799 Blast Desc: class V chitinase [Aspergillus fumigatus Af293] gi|66848881|gb|EAL89210.1| class V chitinase, [Aspergillus fumigatus Af293]
  misc_feature (10)..(827): NCBI GI: 159130298 Blast Desc: class V chitinase, [Aspergillus fumigatus A1163]
  misc_feature (171)..(774): NCBI GI: 256719814 Blast Desc: NECHADRAFT_11453 [Nectria haematococca mpVI 77-13-4]
  misc_feature (34)..(773): NCBI GI: 159126318 Blast Desc: class V chitinase, [Aspergillus fumigatus A1163]
  misc_feature (19)..(839): NCBI GI: 119498763 Blast Desc: class V chitinase Chi100 [Neosartorya fischeri NRRL 181] gi|119414303|gb|EAW24242.1| class V chitinase Chi100 [Neosartorya fischeri NRRL 181]
  misc_feature (315)..(772): NCBI GI: 119500670 Blast Desc: glycosyl hydrolase, family 18, [Neosartorya fischeri NRRL 181] gi|119415257|gb|EAW25195.1| glycosyl hydrolase, family 18, [Neosartorya fischeri NRRL 181]
MRLEDLQQWASIALLVVPVLGDFTPNFSRSHKPCPRSCDDNPSFADWSSFYSIDRLEVCAEPMQLVFSTFNPIDDPKSQLRILACTAGNAETPINALTGTAVDVSSDSPGLADLDVEKRPKNDKSRLTRRDDDSDSKPPICHNAIQQNSTVEWITWNSVEGSTSGGDIMNDILTSISSTQAYLEHPNNCEANAVYGYTRGVLVGVYAGDQIQNRGAAAYFVQDAISRIATTSAVSNGRVAIQLCGHDASHTLGLVVDPSGDFAWTQTVIQAWSSGKCVDESSSEGMAKTAKFGTTISVIPSDLKRSEQSRRATTPRPDGTCASYIIKEGDTCSSMAMAEGIKQSDLYKYNDNTWGWGGCNSLYPGMRICVGPGTPRLPAPNQDAECGPSKPGTVEEDGVKIEDLSPCPIKACCNVWGKCGVDKDFCVPTFSETGNPGTAEPKTNGCVQNCGLDLVTGSAPSEFIKVGYFEAWNRERPCLHMSPGEINPSYTNIHYAFADITPSFGVSLGRFSDVFDEFKALTGHKKIVAFGGWAFSTEPSTYQLFRNAVMPANRQTFAQACVDFVNKHGLDGVDFDWEYPGEPDIPGIPAGGEDEGKNYLEFVKVVRSLMPQGKTVSIAAPASYWYLKQFLIQEMSEVLDYIVYMTYDLHGQWDYGNEWGQSGCKAGNCLRSHVNMTETMSSLVMVTKAGVPSNKIVVGVTSYGRSFKMTDSTIIDEGGALKQWTDDTQSNYIIYGDDTWVAYMDAANKQSRIAKWRSLNFRGSSDWAIDLQGDPGAIDGRDVVYLDPAVYTGTPAQCSPPCLFVFPPSSLSQPTTISIPPYTTSIQLSKGPTTTITVTVTQLTVTSLSYYNLHISSNQNTGTLHPYVSLNVPPVTTVIDGETRTLRLPPWPAITNGPPATSGSGAPGGGSSDPSSSGPPGSGTFGNGTYWPGYPLPTAPNDPPLETIPTTTKPPFTMPTDTDPSAPVWPFFGLKPVPTPVPDEGEDDDDDEGKSKSTCKLWFFFVCISWGDDWNINIQGWEWDFPVGTWGPGPPPIDRIKLPPGFTIEGSLPPWPKITVPATGPIKTPPKPTDCTPAEASLCLTTTSFATTVTNSETRTTSSQVKSRCETITGCNFRDVEETTTVKACTLTKRTLEATELPEPTVGPSGESPLTERATLHVRAEPDWKNCESPGLDGILWPQSQGDATQRATRDILERRKQALGHDYIEFRAGDLDFTAFYYIKNMGPMALAYFNSDEVPSVLLAYYPENPYLPPGVNFKREALDLLDELEKQGFNETENFDERSLNETSSFQTNGAAIQMVNHEKSTAEQKHSGIDKTYDAPSIDIRDHLFIRDNTTMFGSIDSWDTTTNVTEPEHVLSKRTVKRWVTGAWHLSMVTWPPGIPFDKERDDVKHDPNMEKYTTTADDSWGSGQTVYIMDSNWETSTSEYKAPRAEELPFQTYGKMPDQSQQKGHGSRVTAFAAGQGLGMAKLAKIRFASVPTKDAGSNTAGVGQGEIVERFLEALINIANDAATIPENTCVINMSWGIPPRYPIQRLYWSIFLRLMQEMQKKYGCVFVAAPGNSGQQARHYPALFWDKVPGMFVAGAVDLQGFPFSGNSGQDIINVYAPGVKVPLGGGSWVTGTSYAAPIVSGFVAYLRGLPQYTGGRDPASILAKIQEWARPITIDPLLPDADDTSGLQILWNGQQFGTNCVSSMAKRSLAGRQVDGGEEAGDGDGASCPIRGDPNNPGGGGPDNPNNPGGNGPQGPPVEYKSGEPGPICSTNCGTLCSGFYCNPTPIGTPPDFTPPKTTTKPTAGPDPTSCSFPSTLHTTTLCNGDPRGGSCKTSTLCENALPTLTPIETPSPIPSNCASTTTWTSCALGVPPGVSACLTSSSCVATSTTDTPTPTPTPTESTWSPPYGLPTPTPIPHVNPHCNEDNCGLYPSIMDACDKAAEVFIKHPDDQYGNTGDGEFLGTCIDGSDKNTGKPVGCALEFLVNADFDNDCHWKALGAAQWYSNLLCSTIDDGEISGRDDIVIIVGAGTPNVVRFIMTITETSSQDVIAATKEIGIQTDGAPIEKGGTQTGVTSITEPVTKQVCASGLISSKL

SEQ ID NO: 14844 - DNA, 4482 bp, Muscodor strobelii
  misc_feature: SGI EST ID NO. CUFF.35409.1
  misc_feature: Variant of the nucleotide sequence at SEQ ID NO 14842
gctatattagtgacggagaacttaaccagattatcgatgaaggtggtgctttgaaacagtggactgatgatacccagtcaaactacatcatctacggtgacgacacttgggttgcgtacatggatgcggcaaacaagcagtccagaatcgctaagtggagatccttgaatttcagagggtcaagcgattgggcgatagatcttcaaggcgatcctggcgctatcgatgggagagatgtggtgtatcttgaccctgctgtgtataccggaactccagcacaatgttcacctccttgcctctttgtctttccaccaagctcgctatctcagccgaccactatctcgattcctccttatactacatctatccagctcagtaaaggtccaacaaccacgataactgtcaccgtcacccagttgactgtcacctcattaagctactacaacttgcatatctccagtaatcaaaatactgggacgcttcatccctacgtgagtctcaatgtaccaccggtcaccacagttatcgacggggagacgagaacgcttaggctgccgccctggccggccatcacaaacgggccgccggcaacctcgggctctggggctcctggtggtgggagctccgatccgagctcgtctggaccacctggaagtggaacatttggaaacgggacctactggcccggatatcccctgccaaccgcacctaacgacccaccattagagacaatcccaacaacaacaaagcccccattcactatgccaacggacactgacccctcagcgcctgtgtggcctttcttcggattaaaacctgtcccgactcctgtccctgatgaaggcgaggatgacgatgatgatgaaggaaagtccaagtccacctgcaagctttggttcttctttgtgagttgctcttccaaaccatgctggttgtgatcgcttgaggcgactaatcaagtactaggtatgcatcagctggggtgatgattggaacatcaatattcaggggtgggaatgggactttcctgttggtacttggggacctggcccaccgccaatcgatcgtatcaagcttcctcctggttttaccatcgagggctcgctgcctccatggccgaagattacagtcccagctactggtcccatcaaaactccgccaaaaccaacagactgtacgccggccgaagcctcgctctgtttgacaacgacgtcgttcgcgacgacggtgacgaatagcgagacacgcacaacatcaagccaggtcaagtcaagatgtgaaacaatcacaggatgtaacttccgcgacgtcgaagaaactacaaccgtcaaggcgtgcacgctcaccaagaggacactggaagcaactgaattgccggagcctaccgtaggaccttcgggagaatcaccgcttaccgagcgtgcaacgcttcatgtaagagctgaacctgactggaagaattgtgaatctccagggcttgatggcatactctggccccagagccagggagatgcaactcaacgggccacaagagatattcttgagcgacgtaagcaggccctaggccatgactacatcgaattcagggcaggtgacttagatttcacggccttctattacatcaagaatatggggccaatggccttggcgtatttcaattccgatgaggtgccaagtgtcctcctcgcctactatccggagaacccatacctaccaccaggagtgaacttcaaaagggaggctctcgacttgctcgacgagcttgaaaagcaaggtttcaacgaaacagaaaatttcgacgagcgtagtcttaatgagacatccagcttccaaacaaacggggctgctattcagatggtcaaccatgagaaatcgactgctgagcaaaagcattcaggcattgacaagacttatgatgcccccagcatagacatccgcgaccatcttttcatccgcgacaatacgactatgttcggaagtatagattcctgggacacaaccacaaatgtaactgagcctgagcatgttctgtcgaagagaaccgtcaaacgatgggttaccggagcatggcatctctcgatggttacatggccaccgggcattcccttcgacaaagaaagagacgacgtgaagcatgatcccaacatggaaaagtacacgaccacagcagacgacagttggggctcgggccagacggtttacatcatggattctaattgggaaacatccacttcagaatataaagctcccagagccgaagagctgccatttcaaacatacggcaagatgccagatcaatctcagcagaagggtcatggctcacgtgtgaccgcttttgccgctggccaaggactcggaatggcaaagcttgctaaaattcggtttgcttccgttcctactaaggatgctggatccaacactgcaggcgtgggccaaggcgagatagttgagcgctttctcgaggctctaattaatatcgccaatgatgccgcgacgatacctgaaaacacgtgcgtgattaacatgtcatggggtataccaccaagatacccgattcaaagattatattggtccatcttcctccgacttatgcaggaaatgcagaaaaaatacgggtgtgtctttgtagcggctcccggcaacagcggccaacaggcgcgacattatccagcattgttctgggataaggtgccaggcatgttcgttgctggcgctgtcgatctccaaggatttccattctccggaaactcgggccaagacatcatcaatgtttatgcaccaggagtgaaggtgcctcttggtggtggtagctgggttactggcacttcatacgctgctccaatagtgtctggctttgttgcatatcttcgcgggcttccgcagtacactggaggacgagatccggccagtatattggctaagatccaggaatgggcgcggcctattaccattgatccactactacctgacgcggacgacacttcggggttgcaaatcctttggaatggccaacagttcggaaccaattgcgtatcctcgatggcgaaaagaagccttgctgggcgtcaggttgacggaggcgaggaagcaggtgatggggatggagcatcgtgccctatacggggcgatcctaacaacccgggtggtggtggtccagataacccaaacaatccgggaggaaatggaccccaggggcctcccgttgagtataaaagcggagagccaggtcctatatgctcgacaaactgcgggacgctctgctcaggcttctactgtaacccaacccccatcggcacgccgcctgatttcacgccgccaaaaacaacaacgaagcccacggccgggcctgaccccacgtcgtgtagctttccgtcgacgcttcatactactacgctctgcaacggagatcctcggggtggctcatgcaagacatccacgctgtgcgagaacgcgctgcctacgctgaccccaatagagacaccttcgccgataccatctaattgtgcctcaaccaccacatggaccagctgtgcgcttggcgttcccccaggcgtttccgcatgtctcaccagctcgtcttgcgtagcgacttcgacaacggacacacccacaccgacaccaacaccgacagaatcgacatggtcacctccttacggcctaccaacgccaacacccatccctcacgtaaaccctcactgcaacgaagacaactgcgggctgtacccaagcatcatggatgcatgcgacaaagcggctgaagtattcatcaagcatcccgacgaccagtacgggaatactggagacggagaattcttgggcacatgcatagacggctcggacaagaatactggcaagcccgtgggttgcgcgttggagtttctggttaatgcagatttcgacaacgattgccactggaaagcgctaggcgcagcgcaatggtacagcaatctccgttcgtcgtgcgatacatgtggagtaatagaggatgatgagactggttgtgcgattgtgatgcactttgtcgagcattgcgatgacttggtgggcaagaaaaagcggggactcgcaagcccgacacttggtggttacaggctcgaaaggtaacgcttagcgcccgcgctctaatacagaacatgtttgcgatagacgatcactcacgtaattagatagatgagaaaatacacgcgtgtaattctatccattctccaaatgcacgaccaatggcgcaatgcaagtagaagagaaaaggggaaaatgatgttgtgtggtacgcctcagccctatcggaacggtgctcttaagtctccaactagcggccgggcaggggagtgggcacagccagcatggcatcatctcattgagcccgaaggacttctagtgtttccattcactccatttagcagtttaatcataaaacttgaccttcaactatcttaacccacttgccaagctcatcacagtttctgctctttcatgccccat

SEQ ID NO: 14845 - DNA, 2754 bp, Muscodor strobelii
  misc_feature: SGI cDNA ID NO. 564902
  misc_feature: Reduced expression when VOC is produced
  misc_feature: Encodes the peptide sequence at SEQ ID NO 14846
atggcgatgctcgcctccaaatcatcatttccagcatcgctggcctcgagtggttcgaccctcgtcgccaacacaccctcctccaacatgccgccctcgaggagagcccacgcccagcccaactcgggccaacccttcgccagcccgaccgaatccgagttctcagacgtcgacggcccggacgcagttaagaactggtccgaggaccaagtctgcgagtacctgaggagcgtcaagtgcggcgagtacgagaagctgttccgcaagaacaacatcaacggcgagaacctgctggagatggacaaggaggtcctcaaagagatgggcatcgataaggtcggtgaccgagtgaggctcttcctgggcatcaagaagctgcgcaccaaggcctatgccaaccagaagaagcggaatagggattcgtttgctctgctggacaaccaatacacgccctcgactgcatctccacgaccatccaattccgccagtcgttccataccgacccctccttctaacaaaagatactctcgccaaatcgacttgtctggcttcggcatgaaccccgtcatcgaaatcggcaaacccaactcacgccctggttcaccgttgcatagtgccgacgtccgaactgctcgacaacagggctatcctcggaatcaaacgaatatgggtggcatgcagcccaatccagcccccagaggatacatggctcctcctgagaccatggcttccggcagattggtactgcacaccaggaacaattcaagtcaagatggttcgctgatggctgcgctaccacaggaccaagacttcattcgcgtcatttccactggaggcatcaccaaagtagtcaaagtggccggctgcagcaactgcgaggaagtcatgcgagtgacgttgcgaaagtttgcccttagagaggaccacgaccgcaactactgtttctgggtgttggccggtgtcgaacccgacccgaagcaatgccgtcgtctgggcgataccgaactgtggcgcatcattaaggatcagaagcgtccggagagaaacagactgattctcaggagggttccatccggcgagcccggtgactcggagctggaccgagcggctgctattggcatggaagaagcacaacagaaacatgcacgagccattggcaacgtgcaggacaagaggagccagctcaaggtacagaagctgctgggtgagagctggaatgagggcctacagcagcctctgtcccctatctctttccaagaccgggagagaaacgtgcaacacgcagctagagacttggagcgaccagcacccagcccgaccaaggtgacccctcgacgcaagggtctcctgagacagtttggcggcctgagaccgcctagtgaactgatcacatccgatcttacttcatactttcccgatcatccacgagaggatatcgaccgaactgcccggctgtccatgcgaagatcggcgaggttgagtagggtcaacagccgactgagtgtcgccagcaacctaagtttcgcctccagcgttcaggacgctcctcctattcctaccatagctgacacttggctcaacaatggccatcttgccaaggtgaagggtcgcgatgctcaaggccgtatgacccatgcatacagagattccgtcacgtcatcggtgctggacaccctccaagaggaatcgcccatcgagccgaaccgcaaatcttatgtctctttcgccgacagcggatccgatactaaccctgtcagtatcacagatcctgatggcaatctagtccgtcagagttacttcgatgagaccagtactcaaggctccgggtcactcaaagacatcactaaagccttgagtgaggacggcgaagataacgatgaggaattagcaagctttcttactggtgattcctgggacgataacaagtggatgaaaggtgctcttattggccagggctccttcggatctgtgtacctagctcttcatgctatcacaggcgagcttctagccgtcaagcaagtggaggctctgtccccgagcgccaacagccagaccgatgcccgtaagaagagcatgatcgaggcactcaagcgcgagatcagtctactccgagatctccgacatcccaacatcgtccagtacctcggctgtggctcgtccagtgattacctcaacattttcttggagtacgtacctggtggatcagtgcagacgatgttgaactcgtacggcgcgcttccggagcctcttgttcgcagcttcgtgcgacaaattctggagggtctgtcgtacttgcaccagcgagacatcattcaccgagacatcaagggcgccaatattcttgttgacaataagggcaccattaagatttctgatttcggtatcagcaagaagcttgaggcttccaatattctcaacggggcaaacaacaacaagaaccgtccgtcccttcagggctccgtgttctggatggcaccggaagtcgtcaaacaaacctcttatacccgcaaagccgacatttggtcacttggatgcctggttgttgagatgatgacaggtcaacaccccttccctgattgcagccaattgcaggctatcttcaagattggcggcggcaaagcctcgcccaccatccccgataacgccagccctgaggctgttgaattcttgagccgcaccttcgagatcgaccataacctacgtcctagtgccgacgaactcatgctaagcccgttcatgacgcccatcacctag

SEQ ID NO: 14846 - protein, 917 aa, Muscodor strobelii
  misc_feature: SGI Peptide ID NO. 564902
  misc_feature (63)..(129): Pfam Id: PF07647 Pfam Desc: SAM domain (Sterile alpha motif)
  misc_feature (643)..(913): Pfam Id: PF00069 Pfam Desc: Protein kinase domain
  misc_feature (643)..(913): Pfam Id: PF07714 Pfam Desc: Protein tyrosine kinase
  misc_feature (268)..(358): Pfam Id: PF00788 Pfam Desc: Ras association (RalGDS/AF-6) domain
  misc_feature (64)..(127): Pfam Id: PF00536 Pfam Desc: SAM domain (Sterile alpha motif)
  misc_feature (1)..(915): NCBI GI: 171686446 Blast Desc: protein product [Podospora anserina] gi|170943184|emb|CAP68837.1| protein product [Podospora anserina]
  misc_feature (1)..(916): NCBI GI: 164425275 Blast Desc: NCU06182 [Neurospora crassa OR74A] gi|157070861|gb|EAA33758.2| NCU06182 [Neurospora crassa OR74A]
  misc_feature (42)..(915): NCBI GI: 116208032 Blast Desc: CHGG_03309 [Chaetomium globosum CBS 148.51] gi|88183906|gb|EAQ91374.1| CHGG_03309 [Chaetomium globosum CBS 148.51]
  misc_feature (1)..(917): NCBI GI: 256729910 Blast Desc: [Nectria haematococca mpVI 77-13-4]
  misc_feature (1)..(917): NCBI GI: 46122213 Blast Desc: FG05484.1 [Gibberella zeae PH-1]
  misc_feature (1)..(917): NCBI GI: 210076473 Blast Desc: Ste11 [Botryotinia fuckeliana]
  misc_feature (42)..(917): NCBI GI: 156065191 Blast Desc: SS1G_00606 [Sclerotinia sclerotiorum 1980] gi|154691465|gb|EDN91203.1| SS1G_00606 [Sclerotinia sclerotiorum 1980]
  misc_feature (262)..(917): NCBI GI: 145608830 Blast Desc: MGG_12855 [Magnaporthe grisea 70-15] gi|145016261|gb|EDK00751.1| MGG_12855 [Magnaporthe grisea 70-15]
  misc_feature (258)..(916): NCBI GI: 2654103 Blast Desc: MAPKK kinase [Neurospora crassa]
  misc_feature (11)..(914): NCBI GI: 225557849 Blast Desc: MAP kinase [Ajellomyces capsulatus G186AR]
  misc_feature: Useful for introducing or modulating the production of volatile compounds
MAMLASKSSFPASLASSGSTLVANTPSSNMPPSRRAHAQPNSGQPFASPTESEFSDVDGPDAVKNWSEDQVCEYLRSVKCGEYEKLFRKNNINGENLLEMDKEVLKEMGIDKVGDRVRLFLGIKKLRTKAYANQKKRNRDSFALLDNQYTPSTASPRPSNSASRSIPTPPSNKRYSRQIDLSGFGMNPVIEIGKPNSRPGSPLHSADVRTARQQGYPRNQTNMGGMQPNPAPRGYMAPPETMASGRLVLHTRNNSSQDGSLMAALPQDQDFIRVISTGGITKVVKVAGCSNCEEVMRVTLRKFALREDHDRNYCFWVLAGVEPDPKQCRRLGDTELWRIIKDQKRPERNRLILRRVPSGEPGDSELDRAAAIGMEEAQQKHARAIGNVQDKRSQLKVQKLLGESWNEGLQQPLSPISFQDRERNVQHAARDLERPAPSPTKVTPRRKGLLRQFGGLRPPSELITSDLTSYFPDHPREDIDRTARLSMRRSARLSRVNSRLSVASNLSFASSVQDAPPIPTIADTWLNNGHLAKVKGRDAQGRMTHAYRDSVTSSVLDTLQEESPIEPNRKSYVSFADSGSDTNPVSITDPDGNLVRQSYFDETSTQGSGSLKDITKALSEDGEDNDEELASFLTGDSWDDNKWMKGALIGQGSFGSVYLALHAITGELLAVKQVEALSPSANSQTDARKKSMIEALKREISLLRDLRHPNIVQYLGCGSSSDYLNIFLEYVPGGSVQTMLNSYGALPEPLVRSFVRQILEGLSYLHQRDIIHRDIKGANILVDNKGTIKISDFGISKKLEASNILNGANNNKNRPSLQGSVFWMAPEVVKQTSYTRKADIWSLGCLVVEMMTGQHPFPDCSQLQAIFKIGGGKASPTIPDNASPEAVEFLSRTFEIDHNLRPSADELMLSPFMTPIT

SEQ ID NO: 14847 - DNA, 4310 bp, Muscodor strobelii
  misc_feature: SGI EST ID NO. CUFF.35739.2
  misc_feature: Variant of the nucleotide sequence at SEQ ID NO 14845
cgacttccctgtgttcaactgcccatgaactgcccatgcattcctctctcgcctctgtcgaggttcctatcgtgcgcacccgcctgccttcgcgtgcatcttttaacatctgcactcgcatctgcacaccatctcgacacgttccttccagaactcttcctcttccctctctcctgcatttgattgattgattcaacgctcgttccttcccctcctgtccttctttttcctcgaccaactttcaagcgtcgggttcaagctttcgtgaaaaagaggatcggcgcacaggttcgcatcctccacggttaattacgaagtgatctcacagagcgatccatcatccctagacccgagcgaccttgcccaaaacccacttagcacgcgcagcccgcccatatctgaaaccaccccagagcacatccacgcttgcacagtcaacgccaagccccgcgctcgctcactcgtaccttcccgctcactcaggaaagagctcgggttgctggtgctatttgagccttggcgcccctgtcccttcccacttacacctaacgccaattaggtagtactacgatcgacatccagcactgtaccactatattccgcaccttcattcatctgtcgtcaacacccgcgattctctccgctcttttatctgcgcaccactccctcctccccacagctaacggagagcgtggtgcttgcagttccgtaattctgttcgggaaaagagaccgagcgagcgagcgaccacgggagcaacaaaaacactaatcgtccccttcctttcccattgtcctgttgtgcctctggagtcttgtctcgactcgggcaccgtcctcattctctttgtctccctccctccccctccgacatccttcacaatggcgatgctcgcctccaaatcatcatttccagcatcgctggcctcgagtggttcgaccctcgtcgccaacacaccctcctccaacatgccgccctcgaggagagcccacgcccagcccaactcgggccaacccttcgccagcccgaccgaatccgagttctcagacgtcgacggcccggacgcagttaagaactggtccgaggaccaagtctgcgagtacctgaggagcgtcaagtgcggcgagtacgagaagctgttccgcaagaacaacatcaacggcgagaacctgctggagatggacaaggaggtcctcaaagagatgggcatcgataaggtcggtgaccgagtgaggctcttcctgggcatcaagaagctgcgcaccaaggcctatgccaaccagaagaagcggaatagggattcgtttgctctgctggacaaccaatacacgccctcgactgcatctccacgaccatccaattccgccagtcgttccataccgacccctccttctaacaaaagatactctcgccaaatcgacttgtctggcttcggcatgaaccccgtcatcgaaatcggcaaacccaactcacgccctggttcaccgttgcatagtgccgacgtccgaactgctcgacaacagggctatcctcggaatcaaacgaatatgggtggcatgcagcccaatccagcccccagaggatacatggctcctcctgagaccatggcttccggcagattggtactgcacaccaggaacaattcaagtcaagatggttcgctgatggctgcgctaccacaggaccaagacttcattcgcgtcatttccactggaggcatcaccaaagtagtcaaagtggccggctgcagcaactgcgaggaagtcatgcgagtgacgttgcgaaagtttgcccttagagaggaccacgaccgcaactactgtttctgggtgttggccggtgtcgaacccgacccgaagcaatgccgtcgtctgggcgataccgaactgtggcgcatcattaaggatcagaagcgtccggagagaaacagactgattctcaggagggttccatccggcgagcccggtgactcggagctggaccgagcggctgctattggcatggaagaagcacaacagaaacatgcacgagccattggcaacgtgcaggacaagaggagccagctcaaggtacagaagctgctgggtgagagctggaatgagggcctacagcagcctctgtcccctatctctttccaagaccgggagagaaacgtgcaacacgcagctagagacttggagcgaccagcacccagcccgaccaaggtgacccctcgacgcaagggtctcctgagacagtttggcggcctgagaccgcctagtgaactgatcacatccgatcttacttcatactttcccgatcatccacgagaggatatcgaccgaactgcccggctgtccatgcgaagatcggcgaggttgagtagggtcaacagccgactgagtgtcgccagcaacctaagtttcgcctccagcgttcaggacgctcctcctattcctaccatagctgacacttggctcaacaatggccatcttgccaaggtgaagggtcgcgatgctcaaggccgtatgacccatgcatacagagattccgtcacgtcatcggtgctggacaccctccaagaggaatcgcccatcgagccgaaccgcaaatcttatgtctctttcgccgacagcggatccgatactaaccctgtcagtatcacagatcctgatggcaatctagtccgtcagagttacttcgatgagaccagtactcaaggctccgggtcactcaaagacatcactaaagccttgagtgaggacggcgaagataacgatgaggaattagcaagctttcttactggtgattcctgggacgataacaagtggatgaaaggtgctcttattggccagggctccttcggatctgtgtacctagctcttcatgctatcacaggcgagcttctagccgtcaagcaagtggaggctctgtccccgagcgccaacagccagaccgatgcccgtaagaagagcatgatcgaggcactcaagcgcgagatcagtctactccgagatctccgacatcccaacatcgtccagtacctcggctgtggctcgtccagtgattacctcaacattttcttggagtacgtacctggtggatcagtgcagacgatgttgaactcgtacggcgcgcttccggagcctcttgttcgcagcttcgtgcgacaaattctggagggtctgtcgtacttgcaccagcgagacatcattcaccgagacatcaagggcgccaatattcttgttgacaataagggcaccattaagatttctgatttcggtatcagcaagaagcttgaggcttccaatattctcaacggggcaaacaacaacaagaaccgtccgtcccttcagggctccgtgttctggatggcaccggaagtcgtcaaacaaacctcttatacccgcaaagccgacatttggtcacttggatgcctggttgttgagatgatgacaggtcaacaccccttccctgattgcagccaattgcaggctatcttcaagattggcggcggcaaagcctcgcccaccatccccgataacgccagccctgaggctgttgaattcttgagccgcaccttcgagatcgaccataacctacgtcctagtgccgacgaactcatgctaagcccgttcatgacgcccatcacctagaacgtgaaaatgcctcattttctggtatcttggtgtagtttggttaacgatctgcatacttcttcctcttccgaaattaatgattctggtgacgattcttgttcgattaaaggcaaagcatgagagccttatatacacacgtgcgcctctcctcctatttacgattgcacatactttggcttttaaaggcgttttcttgctagatggatgggctataatgaaatgagacaagggactcatactggaacggatgaaatggaaatggctatagagcttgatacgataccatgtgcattagctggctggcatactgaattgagagcgacaatgtttcgcatttgagatcactacgagccatttgagcatcaatatgacatgacacaactggtgtgaatgtgtttgtgtaaattttgtattcaaaggtggtatcgacgtggttgattgacatggacccattattttcatacctcctaaacaggctggaactattgtgtgagacatgctgctatgctattgaatgggctctggcatgataggtgtctgtgagtgaggtacttaatctatttccacccatagcgttgagcaggccgagtaagaggcctgggtcatcatgcaacaacaatttcaacctttgagagactgatcgcttctcccttggtgatgctccgtggtccg

SEQ ID NO: 14848 - DNA, 3201 bp, Muscodor strobelii
  misc_feature: SGI cDNA ID NO. 564903
  misc_feature: Reduced expression when VOC is produced
  misc_feature: Encodes the peptide sequence at SEQ ID NO 14849
atggtgaaggaccgcgcgaagatggactcggcggggatcattctcgccgatgaaagcaatcagatccctgagcctcagttcgcagacctctcaacagtcagcagtctccgattcggatcctacaagttcgcagacacggccaaggaggactttacgcaaaaatacaattgggtcactgaagaaagcgcattacaatcggaaccttcgctcttgaaaacaaagaaagaatatcttgttttgacttcttcatcactcctgaagttcaaaagtcgcagcgccgcccaaaatcaattcccaaacatatcagcgacagacggagtaaagggactaacgcccatcgaactgcacacgtctctacaagatctagcaacaagcacggaactacaggtatctctggaaaaggttgtttcggtctttaaagatgaaggaacacgaccatccttcgggctcgaagtctggtggagtgactccgatacgacacgaaatttcatctctgcgcagctcgattttcggctcccggaagagcgtgacgactggctcaagcagattcgacttgcggtcaaatcaaagagcaaggctactggcgatgaacgttcagcgtcagaaattccccccgatctgcgactgatgatggaagccaagcagcaaaacagcagagaagaccaagtcgatatatttccggtagtacctcgaaaaccgtatcctgcagttggggaagtcaagaaaaattggcgcgaagcgtcatcattctatctcgcatttggaaaatattccgttcttctcggccagttttctcacaactcaaagggacttctcgaggtcaacaagactaatccaagtctcgttcggtttggcttggtcacacttgcgcgagtcttcatgaacatgaacgatgaaagattcgatttagtgttccgacttccgctggaagagcctaagaaaatcgagctatctagtcggtactatcgaaacatattagcaaaattatggcgattagacacatatcttaaacccgcctggcctttatggaccaggcgcgaagtcttcttcatggacgatgggacacaacatgtgccgctacccaatggcgaagattacggagggttcagaacaaccttagaagcttttcttgagggatttcactgtccttcggtcgaatggacagtgaaatggaagaacgtgaattatgcccctcagttctgtctgctcaagcccaaagaccagcaacactattctgctcatcagctacttgctgtattccgtgctattcgattcaacgatttcttcaagtcactctcctttcacagtgttgacttctccaacctctccaacatttttgacaatacacaccgacttgaatcgacaatatggctctcacgcacagggaaacgcagtctgacgcgtggcgaattcgatttggtcgagtcttcatcggtcatgttccaagaactaatatcagttctgctgggatccgagtcaatcaagcacatcgatcttactaacgtcttacggcgtgtgccaaccatgtcgtctgccacgtctgacaatctcatctcggtgcccactggagtctgcgaaattatgccgccaatagtcttgctttggaagtcgttgcaaacacgatgcaattctatcgcattgaatggcaatgctatcggtgacactgatgctgttgagctctgtcgggtacttcagaatagaagtaacttcttgcgtaccttcgaagtttcagactgcaacctggatgaaggatctttggtatatctatgggaaggattgcacgagcagcgttcttctctcgaggagctcgacacatcgtacaattctgggcgggtagaagctttccgcgtcgcttacactctgaacgaagcagccggtttgcggcgcttgaatttagcgtattccataaggggagatctcgaaggacctctatttagaccttggacccagtctgaaccctttgaggtctggcatctagaggagttggatctctccggctggaagatcaacttcgacactatgtgcagcttaatgaagtatctcgagcttgatgaatccaaaggccttcgtcgattaacacttaacaattgtggcatttccggagagatggccacgggcttgttctgccgactcggttctggtcgagacctgcatttatctctaagtggaaacccgttagagtctggctcgaccgattggatcgacctgattcatggtaatgaggctcctaaaatgcttcatctggatatgattcagtttcaacacgagtcgactttcaaccgactgttcactgcactatcgcacaacaaaacactcaaattcctcagtctagtaggaaccggcccgcctgatcgtgtctcatcgaagacctcccaagtgctctcagatttcttcacgatgaatgacaccctagagtttcttgacctctcaggctacagtgggaaactcgaggacggacatcttggctggggtctctcaggagccctaggaggactcagagaaaacacatcgctccgacaactccgtctcaaaaatcatgacatgggcgcagcgagtgatctatcggaactatgtcgagtactcgccaacaaccgcggcttagcaatgttcgactgccgtcacaacaatttcgatcaccaccaattcggacaaattgttgaggcgcttcctttcaaccaccagctaatttccttccccttatcagactccgaccgagagtatgcactccgcaaagagaaacaagtcttcatgaaattccaatccaaagctccggagaaaattggcaaagcagccgaaggccggctagaaagctcgctgtcatggctcaatgggcactgggcttcggaaacacagaaaataaaagacatcctcacacgtaacaaaaacagccccatcaatcgcctcctagaactcgaagctccctatctcgaggcatgggatgatccggacctaccctcatggcttgtgccaaaacaagtcctacagcctgtcagaaccaagagacgcgcgtcaaacgcatcgacattcgcatcttcattaggcgatatgtcgcccatcactactacaagcccagataatcccttcaaaccaaaccgtcgagaatctgacgcacttaggaagacttacgtcattgaggaagagtcttccacttctgactatgagagggaaatgaatgatagtccggatagctacgaaggttga

SEQ ID NO: 14849 - protein, 1066 aa, Muscodor strobelii
  misc_feature: SGI Peptide ID NO. 564903
  misc_feature (58)..(962): NCBI GI: 261358314 Blast Desc: leucine rich repeat protein [Verticillium albo-atrum VaMs.102]
  misc_feature (55)..(905): NCBI GI: 171686448 Blast Desc: protein product [Podospora anserina] gi|170943185|emb|CAP68838.1| protein product [Podospora anserina]
  misc_feature (62)..(906): NCBI GI: 85109594 Blast Desc: NCU06181 [Neurospora crassa OR74A] gi|28924640|gb|EAA33757.1| [Neurospora crassa OR74A]
  misc_feature (30)..(915): NCBI GI: 46125137 Blast Desc: FG06946.1 [Gibberella zeae PH-1]
  misc_feature (58)..(915): NCBI GI: 256733153 Blast Desc: [Nectria haematococca mpVI 77-13-4]
  misc_feature (77)..(910): NCBI GI: 116208028 Blast Desc: CHGG_03307 [Chaetomium globosum CBS 148.51] gi|88183904|gb|EAQ91372.1| CHGG_03307 [Chaetomium globosum CBS 148.51]
  misc_feature (58)..(911): NCBI GI: 154311407 Blast Desc: BC1G_06556 [Botryotinia fuckeliana B05.10] gi|150850953|gb|EDN26146.1| BC1G_06556 [Botryotinia fuckeliana B05.10]
  misc_feature (58)..(911): NCBI GI: 156065197 Blast Desc: SS1G_00609 [Sclerotinia sclerotiorum 1980] gi|154691468|gb|EDN91206.1| SS1G_00609 [Sclerotinia sclerotiorum 1980]
  misc_feature (58)..(954): NCBI GI: 226285676 Blast Desc: leucine rich repeat protein [Paracoccidioides brasiliensis Pb01]
  misc_feature (58)..(954): NCBI GI: 226294801 Blast Desc: leucine rich repeat protein [Paracoccidioides brasiliensis Pb18]
  misc_feature: Useful for introducing or modulating the production of volatile compounds
MVKDRAKMDSAGIILADESNQIPEPQFADLSTVSSLRFGSYKFADTAKEDFTQKYNWVTEESALQSEPSLLKTKKEYLVLTSSSLLKFKSRSAAQNQFPNISATDGVKGLTPIELHTSLQDLATSTELQVSLEKVVSVFKDEGTRPSFGLEVWWSDSDTTRNFISAQLDFRLPEERDDWLKQIRLAVKSKSKATGDERSASEIPPDLRLMMEAKQQNSREDQVDIFPVVPRKPYPAVGEVKKNWREASSFYLAFGKYSVLLGQFSHNSKGLLEVNKTNPSLVRFGLVTLARVFMNMNDERFDLVFRLPLEEPKKIELSSRYYRNILAKLWRLDTYLKPAWPLWTRREVFFMDDGTQHVPLPNGEDYGGFRTTLEAFLEGFHCPSVEWTVKWKNVNYAPQFCLLKPKDQQHYSAHQLLAVFRAIRFNDFFKSLSFHSVDFSNLSNIFDNTHRLESTIWLSRTGKRSLTRGEFDLVESSSVMFQELISVLLGSESIKHIDLTNVLRRVPTMSSATSDNLISVPTGVCEIMPPIVLLWKSLQTRCNSIALNGNAIGDTDAVELCRVLQNRSNFLRTFEVSDCNLDEGSLVYLWEGLHEQRSSLEELDTSYNSGRVEAFRVAYTLNEAAGLRRLNLAYSIRGDLEGPLFRPWTQSEPFEVWHLEELDLSGWKINFDTMCSLMKYLELDESKGLRRLTLNNCGISGEMATGLFCRLGSGRDLHLSLSGNPLESGSTDWIDLIHGNEAPKMLHLDMIQFQHESTFNRLFTALSHNKTLKFLSLVGTGPPDRVSSKTSQVLSDFFTMNDTLEFLDLSGYSGKLEDGHLGWGLSGALGGLRENTSLRQLRLKNHDMGAASDLSELCRVLANNRGLAMFDCRHNNFDHHQFGQIVEALPFNHQLISFPLSDSDREYALRKEKQVFMKFQSKAPEKIGKAAEGRLESSLSWLNGHWASETQKIKDILTRNKNSPINRLLELEAPYLEAWDDPDLPSWLVPKQVLQPVRTKRRASNASTFASSLGDMSPITTTSPDNPFKPNRRESDALRKTYVIEEESSTSDYEREMNDSPDSYEG

SEQ ID NO: 14850 - DNA, 4162 bp, Muscodor strobelii
  misc_feature: SGI EST ID NO. CUFF.35424.0
  misc_feature: Variant of the nucleotide sequence at SEQ ID NO 14848
aggcactagtacgagcagggtcgcagatcataggctggtgggggatggtcgcttggtgaactcgggatacggcgagataacgacaacacacacatctcattctctcattctatgagttgtaattacttttcattctgctgaattagccttgtatcgacgacgccgtagacatcagcgatttcaattacacaagtctcgcaattcgcaacaacaggtatctacaggtcacgatgatgcttcactactcctagcaatcgcaatagaggccgccaccacatagcacccgaacagttccaccgacgctcgtccatccaggcttagctcgattcatcaaatatgatcatgttggcttaagtcctgtcatcgctaaatggtgaaggaccgcgcgaagatggactcggtaacttcagcgccaccgcttcctctttcgaggtctcaaacatctctaaggcggggatcattctcgccgatgaaagcaatcagatccctgagcctcagttcgcagacctctcaacagtcagcagtctccgattcggatcctacaagttcgcagacacggccaaggaggactttacgcaaaaatacaattgggtcactgaagaaagtgaatcttagtcgaaatgactctaagtcatctgcggaagagagtgtgggccgagattcgacctcgacacgaccgactacgccatcacttcatggcagccgaaccgcgagcttgtatggcgatgttggacacgtgatcaaatcaggcgcattacaatcggaaccttcgctcttgaaaacaaagaaagaatatcttgttttgacttcttcatcactcctgaagttcaaaagtcgcagcgccgcccaaaatcaattcccaaacatatcagcgacagacggagtaaagggactaacgcccatcgaactgcacacgtctctacaagatctagcaacaagcacggaactacaggtatctctggaaaaggttgtttcggtctttaaagatgaaggaacacgaccatccttcgggctcgaagtctggtggagtgactccgatacgacacgaaatttcatctctgcgcagctcgattttcggctcccggaagagcgtgacgactggctcaagcagattcgacttgcggtcaaatcaaagagcaaggctactggcgatgaacgttcagcgtcagaaattccccccgatctgcgactgatgatggaagccaagcagcaaaacagcagagaagaccaagtcgatatatttccggtagtacctcgaaaaccgtatcctgcagttggggaagtcaagaaaaattggcgcgaagcgtcatcattctatctcgcatttggaaaatattccgttcttctcggccagttttctcacaactcaaagggacttctcgaggtcaacaagactaatccaagtctcgttcggtttggcttggtcacacttgcgcgagtcttcatgaacatgaacgatgaaagattcgatttagtgttccgacttccgctggaagagcctaagaaaatcgagctatctagtcggtactatcgaaacatattagcaaaattatggcgattagacacatatcttaaacccgcctggcctttatggaccaggcgcgaagtcttcttcatggacgatgggacacaacatgtgccgctacccaatggcgaagattacggagggttcagaacaaccttagaagcttttcttgagggatttcactgtccttcggtcgaatggacagtgaaatggaagaacgtgaattatgcccctcagttctgtctgctcaagcccaaagaccagcaacactattctgctcatcagctacttgctgtattccgtgctattcgattcaacgatttcttcaagtcactctcctttcacagtgttgacttctccaacctctccaacatttttgacaatacacaccgacttgaatcgacaatatggctctcacgcacagggaaacgcagtctgacgcgtggcgaattcgatttggtcgagtcttcatcggtcatgttccaagaactaatatcagttctgctgggatccgagtcaatcaagcacatcgatcttactaacgtcttacggcgtgtgccaaccatgtcgtctgccacgtctgacaatctcatctcggtgcccactggagtctgcgaaattatgccgccaatagtcttgctttggaagtcgttgcaaacacgatgcaattctatcgcattgaatggcaatgctatcggtgacactgatgctgttgagctctgtcgggtacttcagaatagaagtaacttcttgcgtaccttcgaagtttcagactgcaacctggatgaaggatctttggtatatctatgggaaggattgcacgagcagcgttcttctctcgaggagctcgacacatcgtacaattctgggcgggtagaagctttccgcgtcgcttacactctgaacgaagcagccggtttgcggcgcttgaatttagcgtattccataaggggagatctcgaaggacctctatttagaccttggacccagtctgaaccctttgaggtctggcatctagaggagttggatctctccggctggaagatcaacttcgacactatgtgcagcttaatgaagtatctcgagcttgatgaatccaaaggccttcgtcgattaacacttaacaattgtggcatttccggagagatggccacgggcttgttctgccgactcggttctggtcgagacctgcatttatctctaagtggaaacccgttagagtctggctcgaccgattggatcgacctgattcatggtaatgaggctcctaaaatgcttcatctggatatgattcagtttcaacacgagtcgactttcaaccgactgttcactgcactatcgcacaacaaaacactcaaattcctcagtctagtaggaaccggcccgcctgatcgtgtctcatcgaagacctcccaagtgctctcagatttcttcacgatgaatgacaccctagagtttcttgacctctcaggctacagtgggaaactcgaggacggacatcttggctggggtctctcaggagccctaggaggactcagagaaaacacatcgctccgacaactccgtctcaaaaatcatgacatgggcgcagcgagtgatctatcggaactatgtcgagtactcgccaacaaccgcggcttagcaatgttcgactgccgtcacaacaatttcgatcaccaccaattcggacaaattgttgaggcgcttcctttcaaccaccagctaatttccttccccttatcagactccgaccgagagtatgcactccgcaaagagaaacaagtcttcatgaaattccaatccaaagctccggagaaaattggcaaagcagccgaaggccggctagaaagctcgctgtcatggctcaatgggcactgggcttcggaaacacagaaaataaaagacatcctcacacgtaacaaaaacagccccatcaatcgcctcctagaactcgaagctccctatctcgaggcatgggatgatccggacctaccctcatggcttgtgccaaaacaagtcctacagcctgtcagaaccaagagacgcgcgtcaaacgcatcgacattcgcatcttcattaggcgatatgtcgcccatcactactacaagcccagataatcccttcaaaccaaaccgtcgagaatctgacgcacttaggaagacttacgtcattgaggaagagtcttccacttctgactatgagagggaaatgaatgatagtccggatagctacgaaggttgaacaacctgaatccattacacctgcagacacctgactacgttaacgatcacaccccgcatatactttcaccacttacacacgccggcgcattttgcctctcttcacatgtctatatttacaacctcctacatataccactcatgaccatatcaccctatacataccacaataaagctggtatatttccctatgtcttataaaggtctcatttgaagagggaccacggcaggcgtttgaactataacggaaggaattttgctgcaactgcataaggcgggtgacatgattgtctattaggatacacgagatacccaactgtcactttggcgtttacgtagcttaggcttgagattgattgaataatatatcgcattgctttgtgataaatatgagaaa

SEQ ID NO: 14851 - DNA, 1800 bp, Muscodor strobelii
  misc_feature: SGI cDNA ID NO. 564904
  misc_feature: Encodes the peptide sequence at SEQ ID NO 14852
atgaatattggcaatcgaatcggaagtgggggactatatcaatacgagtccctctcaccacaaaaagatgtcattagacttctcaaattcacgaaacaacccattagagacaaccatgagatcagcatcggactaatcaatacgtctctagatcagaaacaacctttcgaggcactatcctatgtctggggaagcgaaacagacaaagtagatatactatgtgatgggcgcatcctgaaagtcacacgaaaccttttcatcgcattggaagcaatattggtgagagggcctcctgcgtttctgtgggtggacgctatctgcatcaaccagcaagatgtcaccgaaaagatgagacagatccccctcatgggtcagatctactctcaggcgcagcagactatagtgtggcttggcgaagaagatcagatatcggctcagatggtacaactgatgccgaaagatgaggaacccttctctgacggttcgccttcgcgtacggaggcagtacatcatgagatgcagaatacatatactttacagcagcagcacgaagtgttcagggagttcttccgtcgtccgtggttctcccgagcatgggttgcgcaggagctttgtctcgccaacgctctcgatgtgcgcatcggatctcgcagcgttgacttcgacaagttgtccaacctatgctggtacgcattgctcaagtttcccggcgggttacctgggacggtgaacaggttcatctttatggaagacatcagacacgctttccatggcggcaagtcaatggacctttggtctctattgaagcagatggtgcagtcgcgatgctcgcttccacatgataaaatctactccatactcggatttctgcccgctgaactttcgaagacgatacgaccggattatgaagcacccttggcacatgtatatgctgagttcgctatggctgtcataaaaacagtgggcgatttgtccgtactgtggatctcttttctagcaccagaaaatgctgcagatattgaaggtgggacactgccaagctggatcccggactggcggcatcatttcatcgcatcgctcccgcaaagtcgcctctctgcaagtgctcctcagaatggagagtcgggagactcggatctatccacgatgaagattaatctgattactggacatagccctgagcttcatctccaaggatatatccttgacgtagttcagagcgtctgtccacatttcttcgcggatcgagatgagggtactgctgctgaggcgatacttggcacgtggatcgacttcgttcttacatctgaggtcaattatgaaacaccccagaattcaggtgaagagatgttgaacgtgctttggaaagtcctgagccagaacgagtgttattgggatcataagatcggggcattcgcagcacccacatccactcacgagagcgatgctctgcggatactcaaggctatccgcgctggagataaaccacagatacgatccaccattgagaccggctcagcgagttggggctaccagcgagcacctctgttgaagttcataggcaatatatgctggaacaagaaggtctttttcacagaatcgggccagttggggattgcgctgagcaacgtacgaccgggcgatacggtcgctgctttgaatggaagtgtatacccattcatcctcagaaacgccggaggcagtcgccgctatcagcttgttcgtctctgttactatcaggggcttatggatggacaagttactaatggcaaggcggcatgtgagattatcttggtatag

SEQ ID NO: 14852 - protein, 599 aa, Muscodor strobelii
  misc_feature: SGI Peptide ID NO. 564904
  misc_feature (56)..(203): Pfam Id: PF06985 Pfam Desc: Heterokaryon incompatibility protein (HET)
  misc_feature (11)..(599): NCBI GI: 154292443 Blast Desc: BC1G_14540 [Botryotinia fuckeliana B05.10] gi|150846126|gb|EDN21319.1| BC1G_14540 [Botryotinia fuckeliana B05.10]
  misc_feature (23)..(581): NCBI GI: 145245067 Blast Desc: An11g08370 [Aspergillus niger] gi|134079496|emb|CAK46028.1| protein product [Aspergillus niger]
  misc_feature (18)..(598): NCBI GI: 168042194 Blast Desc: [Physcomitrella patens subsp. patens] gi|162675113|gb|EDQ61612.1| [Physcomitrella patens subsp. patens]
  misc_feature (13)..(590): NCBI GI: 256730222 Blast Desc: NECHADRAFT_82497 [Nectria haematococca mpVI 77-13-4]
  misc_feature (12)..(587): NCBI GI: 119179507 Blast Desc: CIMG_08498 [Coccidioides immitis RS]
  misc_feature (100)..(589): NCBI GI: 171680414 Blast Desc: protein product [Podospora anserina] gi|170939834|emb|CAP65059.1| protein product [Podospora anserina]
  misc_feature (2)..(578): NCBI GI: 256722966 Blast Desc: NECHADRAFT_86875 [Nectria haematococca mpVI 77-13-4]
  misc_feature (13)..(413): NCBI GI: 115401102 Blast Desc: [Aspergillus terreus NIH2624] gi|114190080|gb|EAU31780.1| [Aspergillus terreus NIH2624]
  misc_feature (13)..(599): NCBI GI: 256730775 Blast Desc: NECHADRAFT_30134 [Nectria haematococca mpVI 77-13-4]
  misc_feature (12)..(587): NCBI GI: 240110131 Blast Desc: Heterokaryon incompatibility protein, [Coccidioides posadasii C735 delta SOWgp]
MNIGNRIGSGGLYQYESLSPQKDVIRLLKFTKQPIRDNHEISIGLINTSLDQKQPFEALSYVWGSETDKVDILCDGRILKVTRNLFIALEAILVRGPPAFLWVDAICINQQDVTEKMRQIPLMGQIYSQAQQTIVWLGEEDQISAQMVQLMPKDEEPFSDGSPSRTEAVHHEMQNTYTLQQQHEVFREFFRRPWFSRAWVAQELCLANALDVRIGSRSVDFDKLSNLCWYALLKFPGGLPGTVNRFIFMEDIRHAFHGGKSMDLWSLLKQMVQSRCSLPHDKIYSILGFLPAELSKTIRPDYEAPLAHVYAEFAMAVIKTVGDLSVLWISFLAPENAADIEGGTLPSWIPDWRHHFIASLPQSRLSASAPQNGESGDSDLSTMKINLITGHSPELHLQGYILDVVQSVCPHFFADRDEGTAAEAILGTWIDFVLTSEVNYETPQNSGEEMLNVLWKVLSQNECYWDHKIGAFAAPTSTHESDALRILKAIRAGDKPQIRSTIETGSASWGYQRAPLLKFIGNICWNKKVFFTESGQLGIALSNVRPGDTVAALNGSVYPFILRNAGGSRRYQLVRLCYYQGLMDGQVTNGKAACEIILV

SEQ ID NO: 14853 - DNA, 1342 bp, Muscodor strobelii
  misc_feature: SGI EST ID NO. CUFF.35415.0
  misc_feature: Variant of the nucleotide sequence at SEQ ID NO 14851
aaacaacctttcgaggcactatcctatgtctggggaagcgaaacagacaaagtagatatactatgtgatgggcgcatcctgaaagtcacacgaaaccttttcatcgcattggaagcaatattggtgagagggcctcctgcgtttctgtgggtggacgctatctgcatcaaccagcaagatgtcaccgaaaagatgagacagatccccctcatgggtcagatctactctcaggcgcagcagactatagtgtggcttggcgaagaagatcagatatcggctcagatggtacaactgatgccgaaagatgaggaacccttctctgacggttcgccttcgcgtacggaggcagtacatcatgagatgcagaatacatatactttacagcagcagcacgaagtgttcagggagttcttccgtcgtccgtggttctcccgagcatgggttgcgcaggagctttgtctcgccaacgctctcgatgtgcgcatcggatctcgcagcgttgacttcgacaagttgtccaacctatgctggtacgcattgctcaagtttcccggcgggttacctgggacggtgaacaggttcatctttatggaagacatcagacacgctttccatggcggcaagtcaatggacctttggtctctattgaagcagatggtgcagtcgcgatgctcgcttccacatgataaaatctactccatactcggatttctgcccgctgaactttcgaagacgatacgaccggattatgaagcacccttggcacatgtatatgctgagttcgctatggctgtcataaaaacagtgggcgatttgtccgtactgtggatctcttttctagcaccagaaaatgctgcagatattgaaggtgggacactgccaagctggatcccggactggcggcatcatttcatcgcatcgctcccgcaaagtcgcctctctgcaagtgctcctcagaatggagagtcgggagactcggatctatccacgatgaagattaatctgattactggacatagccctgagcttcatctccaaggatatatccttgacgtagttcagagcgtctgtccacatttcttcgcggatcgagatgagggtactgctgctgaggcgatacttggcacgtggatcgacttcgttcttacatctgaggtcaattatgaaacaccccagaattcaggtgaagagatgttgaacgtgctttggaaagtcctgagccagaacgagtgttattgggatcataagatcggggcattcgcagcacccacatccactcacgagagcgatgctctgcggatactcaaggctatccgcgctggagataaaccacagatacgat

SEQ ID NO: 14854 - DNA, 1593 bp, Muscodor strobelii
  misc_feature: SGI cDNA ID NO. 564905
  misc_feature: Encodes the peptide sequence at SEQ ID NO 14855
atgggtagcgaagatttctcggcttttgagaacgctgcgaggaggatccatcgccacatgagactgataggtgacaatcttgggttggatgataaatggtcagccccgttcattgtgggcggaaaggtcgacgtgcgtcgccgcaacaagtttttcaaagccacggcgaaaatctatggtggcctccattcagaagaccaccataacatcataactaggattcaagacgatgttaatagtcttcgagaaagcgtcaaaacagcaaatagattagaacgttctcgggcagttcggaagagacccaatgcttctgcatcgtcctgggtcaaagcccgaagccactctaaaaggctatacgaaaatttgcaatcgacattcttttctaattgctgtgcggcccataagcactcagcacagttcagattcaaagcgccctcgagcaagcaatcgggttacatgtcaggcggccctcttagctgctcatttatgctcgacagcacagatggcgaggcagaagatctgccctggaagcaccgacatgtacatctcatcccttatgcctccgagagacaacgagtaattgcgaacagttctgcgattagtggagcgccaactgtccaaatccatgctccagtggatgaagtcgaggagtcaggcggatgcaagtcgcttattaagattgaaaacttgtgcgaaactcttgaacatcagcccactggccaacaatgtaaaggatttctcgatgaccaagattggcgttatcacattcatgaggattctgtcgcggaagatagcattacatcttctgaggttaaatccttgagaaatcgtatgctaaatactgaaaagcgtcttgtccttacgtctcgacagaagagaaggatagcgcttcttctagcctccgctgtcctccaactccacggaacggcatggctcaggaagtcctggactctagacgacatctataccttggatgatatatatgtcttggataattgcgagttgtacgtccctagccagcatcccagcaccgcagccgtcaaggcggaacaaacctacgacatcctccggaacgagacgctatttgcgctcggcgaagccttaatcgaactcatctaccacagtccgcttgagagccatgatgcacctactcgctacagcggtgcgataaagatggccaaaaaactccaagaagacgagatggagacttatgcaatggtagtcgccaagtgtttagtcccgtcatctccaggtcagctcgacttcgatctcgaagacgattcgtttctagggtggtattacgaaaatattgttttgccgctgaaggaagattacgaggttttcctcggtgaggcgcctagtagccctcgctttttgtttaacaccagagacacgcaaacacaaagccaaagcacaaccagaatcgtgaagggagaaatacattccactgtcacggtccctcagccacgtccttccataccgggtcccgcaagtgacgaccagttcaagagagctaggaggcgatcccaaagattcatcgatgggatcaagagagcatttacgtcaagcacggtcgacgcaacacttacatag

SEQ ID NO: 14855 - protein, 530 aa, Muscodor strobelii
  misc_feature: SGI Peptide ID NO. 564905
  misc_feature (9)..(442): NCBI GI: 169615082 Blast Desc: SNOG_10696 [Phaeosphaeria nodorum SN15] gi|111060970|gb|EAT82090.1| SNOG_10696 [Phaeosphaeria nodorum SN15]
  misc_feature (9)..(451): NCBI GI: 212535818 Blast Desc: conserved [Penicillium marneffei ATCC 18224] gi|210070464|gb|EEA24554.1| conserved [Penicillium marneffei ATCC 18224]
  misc_feature (178)..(450): NCBI GI: 119499241 Blast Desc: NFIA_040570 [Neosartorya fischeri NRRL 181] gi|119414542|gb|EAW24481.1| conserved [Neosartorya fischeri NRRL 181]
  misc_feature (112)..(448): NCBI GI: 256734942 Blast Desc: NECHADRAFT_75706 [Nectria haematococca mpVI 77-13-4]
  misc_feature (158)..(450): NCBI GI: 189190046 Blast Desc: [Pyrenophora tritici-repentis Pt-1C-BFP] gi|187972968|gb|EDU40467.1| [Pyrenophora tritici-repentis Pt-1C-BFP]
  misc_feature (78)..(452): NCBI GI: 255941882 Blast Desc: Pc16g14120 [Penicillium chrysogenum Wisconsin 54-1255] gi|211586333|emb|CAP94082.1| Pc16g14120 [Penicillium chrysogenum Wisconsin 54-1255]
  misc_feature (197)..(450): NCBI GI: 240274341 Blast Desc: conserved [Ajellomyces capsulatus H143]
  misc_feature (287)..(448): NCBI GI: 67525627 Blast Desc: AN3271.2 [Aspergillus nidulans FGSC A4] gi|40743990|gb|EAA63172.1| AN3271.2 [Aspergillus nidulans FGSC A4] gi|259485763|tpe|CBF83058.1| TPA: conserved [Aspergillus FGSC
  misc_feature (267)..(450): NCBI GI: 145241930 Blast Desc: An09g02950 [Aspergillus niger] gi|134078153|emb|CAK40234.1| [Aspergillus niger]
  misc_feature (96)..(379): NCBI GI: 255956817 Blast Desc: Pc21g21900 [Penicillium chrysogenum Wisconsin 54-1255] gi|211590872|emb|CAP97087.1| Pc21g21900 [Penicillium chrysogenum Wisconsin 54-1255]
MGSEDFSAFENAARRIHRHMRLIGDNLGLDDKWSAPFIVGGKVDVRRRNKFFKATAKIYGGLHSEDHHNIITRIQDDVNSLRESVKTANRLERSRAVRKRPNASASSWVKARSHSKRLYENLQSTFFSNCCAAHKHSAQFRFKAPSSKQSGYMSGGPLSCSFMLDSTDGEAEDLPWKHRHVHLIPYASERQRVIANSSAISGAPTVQIHAPVDEVEESGGCKSLIKIENLCETLEHQPTGQQCKGFLDDQDWRYHIHEDSVAEDSITSSEVKSLRNRMLNTEKRLVLTSRQKRRIALLLASAVLQLHGTAWLRKSWTLDDIYTLDDIYVLDNCELYVPSQHPSTAAVKAEQTYDILRNETLFALGEALIELIYHSPLESHDAPTRYSGAIKMAKKLQEDEMETYAMVVAKCLVPSSPGQLDFDLEDDSFLGWYYENIVLPLKEDYEVFLGEAPSSPRFLFNTRDTQTQSQSTTRIVKGEIHSTVTVPQPRPSIPGPASDDQFKRARRRSQRFIDGIKRAFTSSTVDATLT

SEQ ID NO: 14856 - DNA, 2711 bp, Muscodor strobelii
  misc_feature: SGI EST ID NO. CUFF.35419.0
  misc_feature: Variant of the nucleotide sequence at SEQ ID NO 14854
tttctcttaagcgacgttagaaaggagcaaatgtccggcttcgaagttgttggcgtgattctaggcgccttgcctctggtagtcgctgccgtatctcaatatggtaagggggtaagttcactcatgcgaattctcctagcaggcactcctagttaagacatggctgtgaagactgctttcaagtgttaaccttagctaggtgtcgaagatcaaagaaatacggagctatgagcttgtattcgtagatatgaatgctaggtttcaattagtccgctgggcgatgagacaaacgtgcgaacagttgcttgaggatttgtctctccctgacgacacactcagagatctattagactaccaaaagggatgggaatcaacacagttacaaaatgcactattggcgaaaatgggtagcgaagatttctcggcttttgagaacgctgcgaggaggatccatcgccacatgagactgataggtgacaatcttgggttggatgataaatggtcagccccgttcattgtgggcggaaaggtcgacgtgcgtcgccgcaacaagtttttcaaagccacggcgaaaatctatggtggcctccattcagaagaccaccataacatcataactaggattcaagacgatgttaatagtcttcgagaaagcgtcaaaacagcaaatagattagaacgttctcgggcagttcggaagagacccaatgcttctgcatcgtcctgggtcaaagcccgaagccactctaaaaggctatacgaaaatttgcaatcgacattcttttctaattgctgtgcggcccataagcactcagcacagttcagattcaaagcgccctcgagcaagcaatcgggttacatgtcaggcggccctcttagctgctcatttatgctcgacagcacagatggcgaggcagaagatctgccctggaagcaccgacatgtacatctcatcccttatgcctccgagagacaacgagtaattgcgaacagttctgcgattagtggagcgccaactgtccaaatccatgctccagtggatgaagtcgaggagtcaggcggatgcaagtcgcttattaagattgaaaacttgtgcgaaactcttgaacatcagcccactggccaacaatgtaaaggatttctcgatgaccaagattggcgttatcacattcatgaggattctgtcgcggaagatagcattacatcttctgaggttaaatccttgagaaatcgtatgctaaatactgaaaagcgtcttgtccttacgtctcgacagaagagaaggatagcgcttcttctagcctccgctgtcctccaactccacggaacggcatggctcaggaagtcctggactctagacgacatctataccttggatgatatatatgtcttggataattgcgagttgtacgtccctagccagcatcccagcaccgcagccgtcaaggcggaacaaacctacgacatcctccggaacgagacgctatttgcgctcggcgaagccttaatcgaactcatctaccacagtccgcttgagagccatgatgcacctactcgctacagcggtgcgataaagatggccaaaaaactccaagaagacgagatggagacttatgcaatggtagtcgccaagtgtttagtcccgtcatctccaggtcagctcgacttcgatctcgaagacgattcgtttctagggtggtattacgaaaatattgttttgccgctgaaggaagattacgaggttttcctcggtgaggcgcctagtagccctcgctttttgtttaacaccagagacacgcaaacacaaagccaaagcacaaccagaatcgtgaagggagaaatacattccactgtcacggtccctcagccacgtccttccataccgggtcccgcaagtgacgaccagttcaagagagctaggaggcgatcccaaagattcatcgatgggatcaagagagcatttacgtcaagcacggtcgacgcaacacttacataggaagcgcaccgggcagataatccggggccggagtaattctgtcaagagatacacctatacgcggagtaataaatccagatatagtagtttggggtgggtgcaaaggggatattacggcgcaatgtcacggtcaaattatcacatgccacccttcgtcacaactactcgtactcgtgaagaggaaatgatcgttactgatattattttagtcctacgctgttcggaattgtgactgcccctagttgcgaatcgtcatgactattcaaaaacagcttcaatgtgacagctgtcgctgtaaatccgccgtagactgtatgaaaagggccgggcgaacaccttgtttcggagtaatctttccagccccattcttctagcctaggtctcgcctctgacttgaacacctctctcatcatagttattttcaataagaatcaaccatgagatataagtgcagtgtcaaggacataccatctacataagctttattttcggggaaaattaagatagtccgtacattctttgaagctcagtaacactctaaactactataccaagataatctcacatgccgccttgccattagtaacttgtccatccataagcccctgatagtaacagagacgaacaagctgatagcggcgactgcctccggcgtttctgaggatgaatgggtatacacttccattcaaagcagcgaccgtatcgcccggtcgta

SEQ ID NO: 14857 - DNA, 954 bp, Muscodor strobelii
  misc_feature: SGI cDNA ID NO. 564906
  misc_feature: Encodes the peptide sequence at SEQ ID NO 14858
atgatcactagacgcagattcctattacgatacagatcttcgcatcaagatggactccaaggtcgcaatggatctttagagacaagaaaatcggcattgatagtgggagagagctccaagccaccttccgatgcttacgatgttgggagacaactgcaaacccctaatatcgacgatgctcgcagcagtcataattctggctctgatgttcaatctgaggcgacccagttagacccagtggcacaacttcaacaactccaaatcactggcaggagacttgagttaccagagactgtggacgaagatgttgtatcgacaacgtctgacatggccagtgccttcacgcgcgagtcctcgctgagagtgccgccaaggcccaagaatgaagcagggcagtataaaacgaactttgtgtgcagctactgcaaactaccagtctatctacagcgagaggacgaggaacaagcttggaagcggcacgtgcttcaagacctattaccgtcccattacatggtcgacgacgatgaagaggttgcagatgatgactcaaaacgtgcacagaggatggaaggacttgatatcacatctgagctggacccttgtgtactagatgacatagagttcgagagctccgaaggcgcagacaatgcagcagaagggacgctccatgatgatgaaccgaacgcagatgactcaggaagtcctgaaggcgaaggagacgcagtagagaagatacttaatcaagacaacccacgtgaaactcactccgaacagggcgacgagaaaggtcaggccaagggggatactgtttggggatacctatttccaaattccgagcggtacggtggaaaacgtattgctctcacaaccactcacacaagaactgttgggtcactgggtactggttacatgattggacgaagttctaagagtggtgagtctttggaacgttga

SEQ ID NO: 14858 - protein, 317 aa, Muscodor strobelii
  misc_feature: SGI Peptide ID NO. 564906
  misc_feature (61)..(167): NCBI GI: 145241932 Blast Desc: An09g02960 [Aspergillus niger] gi|134078154|emb|CAK40235.1| protein product [Aspergillus niger]
  misc_feature (92)..(170): NCBI GI: 255940428 Blast Desc: Pc16g06470 [Penicillium chrysogenum Wisconsin 54-1255] gi|211585606|emb|CAP93317.1| Pc16g06470 [Penicillium chrysogenum Wisconsin 54-1255]
MITRRRFLLRYRSSHQDGLQGRNGSLETRKSALIVGESSKPPSDAYDVGRQLQTPNIDDARSSHNSGSDVQSEATQLDPVAQLQQLQITGRRLELPETVDEDVVSTTSDMASAFTRESSLRVPPRPKNEAGQYKTNFVCSYCKLPVYLQREDEEQAWKRHVLQDLLPSHYMVDDDEEVADDDSKRAQRMEGLDITSELDPCVLDDIEFESSEGADNAAEGTLHDDEPNADDSGSPEGEGDAVEKILNQDNPRETHSEQGDEKGQAKGDTVWGYLFPNSERYGGKRIALTTTHTRTVGSLGTGYMIGRSSKSGESLER

SEQ ID NO: 14859 - DNA, 2481 bp, Muscodor strobelii
  misc_feature: SGI EST ID NO. CUFF.35509.0
  misc_feature: Variant of the nucleotide sequence at SEQ ID NO 14857
cgattgaaaggcctatagcaaaatcgtactttcgctgtcgtcaatcgttcgaccacctctgccacaccgtcgaagcctcgccatatgactggttaagatctgatcccgatatcgctacaagtgtcctcaatcagttcgatagatacctgctatgggctgggaacctgggggcaggacgagataaatataagttgtcgctcgactaccgattagcagaagcatctttctatcgagaccttgttagtgtcgtcgaacgaatcgttcaatattgatagttcgtttatgcgatcgattgaccactctgaccgatatctagattctgagagtcacggctatactacagcgccatatcacgcgagcactgcgagtattgggtcagcatgtctccaacttaccaggcatgtctgacacagaggaagatgagtcttcttcaaactcgggagaatcggtatcactgtcagaaatttcgtccgacaccgataatgtaaaagagactgtaacttcgtcaccgacggataatcacactttaggagaccgggaactgttcagaagacttattagctcaatcgagctaaccatagcatcactctatcggatgaaaatccggtctccagcaccacttgatcgattaaaagagcttgcgacagacgaatttgcaagttttcaacgcgtcgatatcttgcatgtcaaagacaagttcagtatgttagatacagaagctgcagaaagcctcggcaaaatgatcactagacgcagattcctattacgatacagatcttcgcatcaagatggactccaaggtcgcaatggatctttagagacaagaaaatcggcattgatagtgggagagagctccaagccaccttccgatgcttacgatgttgggagacaactgcaaacccctaatatcgacgatgctcgcagcagtcataattctggctctgatgttcaatctgaggcgacccagttagacccagtggcacaacttcaacaactccaaatcactggcaggagacttgagttaccagagactgtggacgaagatgttgtatcgacaacgtctgacatggccagtgccttcacgcgcgagtcctcgctgagagtgccgccaaggcccaagaatgaagcagggcagtataaaacgaactttgtgtgcagctactgcaaactaccagtctatctacagcgagaggacgaggaacaagcttggaagcggcacgtgcttcaagacctattaccgtatgtgtgcacttttccgaactgtgcgcagtctggacacccattcgacactcgaactacatggtgggagcacgaacttcaaaatcatagagtggagtattattgcaacgtaaaagaacaccaattttacgaggactttgaattgtttcaggtccacatgcaggatgaccataagctcccgtgtgatgaactaaccaatattattgatttattcaagcgaccgtctacatcggaacattcgaaatgcaatatgtgtggaaatatctcgcttcagctaaagacacatgtttcgcgccatctccagcatcttgcactatttgcaatacccaggtcccattacatggtcgacgacgatgaagaggttgcagatgatgactcaaaacgtgcacagaggatggaaggacttgatatcacatctgagctggacccttgtgtactagatgacatagagttcgagagctccgaaggcgcagacaatgcagcagaagggacgctccatgatgatgaaccgaacgcagatgactcaggaagtcctgaaggcgaaggagacgcagtagagaagatacttaatcaagacaacccacgtgaaactcactccgaacagggcgacgagaaaggtcaggccaagggggatactgtttggggatacctatttccaaattccgagcggtacggtggaaaacgtattgctctcacaaccactcacacaagaactgttgggtcactgggtactggttacatgattggacgaagttctaagagtggtgagtctttggaacgttgaatgggttcatgtctgtttttgttaacggtttgcagcggacctcgtaataaaccaccgttctgtttcaaattggcactgtttattgtacccaaatagccaaggcgtggtcctcgcgaactattccggcagtggcacattcattaatggagtgaagtatggaggaacttcgagaaaaattcttaatgacggcgacaatatcagcattgtggagaatggtgacatatctttcactttccgacgactcgatgagtgagaaccgaagactcttgtgtcaaatcatatagttgtcgaaaaggtcgaagagacagatcctgcactgggccaagaaatgatccgtatacgttatgcagtcaaagttgtcctacagggaaattatatattgggcaataacagcatttcccgtgagtctcgaccagactagtattatgagagccggaaatccattcagcgagtaatag

SEQ ID NO: 14860 - DNA, 444 bp, Muscodor strobelii
  misc_feature: SGI cDNA ID NO. 564907
  misc_feature: Encodes the peptide sequence at SEQ ID NO 14861
atgcgcgtctctacacaattcgcattgctcggatcggctctccttaccacagcctcttgcctaccttccagctcaccgccgccaaatcccactatcaatgagccatggaccgtgtcagagtactcggtaacaggcccagatggacaagaagtagcatcatttcgcgtgacggcgccggacaactacgtaacaggcgtccgaggccttgatgtcctttgcaaaagtgtgccatacggacttgaatgggacacagagtgcgcgtccgatggtacatttcgactagaagctaatgtatcatatcaagagtcgtaccccaaggtcctattcaagctcaatcatgtccagattgacgccagtactgtcacgatcgtgactggggaggacttcgtcttaccggaggagacgttcgagctcgctgtcaatacggtggttgttggtctgtga

SEQ ID NO: 14861 - protein, 147 aa, Muscodor strobelii
  misc_feature: SGI Peptide ID NO. 564907
MRVSTQFALLGSALLTTASCLPSSSPPPNPTINEPWTVSEYSVTGPDGQEVASFRVTAPDNYVTGVRGLDVLCKSVPYGLEWDTECASDGTFRLEANVSYQESYPKVLFKLNHVQIDASTVTIVTGEDFVLPEETFELAVNTVVVGL

SEQ ID NO: 14862 - DNA, 600 bp, Muscodor strobelii
  misc_feature: SGI cDNA ID NO. 564908
  misc_feature: Encodes the peptide sequence at SEQ ID NO 14863
atgatttgtcgcccaatacaggtgcatcccgatactctatctcctgttcaacatcaacttctgaaggatcttctagatgacatgattcctggtcatgacccagacccggaactgataaacccctccgatgtgctaccacgccctaggtttcaatccatacccccgggttataacttcgtgtacttccctttacaaaagctaccttctgctctctgtccagatggcacggatccctatcacatgccacctcttgccgacttcacacgccgtgtatgggcagccggttcaatcgagggcatgtccggtctaagaatggggtttgataaccgctatgcgtgtgttgagaacattgaggatgtgtcgcttcagggcaatcccggttctgagtctattgccgtccaagttttgagacgctatatttcggctaagcatgtaaagcggtatacttcaacgacacgtccagacgaaaaacgtcagcagctcaagccccatatcactgagcgcagaactctagttttcatgcgtgagcccagcgcccaggagaagaaggaaactctagaacagacgcccgcgcacacagtcaacccgatcattctgtga

SEQ ID NO: 14863 - protein, 199 aa, Muscodor strobelii
  misc_feature: SGI Peptide ID NO. 564908
  misc_feature (3)..(176): NCBI GI: 46122429 Blast Desc: FG05592.1 [Gibberella zeae PH-1]
  misc_feature (11)..(176): NCBI GI: 226281395 Blast Desc: conserved [Paracoccidioides brasiliensis Pb01]
  misc_feature (1)..(190): NCBI GI: 67903730 Blast Desc: AN8852.2 [Aspergillus nidulans FGSC A4] gi|40740950|gb|EAA60140.1| AN8852.2 [Aspergillus nidulans FGSC A4]
  misc_feature (1)..(196): NCBI GI: 259482932 Blast Desc: TPA: conserved [Aspergillus nidulans FGSC A4]
  misc_feature (52)..(176): NCBI GI: 39976723 Blast Desc: MGG_06264 [Magnaporthe grisea 70-15] gi|145016340|gb|EDK00830.1| MGG_06264 [Magnaporthe grisea 70-15]
  misc_feature (56)..(176): NCBI GI: 256729666 Blast Desc: NECHADRAFT_62758 [Nectria haematococca mpVI 77-13-4]
  misc_feature (1)..(181): NCBI GI: 70998680 Blast Desc: conserved [Aspergillus fumigatus Af293] gi|66851698|gb|EAL92024.1| conserved [Aspergillus fumigatus Af293] gi|159126204|gb|EDP51320.1| conserved [Aspergillus A1163]
  misc_feature (53)..(176): NCBI GI: 242794735 Blast Desc: conserved [Talaromyces stipitatus ATCC 10500] gi|218719024|gb|EED18444.1| conserved [Talaromyces stipitatus ATCC 10500]
  misc_feature (11)..(176): NCBI GI: 119182717 Blast Desc: CIMG_06374 [Coccidioides immitis RS]
  misc_feature (1)..(181): NCBI GI: 240109375 Blast Desc: CPC735_028800 [Coccidioides posadasii C735 delta SOWgp]
MICRPIQVHPDTLSPVQHQLLKDLLDDMIPGHDPDPELINPSDVLPRPRFQSIPPGYNFVYFPLQKLPSALCPDGTDPYHMPPLADFTRRVWAAGSIEGMSGLRMGFDNRYACVENIEDVSLQGNPGSESIAVQVLRRYISAKHVKRYTSTTRPDEKRQQLKPHITERRTLVFMREPSAQEKKETLEQTPAHTVNPIIL

SEQ ID NO: 14864 - DNA, 2061 bp, Muscodor strobelii
  misc_feature: SGI EST ID NO. CUFF.35434.0
  misc_feature: Variant of the nucleotide sequence at SEQ ID NO 14862
gcaaatttggtgagcaagctttaatcgatacagctcatccttttacaacctcagaccattcgttgtaagtcattaatgctgcaccatcaatacgcgacttcgctcgattggaagaggtttcacttttctcgctttgttatgcttaaagacttttttacgtttagcaggcaatagatctcatacgagagtgatgtacccgtcttgggcatagacctattcccgtgagatgagatcccgtcaagtgccatatcggctcctgaagcggccatcttcatcgttgctccggctcagaggcataccttcaggcttcttatttcacaagccaagatgtagctccacctcctctgtcactcctgatcagcccatcgacatagagtccataaggcgtgcgatgatttgtcgcccaatacaggtgcatcccgatactctatctcctgttcaacatcaacttctgaaggatcttctagatgacatgattcctggtcatgacccagacccggaactgataaacccctccgatgtgctaccacgccctaggtttcaatccatacccccgggttataacttcgtgtacttccctttacaaaagctaccttctgctctctgtccagatggcacggatccctatcacatgccacctcttgccgacttcacacgccgtgtatgggcagccggttcaatcgagggcatgtccggtctaagaatggggtttgataaccgctatgcgtgtgttgagaacattgaggatgtgtcgcttcagggcaatcccggttctgagtctattgccgtccaagttttgagacgctatatttcggctaagcatgtaaagcggtatacttcaacgacacgtccagacgaaaaacgtcagcagctcaagccccatatcactgagcgcagaactctagttttcatgcgtgagcccagcgcccaggagaagaaggaaactctagaacagacgcccgcggtgcgcatccttaagtcacacagtcaacccgatcattctgtgaccataatacccaagaccactcatctcttccagtacagcgcactgagctataatgcacaccgtatccatctagatcaggcacattgcagggaagtagagggctatcgtaatctattggtgcatggacctttctcattaaccctcatgctcgaagtgctacgtcgacacatcaccgccgggctgtcgccagaagaaaaggtagttcgccgtctggatcaggtgggctatcgccatatagcgcctctttacgcggatgagccactccgcgtgtgtttcgcaaagagcgcaaagaaccccgcgaaatataaagtatggattgagaaccagcatggaagcatttgtgtcaaagctacggttgatatcagaacaatggaggcggattggcagaaaagatcggcttttggcgccgaaatctttaacgcactcaagcctactcttcataatccttttgagcctagctcgatatctgattctcaagcctcccaggcaggtatatcttgacctagcagaaacatcttcaagcacaagtcttgcgtggccatgtcccaatacgaccaaataagtgtcgtcaagcatcatatccagtcaagaaactcgatttcaaaggtgtgacgtgcgtggggagtgcaataggtttataactctgaggacaaaggcacagtaggcgagggtctcgaaactccaagtcgagcgtatgagccgggagatggaaccccgatatacttcatccaaagccgcaacaattagcaaatcacagactacagcgtccgtttgcaacatccacgttactgtcgtcataccgaaccagatcgcagcccggcaaaatgtcagacattgtcaaatttcgcgcccggatatacgggctgttgagtcgttaatgaacctcctttatcatgactataagtttcttgcctatcttgccatcagcaatgcaattgatgtgataacaatgcggaaaacgcgcgaagaaatcgggcgcataatcgaatgaccctcgttccaacacacagaacagagaatcctgtacctggtgtcgcttttgattatattgccta

SEQ ID NO: 14865 - DNA, 2664 bp, Muscodor strobelii
  misc_feature: SGI cDNA ID NO. 564909
  misc_feature: Encodes the peptide sequence at SEQ ID NO 14866
atggctcccaaacaagccactttaggcaaattctttgcccagcccaatggctccaaacctgcgccaactcagcagtctaagctctcgtttgcgacgaaagcaaacgctaagactaaacaggagccagaaccgtcctcgagcgcaaagagtccccagtcacccgagtcgaagcccagaacaaatactgagaaagaacctggctctccaacgaaaaagcgatcgagatccgctcaggcttcaaagccaaagagcgaggaatcaccagcgcgagtcaagtcagagccatccgaggaggatgttgaaaatgaagaggaagatgaagcaccagtcacgaagcgaaggaggcggcagcgaaatcagatcgaagatgaggacgatgaggacgttgagatgcctgatgtgaagcaggtgaagcccaaacagaagtctccttccaagccaaaagagactgccaagaagccctcaagtgcaccatcagcagcaaagaagaagactgcagtcaaagtcgaggaagaagaagacgatgtagacgcagctacggcttccgaatctgcgtctgaagcagagaaggaggacgaagatgaggaagacgagaaacccgaggtcgtagccaaagctcgccagaaaatccagacgaaactcaccggcaaggctaaagatccctaccccgattggaaggctggcgaacctgtaccctacgcagctctgtgcacaacattctcgttaatcgaactcacgaccaagcgacttgagattacggcgcattgctctctcttcctccgccaggtgcttcggctcacccctgacgatttcctgtctaccgtcctcttgatgatcaataaactcgctccagattatgctggtattgagttgggtattggtgaatctttgatcatgaaggccataggagaaacgactggacgcagtctccaagtgatcaaagctgatcagaaggagatcggtgacctgggcttagtcgcagtcaaaagtcgatctacccagccgaccatgttcaagcccaagcctctcacggtgaagggtgtgcataagggactgatggacgttgcgacggttactggtcacggagcacaaggaaggaaagtcgatttgatcaaaaagctgctgtctgctgccgacgcccgtgccgctggtaaaattgacatttcaaaggacaagggtggacctagcgaagcgaagtatcttgtccgatttctggaaggaaaactccgccttggcttagcggagaagacggtgctggtctcaatcgctcaagctgtcatcattcatgaagcagacaagaagaacaaggtcccaagcaccacggagatggaacaggcagagtcgctcttaaaatctgtctacagtgagcttccgagttgggatgtgattgttcctgccatgatcaaagatgggattatgaatctgaaagatacctgcaaacttcaacctggagttccattgaaacctatgcttgccaagcctactaaggctatcactgaggtcttggaccgattcgagaaccagaagtttacatgcgagtacaagtacgatggcgagcgagcacagattcattacgtcgctaaggagcgcgctgatgattacatcgaagcacttccaggagctaccaaagaggctgccaaaggcgttgcttccatcttctcgagaaactccgaggatctttccaagaaataccccgatattttggccaagctcaatacttgggtcaaggacggcaccaagagttttgtcttagattgcgagactgtagcctgggatgtcacggagaagaaggtgttgcctttccaacagctgatgacgaggaagaagaaggacgtcaaagtcgaggacgtgaaagtcaaggtttgcgtctttgcttttgatcttctcttcctgaatggggaggccattgtggagaagtctctccgagagcgacgagagctcatgcataatgcgttccaacctgtggagggcgagttcgcttttgccacgcatatgaacggtcaggagctcgaggagatccaaacattcttagacgagagtgtcaaggcgtcttgcgaaggcttgatggtgaagatgttggacgggacggagagtggatatgaacccagtaaacgcagtcgcaattggctgaagatcaaaaaggattatctatccggagtgggagattctctcgacttggtcgtgttaggtgcatactacggcaggggcaaacgtacctcagtatacggagctttcctcctggcatgttacaatgccgcctcagacacctacgagacgatctgcaacatcggcaccggcttctcagaacaagtacttgaagagctgcacaagcaattatcagaaatagtcatcgatcgggcgaagccattctattcccactcttccggcggccagcatcagcccgatgtctggtttgagccgcggtacgtatgggaggtcaagacggcggatttgacgctgagtccgcggtataaggctgggtgcaaggagggcgtagatcattctggggagaagggaattagtctaagattcccgagattcatcaagattcgtgatgataagaagcctgatgaggcgacgagtagtagacaggttgccgagctgtacaggaagcaggagagtgtcacgaagggtccttcggttgatgatgacttcgagtactga

SEQ ID NO: 14866 - protein, 887 aa, Muscodor strobelii
  misc_feature: SGI Peptide ID NO. 564909
  misc_feature (738)..(805): Pfam Id: PF04679 Pfam Desc: ATP dependent DNA ligase C terminal region
  misc_feature (489)..(713): Pfam Id: PF01068 Pfam Desc: ATP dependent DNA ligase domain
  misc_feature (231)..(424): Pfam Id: PF04675 Pfam Desc: DNA ligase N terminus
  misc_feature (552)..(713): Pfam Id: PF01068 Pfam Desc: ATP dependent DNA ligase domain
  misc_feature (489)..(524): Pfam Id: PF01068 Pfam Desc: ATP dependent DNA ligase domain
  misc_feature (1)..(887): NCBI GI: 261360159 Blast Desc: DNA ligase [Verticillium albo-atrum VaMs.102]
  misc_feature (1)..(887): NCBI GI: 156033275 Blast Desc: SS1G_13713 [Sclerotinia sclerotiorum 1980] gi|154699116|gb|EDN98854.1| SS1G_13713 [Sclerotinia sclerotiorum 1980]
  misc_feature (1)..(887): NCBI GI: 46122151 Blast Desc: FG05453.1 [Gibberella zeae PH-1]
  misc_feature (1)..(887): NCBI GI: 256729732 Blast Desc: [Nectria haematococca mpVI 77-13-4]
  misc_feature (1)..(887): NCBI GI: 154294102 Blast Desc: BC1G_14121 [Botryotinia fuckeliana B05.10] gi|150845058|gb|EDN20251.1| BC1G_14121 [Botryotinia fuckeliana B05.10]
  misc_feature (206)..(887): NCBI GI: 171686862 Blast Desc: protein product [Podospora anserina] gi|170943392|emb|CAP69045.1| protein product [Podospora anserina]
  misc_feature (1)..(887): NCBI GI: 85083459 Blast Desc: DNA ligase (Polydeoxyribonucleotide synthase [ATP]) [Neurospora crassa OR74A] gi|28918207|gb|EAA27885.1| DNA ligase (Polydeoxyribonucleotide synthase [ATP]) [Neurospora crassa
  misc_feature (1)..(887): NCBI GI: 116192011 Blast Desc: CHGG_05723 [Chaetomium globosum CBS 148.51] gi|88181636|gb|EAQ89104.1| CHGG_05723 [Chaetomium globosum CBS 148.51]
  misc_feature (1)..(887): NCBI GI: 145608794 Blast Desc: MGG_06370 [Magnaporthe grisea 70-15] gi|145016223|gb|EDK00713.1| MGG_06370 [Magnaporthe grisea 70-15]
  misc_feature (4)..(887): NCBI GI: 240282287 Blast Desc: DNA ligase [Ajellomyces capsulatus H143]
  misc_feature (233)..(872): SWISSPROT Homolog: EC 6.5.1.1 DNA ligase (ATP)
MAPKQATLGKFFAQPNGSKPAPTQQSKLSFATKANAKTKQEPEPSSSAKSPQSPESKPRTNTEKEPGSPTKKRSRSAQASKPKSEESPARVKSEPSEEDVENEEEDEAPVTKRRRRQRNQIEDEDDEDVEMPDVKQVKPKQKSPSKPKETAKKPSSAPSAAKKKTAVKVEEEEDDVDAATASESASEAEKEDEDEEDEKPEVVAKARQKIQTKLTGKAKDPYPDWKAGEPVPYAALCTTFSLIELTTKRLEITAHCSLFLRQVLRLTPDDFLSTVLLMINKLAPDYAGIELGIGESLIMKAIGETTGRSLQVIKADQKEIGDLGLVAVKSRSTQPTMFKPKPLTVKGVHKGLMDVATVTGHGAQGRKVDLIKKLLSAADARAAGKIDISKDKGGPSEAKYLVRFLEGKLRLGLAEKTVLVSIAQAVIIHEADKKNKVPSTTEMEQAESLLKSVYSELPSWDVIVPAMIKDGIMNLKDTCKLQPGVPLKPMLAKPTKAITEVLDRFENQKFTCEYKYDGERAQIHYVAKERADDYIEALPGATKEAAKGVASIFSRNSEDLSKKYPDILAKLNTWVKDGTKSFVLDCETVAWDVTEKKVLPFQQLMTRKKKDVKVEDVKVKVCVFAFDLLFLNGEAIVEKSLRERRELMHNAFQPVEGEFAFATHMNGQELEEIQTFLDESVKASCEGLMVKMLDGTESGYEPSKRSRNWLKIKKDYLSGVGDSLDLVVLGAYYGRGKRTSVYGAFLLACYNAASDTYETICNIGTGFSEQVLEELHKQLSEIVIDRAKPFYSHSSGGQHQPDVWFEPRYVWEVKTADLTLSPRYKAGCKEGVDHSGEKGISLRFPRFIKIRDDKKPDEATSSRQVAELYRKQESVTKGPSVDDDFEY

SEQ ID NO: 14867 - DNA, 3099 bp, Muscodor strobelii
  misc_feature: SGI EST ID NO. CUFF.35440.0
  misc_feature: Variant of the nucleotide sequence at SEQ ID NO 14865
gggaaatcaattaatcaatggaatttacatggcaactgctcgcgtctgggcacgcgtcgcaccagacccgcccgccaacccgtcctgacctcatcgtctgattttcagtcaacttctaccttgcgcatcgccaacacacgatattcgctttttttttttccattgccgcctaaatcagcttcattgggctgtatataagtctggtacatccttccccgaggactgctaattgcccattgtggcgacccatcgcattgtcggccgcatcgcgataacggcctcgacttgccgcctcttcaccatggctcccaaacaagccactttaggcaaattctttgcccagcccaatggctccaaacctgcgccaactcagcagtctaagctctcgtttgcgacgaaagcaaacgctaagactaaacaggagccagaaccgtcctcgagcgcaaagagtccccagtcacccgagtcgaagcccagaacaaatactgagaaagaacctggctctccaacgaaaaagcgatcgagatccgctcaggcttcaaagccaaagagcgaggaatcaccagcgcgagtcaagtcagagccatccgaggaggatgttgaaaatgaagaggaagatgaagcaccagtcacgaagcgaaggaggcggcagcgaaatcagatcgaagatgaggacgatgaggacgttgagatgcctgatgtgaagcaggtgaagcccaaacagaagtctccttccaagccaaaagagactgccaagaagccctcaagtgcaccatcagcagcaaagaagaagactgcagtcaaagtcgaggaagaagaagacgatgtagacgcagctacggcttccgaatctgcgtctgaagcagagaaggaggacgaagatgaggaagacgagaaacccgaggtcgtagccaaagctcgccagaaaatccagacgaaactcaccggcaaggctaaagatccctaccccgattggaaggctggcgaacctgtaccctacgcagctctgtgcacaacattctcgttaatcgaactcacgaccaagcgacttgagattacggcgcattgctctctcttcctccgccaggtgcttcggctcacccctgacgatttcctgtctaccgtcctcttgatgatcaataaactcgctccagattatgctggtattgagttgggtattggtgaatctttgatcatgaaggccataggagaaacgactggacgcagtctccaagtgatcaaagctgatcagaaggagatcggtgacctgggcttagtcgcagtcaaaagtcgatctacccagccgaccatgttcaagcccaagcctctcacggtgaagggtgtgcataagggactgatggacgttgcgacggttactggtcacggagcacaaggaaggaaagtcgatttgatcaaaaagctgctgtctgctgccgacgcccgtgccgctggtaaaattgacatttcaaaggacaagggtggacctagcgaagcgaagtatcttgtccgatttctggaaggaaaactccgccttggcttagcggagaagacggtgctggtctcaatcgctcaagctgtcatcattcatgaagcagacaagaagaacaaggtcccaagcaccacggagatggaacaggcagagtcgctcttaaaatctgtctacagtgagcttccgagttgggatgtgattgttcctgccatgatcaaagatgggattatgaatctgaaagatacctgcaaacttcaacctggagttccattgaaacctatgcttgccaagcctactaaggctatcactgaggtcttggaccgattcgagaaccagaagtttacatgcgagtacaagtacgatggcgagcgagcacagattcattacgtcgctaaggagcgcgctgatgattacatcgaagcacttccaggagctaccaaagaggctgccaaaggcgttgcttccatcttctcgagaaactccgaggatctttccaagaaataccccgatattttggccaagctcaatacttgggtcaaggacggcaccaagagttttgtcttagattgcgagactgtagcctgggatgtcacggagaagaaggtgttgcctttccaacagctgatgacgaggaagaagaaggacgtcaaagtcgaggacgtgaaagtcaaggtttgcgtctttgcttttgatcttctcttcctgaatggggaggccattgtggagaagtctctccgagagcgacgagagctcatgcataatgcgttccaacctgtggagggcgagttcgcttttgccacgcatatgaacggtcaggagctcgaggagatccaaacattcttagacgagagtgtcaaggcgtcttgcgaaggcttgatggtgaagatgttggacgggacggagagtggatatgaacccagtaaacgcagtcgcaattggctgaagatcaaaaaggattatctatccggagtgggagattctctcgacttggtcgtgttaggtgcatactacggcaggggcaaacgtacctcagtatacggagctttcctcctggcatgttacaatgccgcctcagacacctacgagacgatctgcaacatcggcaccggcttctcagaacaagtacttgaagagctgcacaagcaattatcagaaatagtcatcgatcgggcgaagccattctattcccactcttccggcggccagcatcagcccgatgtctggtttgagccgcggtacgtatgggaggtcaagacggcggatttgacgctgagtccgcggtataaggctgggtgcaaggagggcgtagatcattctggggagaagggaattagtctaagattcccgagattcatcaagattcgtgatgataagaagcctgatgaggcgacgagtagtagacaggttgccgagctgtacaggaagcaggagagtgtcacgaagggtccttcggttgatgatgacttcgagtactgaggtgtcggtgtatgaaatgatgagagggcttgagtaaggtatgcattgttgtggcgttttgggagatatgtgagatagctgcgaaatgatgagactctgaagatggatttctatgagtgtttgatgcattgtag

SEQ ID NO: 14868 - DNA, 1446 bp, Muscodor strobelii
  misc_feature: SGI cDNA ID NO. 564910
  misc_feature: Encodes the peptide sequence at SEQ ID NO 14869
atgtcgggaaatgagtctctagaagcggcgctgaagcgagcatctgaaaagaccctgggaactctagagaagcttcctgcggagttgaaagtcgcggtaatcttggcattttccgatacctactccgttcgcaacctagccctggctgggcccatactctataaattcattaaggataacgagccggagctcgctgcgaagatggtatttgccaatattccggccgatctgcttcaacttgcccagctcatatctcgactgcgatctgctgtgcgggaaccactgggagaccccgagaccccaagctttgacgcaatgaccactgcttggacattgaccaacgaggtgctaggagtagggggcacgatcgacaactggaagaatgacagatggacaagctacagattcattgaaacctttcatattgcagagcagtatctacactttcacggagttatctattactactctaagcaactcagccgtattgccctcgaccgggctcctcctcctgttcgagacgattggcagctcaaggacacgcttatcacagactcagaatttcacagattcgcaaaggctctctatctgttcgagactcagctgtgcggttgctgggctcgcatgccagaggcgtttgacccgcaaagtcgttatttggatgcccgacttggtttttggcgccacttccctccgtgggaggaacgacatgtctatatcgtgaagaggctcctcgtttcacatatcgaggatgttttgaaggatgactctgagaacggcccaaagctatgtgaggtggtaccatggaagttagacggcattgcaatacggcatcttattggcaaaaattctttgcagggtctatttctactagagatggtgcaggggacatatctcgatctaggtaaccgcgctccggatgtccacttagcgatggccagacttgaggatcctgtcgaaaactgccacctcagatgtctagatcggattaatgacgtccgctctcttgatggtcagtatgtctttgaacgattctccaacaaggacccatcagcagctacagcatggtatcatacacttctagttccacacatatcggacaaaattcttccgctccgctttaactgcttgccatgcatggatgcatgggcctggtgtctatgggacaggaagcgattagacaaatgggagggtgagcaactgcccaacctcgagcaactactcgctgcagccgatggaaaaacggcgacattctcccggctccgggtagagtcacactggcgactggaccagccgtgcttttgcggggggtgcaagtgcccgagatgcaaacgattccgatcggacttgtctttgtacagcgaagatgagagtgaggaggtctctagcgaagatgagaagcagagtactgaggcacagtatggcagcggtgaagaagaagagtag

SEQ ID NO: 14869 - protein, 481 aa, Muscodor strobelii
  misc_feature: SGI Peptide ID NO. 564910
MSGNESLEAALKRASEKTLGTLEKLPAELKVAVILAFSDTYSVRNLALAGPILYKFIKDNEPELAAKMVFANIPADLLQLAQLISRLRSAVREPLGDPETPSFDAMTTAWTLTNEVLGVGGTIDNWKNDRWTSYRFIETFHIAEQYLHFHGVIYYYSKQLSRIALDRAPPPVRDDWQLKDTLITDSEFHRFAKALYLFETQLCGCWARMPEAFDPQSRYLDARLGFWRHFPPWEERHVYIVKRLLVSHIEDVLKDDSENGPKLCEVVPWKLDGIAIRHLIGKNSLQGLFLLEMVQGTYLDLGNRAPDVHLAMARLEDPVENCHLRCLDRINDVRSLDGQYVFERFSNKDPSAATAWYHTLLVPHISDKILPLRFNCLPCMDAWAWCLWDRKRLDKWEGEQLPNLEQLLAAADGKTATFSRLRVESHWRLDQPCFCGGCKCPRCKRFRSDLSLYSEDESEEVSSEDEKQSTEAQYGSGEEEE

SEQ ID NO: 14870 - DNA, 1659 bp, Muscodor strobelii
  misc_feature: SGI cDNA ID NO. 564911
  misc_feature: Encodes the peptide sequence at SEQ ID NO 14871
atgcagatatcccgacaagcacgatgccaaagacattcggaaaccgctcagaaaacaccacagcaccaatgggaattaacagcgagccagattgagtttcgtgatgggcacggatggaccgacatcctcgagtatatttgcaagcaaatcgccgcggaccttgcattcgattttccgatacaggcggagctatccaagcttgtcattgatgagaaagatgctgtgctacttgagaatgtagacaccgaaagaataactgacgtggttggcaccttgataatcaccctcccctcgccacatatgggtggcgatgtgagggtccagtacggcggatcggtcatgacattgaagacatctggcttcgagcagtcttacatgtgctggcgtactggtgtcatacacgaatcggttcctatagaatcgggatttcgagtttctcttcacttcaaccttaaagaggacatttcgaagagggttaataagcttcgaggtcttcctggtgcgctccggcttcgcggcgctcttacgacttggctgagctctgattctagaagcatggatcacgcatactacaccctagatcatatggacacagaggcaggactttcagctaatgcacttggaaaacgagactctgagttagtgacatgtttgagagacctttcaacttctctttcattcgagatatttctagctgtcctggaattgaaaatgagcggatcctgccaggactacttcgaggaccacgagcgcgaggaaagagacgagagtgatgggggcgtcgactaccattctcttgacagaatcgatgacatgagatgtagtgtgaaatcgcttgttgaactgaacgggcggcaggtactacgtgattttccgctgcagcaagaaagcatgctgcagcccgatagcctcaaggatttcaagcctgaggaagactatgaaggcgataatgatgagaatccggagccttggagttcaggcccgagggcgacgcactggtatcgatgtgttgctgtgcttatcgtcccgagagattcgctgctagctttcttcgataatgtcaaaagtcagtctggtggccttcatgctcacaaccgagaatcactcgtcagctactttgccgacgccagtcttcgaggtcaaccaggtagcttcgacattatgaaacaattatgtgaagaaatgtggtatccatccgaaaacgtctcatatgcctcattccctcgaagatcaacaaagtttaaagcggacgtacatagtagagcactacaggcagcagtcgttcaccaacgttgggagttcttctttgatcttgcatgccgagctgacgggtcaattgctcttgacttctttactttcttgggatcgtggactcatagtgtagggcgagatgttctctctcagttgctcccaaggtgcacaactgtcatactctctttccacagctactcccagatatttgatgcagtccaagccgcagggccactccaaagttttaacgccaagatccaatccaatgattatatccaaaaatggctacgaaacattgttattcaaagcattagtagaattcaaggccaaggcttgggtcgtgatgacggtgccgcgttcgctgcaacggcacagtatctcgacccaaatagactcacagcggagtaa

SEQ ID NO: 14871 - protein, 552 aa, Muscodor strobelii
  misc_feature: SGI Peptide ID NO. 564911
  misc_feature (1)..(458): NCBI GI: 255935387 Blast Desc: Pc13g02810 [Penicillium chrysogenum Wisconsin 54-1255] gi|211583340|emb|CAP91350.1| Pc13g02810 [Penicillium chrysogenum Wisconsin 54-1255]
  misc_feature (4)..(545): NCBI GI: 256730925 Blast Desc: NECHADRAFT_84641 [Nectria haematococca mpVI 77-13-4]
  misc_feature (4)..(346): NCBI GI: 85091137 Blast Desc: NCU09412 [Neurospora crassa OR74A] gi|28920138|gb|EAA29519.1| [Neurospora crassa OR74A]
  misc_feature (81)..(310): NCBI GI: 115385036 Blast Desc: [Aspergillus terreus NIH2624] gi|114196757|gb|EAU38457.1| [Aspergillus terreus NIH2624]
  misc_feature (21)..(351): NCBI GI: 169866328 Blast Desc: CC1G_09656 [Coprinopsis cinerea okayama7#130] gi|116499159|gb|EAU82054.1| CC1G_09656 [Coprinopsis cinerea okayama7#130]
  misc_feature (24)..(335): NCBI GI: 238837471 Blast Desc: conserved [Microsporum canis CBS 113480]
  misc_feature (60)..(344): NCBI GI: 212540430 Blast Desc: conserved [Penicillium marneffei ATCC 18224] gi|210067669|gb|EEA21761.1| conserved [Penicillium marneffei ATCC 18224]
  misc_feature (18)..(244): NCBI GI: 242218954 Blast Desc: [Postia placenta Mad-698-R] gi|220725540|gb|EED79522.1| [Postia placenta Mad-698-R]
  misc_feature (1)..(335): NCBI GI: 242801803 Blast Desc: conserved [Talaromyces stipitatus ATCC 10500] gi|218717189|gb|EED16610.1| conserved [Talaromyces stipitatus ATCC 10500]
  misc_feature (24)..(345): NCBI GI: 238487718 Blast Desc: conserved [Aspergillus flavus NRRL3357] gi|220699976|gb|EED56315.1| conserved [Aspergillus flavus NRRL3357]
MQISRQARCQRHSETAQKTPQHQWELTASQIEFRDGHGWTDILEYICKQIAADLAFDFPIQAELSKLVIDEKDAVLLENVDTERITDVVGTLIITLPSPHMGGDVRVQYGGSVMTLKTSGFEQSYMCWRTGVIHESVPIESGFRVSLHFNLKEDISKRVNKLRGLPGALRLRGALTTWLSSDSRSMDHAYYTLDHMDTEAGLSANALGKRDSELVTCLRDLSTSLSFEIFLAVLELKMSGSCQDYFEDHEREERDESDGGVDYHSLDRIDDMRCSVKSLVELNGRQVLRDFPLQQESMLQPDSLKDFKPEEDYEGDNDENPEPWSSGPRATHWYRCVAVLIVPRDSLLAFFDNVKSQSGGLHAHNRESLVSYFADASLRGQPGSFDIMKQLCEEMWYPSENVSYASFPRRSTKFKADVHSRALQAAVVHQRWEFFFDLACRADGSIALDFFTFLGSWTHSVGRDVLSQLLPRCTTVILSFHSYSQIFDAVQAAGPLQSFNAKIQSNDYIQKWLRNIVIQSISRIQGQGLGRDDGAAFAATAQYLDPNRLTAE

SEQ ID NO: 14872 - DNA, 1132 bp, Muscodor strobelii
  misc_feature: SGI EST ID NO. CUFF.35482.0
  misc_feature: Variant of the nucleotide sequence at SEQ ID NO 14870
cttttcacaaattaatttatgtgtgcacgaagacttgagctccagcaaaacctgcggggcgccctggacaacattcaatctcatgggacattcgcttcatctggtgaattgcctcgtgtgcatcctgggttattcgttcaaaatgttggccatatcgcgatacctccgtacttatcgcaagtgcagaagctcatgcagatatcccgacaagcacgatgccaaagacattcggaaaccgctcagaaaacaccacagcaccaatgggaattaacagcgagccagattgagtttcgtgatgggcacggatggaccgacatcctcgagtatatttgcaagcaaatcgccgcggaccttgcattcgattttccgatacaggcggagctatccaagcttgtcattgatgagaaagatgctgtgctacttgagaatgtagacaccgaaagaataactgacgtggttggcaccttgataatcaccctcccctcgccacatatgggtggcgatgtgagggtccagtacggcggatcggtcatgacattgaagacatctggcttcgagcagtcttacatgtgctggcgtactggtgtcatacacgaatcggttcctatagaatcgggatttcgagtttctcttcacttcaaccttaaagaggacatttcgaagagggttaataagcttcgaggtcttcctggtgcgctccggcttcgcggcgctcttacgacttggctgagctctgattctagaagcatggatcacgcatactacaccctagatcatatggacacagaggcaggactttcagctaatgcacttggaaaacgagactctgagttagtgacatgtttgagagacctttcaacttctctttcattcgagatatttctagctgtcctggaattgaaaatgagcggatcctgccaggactacttcgaggaccacgagcgcgaggaaagagacgagagtgatgggggcgtcgactaccattctcttgacagaatcgatgacatgagatgtagtgtgaaatcgcttgttgaactgaacgggcggcaggtactacgtgattttccgctgcagcaagaaagcatgctgcagcccgatagcctcaaggatttcaagcctgaggaagactatg

SEQ ID NO: 14873 - DNA, 606 bp, Muscodor strobelii
  misc_feature: SGI cDNA ID NO. 564912
  misc_feature: Elevated expression when VOC is produced
  misc_feature: Encodes the peptide sequence at SEQ ID NO 14874
atgacgacaaccgagtcaaatgcagtatcccaaactactaacattgatgaggttcggcctgcaagccctctcccgtcgacgctggacgtgaaagggaacgatgatgcggagagagtaaacgacagattaccgtcagccccagctccggcgaccacggcagcagtgcaaaatgcagtgcccgagccgagcacctcggcccctcctatggtaaagccgctcaagttgttacggcagagtccggcgtggatcgactgtggacactgctcgcaaatgacacagacgaaagtcacactacacgagaagaatgaagaccccaacggaatcatcgtatgtctcacttgcttggtttgctgtcctctactgccctttgtgttattctgcacaggcaaggaggagtattacacgcataagtgcaatagatgcaatgccacagtcgctgtttatgggccaaacggcatcgatgtgaaggagccgagacagcagcagatggttccgtccaaatttgcggcagctcccgctaccgacaatgcaccgccgcctgcttacgaacctgggccgaatggtgggattgcaggtgatgctgctttgagtaatcaggcgcattga

SEQ ID NO: 14874 - protein, 201 aa, Muscodor strobelii
  misc_feature: SGI Peptide ID NO. 564912
  misc_feature: Useful for introducing or modulating the production of volatile compounds
MTTTESNAVSQTTNIDEVRPASPLPSTLDVKGNDDAERVNDRLPSAPAPATTAAVQNAVPEPSTSAPPMVKPLKLLRQSPAWIDCGHCSQMTQTKVTLHEKNEDPNGIIVCLTCLVCCPLLPFVLFCTGKEEYYTHKCNRCNATVAVYGPNGIDVKEPRQQQMVPSKFAAAPATDNAPPPAYEPGPNGGIAGDAALSNQAH

SEQ ID NO: 14875 - DNA, 1152 bp, Muscodor strobelii
  misc_feature: SGI EST ID NO. CUFF.35500.0
  misc_feature: Variant of the nucleotide sequence at SEQ ID NO 14873
ggcgattgctccaacgcgcagcataaggcctaatccagcatgaggtcctacctcaggtcttaatcaaggtcatacttagttgcaccagttgatcatattcctcgttcattgaaccatcaaagcctaaaagaatggagaatcctaggatacctacgccgcaattaatagcacagcctcactcctcatattacctcccaagacgagttgtttataagaataaggcatatccttgtttcacaatgatatattgaatggaggtatgaaaagagtgatagagtcgacaaacccaatccgatccagcatatgagctgtatctagcgctatgacgacaaccgagtcaaatgcagtatcccaaactactaacattgatgaggttcggcctgcaagccctctcccgtcgacgctggacgtgaaagggaacgatgatgcggagagagtaaacgacagattaccgtcagccccagctccggcgaccacggcagcagtgcaaaatgcagtgcccgagccgagcacctcggcccctcctatggtaaagccgctcaagttgttacggcagagtccggcgtggatcgactgtggacactgctcgcaaatgacacagacgaaagtcacactacacgagaagaatgaagaccccaacggaatcatcgtatgtctcacttgcttggtttgctgtcctctactgccctttgtgttattctgcacaggcaaggaggagtattacacgcataagtgcaatagatgcaatgccacagtcgctgtttatgggccaaacggcatcgatgtgaaggagccgagacagcagcagatggttccgtccaaatttgcggcagctcccgctaccgacaatgcaccgccgcctgcttacgaacctgggccgaatggtgggattgcaggtgatgctgctttgagtaatcaggcgcattgagcggcttgatacgttaagtagtttagagccaactttaaggcgtgctggcgtcgctgtagttccaattttcatttttattatgactctaatactccttggcgggacgagattgggtgaggaacgcggctaggtactatttgccgggcattcaagaaatctagctacttattgcgaactagcaattagattttattgacatataaaatcctgccactttctcggtg

SEQ ID NO: 14876 - DNA, 2364 bp, Muscodor strobelii
  misc_feature: SGI cDNA ID NO. 564913
  misc_feature: Elevated expression when VOC is produced
  misc_feature: Encodes the peptide sequence at SEQ ID NO 14877
atggtcggcaccaatcagccccctcggggtttatttgataccactcagcacatctgcggctgctggtacgcttcacagggaccttatgtggttcagcgatcatacctccctcttcacagcatccgaacccacaccacaattcacgatgtcatatcgcgaacaactcttacccaaatttttcggaatgataccgataaggttctcgagaacatcgcctactcgttccccctttatgatggtgtttcgatcgtctcctttgatgccgtcattggtaatgtcaagatccatggcatagtgaaggagaaacaacaagcccgtcgggattacaaggaggccgtcgatagaggttcatcggctgctctgttggaacaacttcccgagtcgtcagatatcttcactaccagtgttggaaacgttccagcaggtgagagtattactgttgaacttgtctacgtcggcgagttgaagtacgacgctgagactagtggtactcgttttaccatacccgcatcgattgctcctcgatatggaaacacaccacatgacattgctggcactgcaaacttatcaaatgcccgcgatgccatcgacatcactgtcgatattcaaggccccgaaggatgtcaagttcaatccatccaatcgcccagtcatcacatcaacgtaagtatcggccgaacaacaaccatgtcggcagacatgtttgtatctcattgcgcatccgccacgctatcgctcaacgaaactacccttgataaagacttcatcattattgcgaacgtcaaggacgcagacaaaccgaaggcatttcttgaggcacatcctacgtaccctcaccagcgtgccctgatgacaacattagttccaaaatttaatcttcctccgatatacggagagattgtcttcatcgtcgatcgctctggaagcatgggtggtaaaatggacatggtcatcaaagctatgacgattctgctcaaatctcttccggttggcgtcaaattcaacatttgctcattcggtagtcggcactctttcttgtggccaaaaagccaatcatacatcgattcgagtctcgacgaagcactacgccatgttgatacttttgctgcagacttcggaggcacagaaatgtacgctccggttcaatctgccattactcagaattatgccgacttgactcttgacactatcatcctgaccgacggagaaatttggaatcaagacaatctgtttaatttgatccgaacgaccgtttcggagaagaacagtagatttttctctcttggaattggctcgggagcgtccacggccttggttgaaggtattgcggctgttggaaatggcattagccagttcgtcacgacagatgagaagatgaacaagaaaatggtccgcctcctgaaggctgcactgacacctcgaataaaggacgtccaattcgagatgagatacaaagaggacgattttgagctggtcgattcttcggatactatttccaccgcccctactctatcaccaggaacgcaggcagaagagattgttcccaaagcaacaatgtctttctacaacgagggcgtagcatcagactttgaggatacccgtcattccaactctgagagaatgaatgctagatttgcacatcttccagtagtgccaccaccatccgtcttgcaggccccgtttcaactgtcttcgatatacccgttctcgcggacgacagtctatctgctgctagaccccgaaacatgcgccaaagaacccaaagcagttgttttgcgcgcttcttctgagcaaggtcctattgagctagagatcaaagtagaagacctcggagttggtgagaccattcatcaacttgctgcgaagaaagctattcatgagctcgaaaaaggtctgggatggctagtcgatgctaaagatctcgctgataacgtattgctcaaaactaagcatgaaggtcgatgggacgatattatcgagcgcgaagcgtctctcatgtcgcgctctgtaccaaatgattctctcggttcaaagacagatcaacttcccacgcctgtcaccgatgtaggagatggaacggagattgcgtcggcctccgcgtcctcagtttcacgtcctacaaacaacgaagataaaatggacgccttgattcgtcttcagaattcagatgggtcttggaattggtccgaggctttcgagacgatattgggtccattcgacaatctatctatggatcagaagaatgacaaatttgcgacaaatctggctatcacattttttaagaaagagatggctgatgaggaggggacgtgggaactcattgttgagaaggcaaatctttggctagctcaacacgataattga

SEQ ID NO: 14877 - protein, 787 aa, Muscodor strobelii
  misc_feature: SGI Peptide ID NO. 564913
  misc_feature (34)..(154): Pfam Id: PF08487 Pfam Desc: Vault protein inter-alpha-trypsin
  misc_feature (299)..(463): Pfam Id: PF00092 Pfam Desc: von Willebrand factor type A domain
  misc_feature (299)..(342): Pfam Id: PF00092 Pfam Desc: von Willebrand factor type A domain
  misc_feature (11)..(663): NCBI GI: 116192639 Blast Desc: CHGG_06037 [Chaetomium globosum CBS 148.51] gi|88181950|gb|EAQ89418.1| CHGG_06037 [Chaetomium globosum CBS 148.51]
  misc_feature (19)..(663): NCBI GI: 226294679 Blast Desc: conserved [Paracoccidioides brasiliensis Pb18]
  misc_feature (17)..(663): NCBI GI: 85117086 Blast Desc: NCU00984 [Neurospora crassa OR74A] gi|28926981|gb|EAA35941.1| [Neurospora crassa OR74A] gi|38567055|emb|CAE76353.1| [Neurospora crassa]
  misc_feature (19)..(663): NCBI GI: 256721913 Blast Desc: NECHADRAFT_36894 [Nectria haematococca mpVI 77-13-4]
  misc_feature (19)..(663): NCBI GI: 225685336 Blast Desc: conserved [Paracoccidioides brasiliensis Pb03]
  misc_feature (16)..(663): NCBI GI: 225558699 Blast Desc: von Willebrand domain-containing protein [Ajellomyces capsulatus G186AR]
  misc_feature (17)..(663): NCBI GI: 171684709 Blast Desc: protein product [Podospora anserina] gi|170942315|emb|CAP67967.1| protein product [Podospora anserina]
  misc_feature (8)..(663): NCBI GI: 169604987 Blast Desc: SNOG_05509 [Phaeosphaeria nodorum SN15] gi|160706682|gb|EAT86573.2| SNOG_05509 [Phaeosphaeria nodorum SN15]
  misc_feature (19)..(663): NCBI GI: 239613922 Blast Desc: von Willebrand domain-containing protein [Ajellomyces dermatitidis ER-3]
  misc_feature (19)..(663): NCBI GI: 261193487 Blast Desc: von Willebrand domain-containing protein [Ajellomyces dermatitidis SLH14081] gi|239588754|gb|EEQ71397.1| von Willebrand domain-containing protein [Ajellomyces dermatitidis SLH14081]
  misc_feature (36)..(466): SWISSPROT Homolog: EC 2.4.2.30 NAD(+) ADP-ribosyltransferase
  misc_feature: Useful for introducing or modulating the production of volatile compounds
MVGTNQPPRGLFDTTQHICGCWYASQGPYVVQRSYLPLHSIRTHTTIHDVISRTTLTQIFRNDTDKVLENIAYSFPLYDGVSIVSFDAVIGNVKIHGIVKEKQQARRDYKEAVDRGSSAALLEQLPESSDIFTTSVGNVPAGESITVELVYVGELKYDAETSGTRFTIPASIAPRYGNTPHDIAGTANLSNARDAIDITVDIQGPEGCQVQSIQSPSHHINVSIGRTTTMSADMFVSHCASATLSLNETTLDKDFIIIANVKDADKPKAFLEAHPTYPHQRALMTTLVPKFNLPPIYGEIVFIVDRSGSMGGKMDMVIKAMTILLKSLPVGVKFNICSFGSRHSFLWPKSQSYIDSSLDEALRHVDTFAADFGGTEMYAPVQSAITQNYADLTLDTIILTDGEIWNQDNLFNLIRTTVSEKNSRFFSLGIGSGASTALVEGIAAVGNGISQFVTTDEKMNKKMVRLLKAALTPRIKDVQFEMRYKEDDFELVDSSDTISTAPTLSPGTQAEEIVPKATMSFYNEGVASDFEDTRHSNSERMNARFAHLPVVPPPSVLQAPFQLSSIYPFSRTTVYLLLDPETCAKEPKAVVLRASSEQGPIELEIKVEDLGVGETIHQLAAKKAIHELEKGLGWLVDAKDLADNVLLKTKHEGRWDDIIEREASLMSRSVPNDSLGSKTDQLPTPVTDVGDGTEIASASASSVSRPTNNEDKMDALIRLQNSDGSWNWSEAFETILGPFDNLSMDQKNDKFATNLAITFFKKEMADEEGTWELIVEKANLWLAQHDN

SEQ ID NO: 14878 - DNA, 3217 bp, Muscodor strobelii
  misc_feature: SGI EST ID NO. CUFF.35515.0
  misc_feature: Variant of the nucleotide sequence at SEQ ID NO 14876
tgccaatcaactcaacaccgaatcttgttgccaatgatatctgactagttattgtccaatagcattatggtcggcaccaatcagccccctcggggtttatttgataccactcagcacatctgcggctgctggtacgcttcacagggaccttatgtggttcagcgatcatacctccctcttcacagcatccgaacccacaccacaattcacgatgtcatatcgcgaacaactcttacccaaatttttcggaatgataccgataaggttctcgagaacatcgcctactcgttccccctttatgatggtgtttcgatcgtctcctttgatgccgtcattggtaatgtcaagatccatggcatagtgaaggagaaacaacaagcccgtcgggattacaaggaggccgtcgatagaggttcatcggctgctctgttggaacaacttcccgagtcgtcagatatcttcactaccagtgttggaaacgttccagcaggtgagagtattactgttgaacttgtctacgtcggcgagttgaagtacgacgctgagactagtggtactcgttttaccatacccgcatcgattgctcctcgatatggaaacacaccacatgacattgctggcactgcaaacttatcaaatgcccgcgatgccatcgacatcactgtcgatattcaaggccccgaaggatgtcaagttcaatccatccaatcgcccagtcatcacatcaacgtaagtatcggccgaacaacaaccatgtcggcagacatgtttgtatctcattgcgcatccgccacgctatcgctcaacgaaactacccttgataaagacttcatcattattgcgaacgtcaaggacgcagacaaaccgaaggcatttcttgaggcacatcctacgtaccctcaccagcgtgccctgatgacaacattagttccaaaatttaatcttcctccgatatacggagagattgtcttcatcgtcgatcgctctggaagcatgggtggtaaaatggacatggtcatcaaagctatgacgattctgctcaaatctcttccggttggcgtcaaattcaacatttgctcattcggtagtcggcactctttcttgtggccaaaaagccaatcatacatcgattcgagtctcgacgaagcactacgccatgttgatacttttgctgcagacttcggaggcacagaaatgtacgctccggttcaatctgccattactcagaattatgccgacttgactcttgacactatcatcctgaccgacggagaaatttggaatcaagacaatctgtttaatttgatccgaacgaccgtttcggagaagaacagtagatttttctctcttggaattggctcgggagcgtccacggccttggttgaaggtattgcggctgttggaaatggcattagccagttcgtcacgacagatgagaagatgaacaagaaaatggtccgcctcctgaaggctgcactgacacctcgaataaaggacgtccaattcgagatgagatacaaagaggacgattttgagctggtcgattcttcggatactatttccaccgcccctactctatcaccaggaacgcaggcagaagagattgttcccaaagcaacaatgtctttctacaacgagggcgtagcatcagactttgaggatacccgtcattccaactctgagagaatgaatgctagatttgcacatcttccagtagtgccaccaccatccgtcttgcaggccccgtttcaactgtcttcgatatacccgttctcgcggacgacagtctatctgctgctagaccccgaaacatgcgccaaagaacccaaagcagttgttttgcgcgcttcttctgagcaaggtcctattgagctagagatcaaagtagaagacctcggagttggtgagaccattcatcaacttgctgcgaagaaagctattcatgagctcgaaaaaggtctgggatggctagtcgatgctaaagatctcgctgataacgtattgctcaaaactaagcatgaaggtcgatgggacgatattatcgagcgcgaagcggtacgtcttggggtgagataccagataccagggaaatggtgctcttttgttgcggtcgacgttcaaaccaacaaagagcatgagccgcttaaattcaacgaacaacattcctctatggtgcatcatgtacctcaaatacaggctcagatgcaccctcaaatgatgcttgccagcccacagtacagaataatgcctgcggcaccagcgtcgtacggcgttttttgttcgatggcttctcccgtgtctcctggccggcggaagcttagtcgaccaccagaagtcataccacaaagcggagaacctagcggttcttatcgagatacaaatgcgatcggttatggcagccttgcaagctattcccagggacaaccctcggacctcctccatcttccggcgggaaaaagaaccagcgaatacggcaactcaccctgtcaacgtagcgcaagaccagtaagatccagcgtacatcatataaagtctctcatgtcgcgctctgtaccaaatgattctctcggttcaaagacagatcaacttcccacgcctgtcaccgatgtaggagatggaacggagattgcgtcggcctccgcgtcctcagtttcacgtcctacaaacaacgaagataaaatggacgccttgattcgtcttcagaattcagatgggtcttggaattggtccgaggctttcgagacgatattgggtccattcgacaatctatctatggatcagaagaatgacaaatttgcgacaaatctggctatcacattttttaagaaagagatggctgatgaggaggggacgtgggaactcattgttgagaaggcaaatctttggctagctcaacacgataattgatttaacattagggaagggcccaattgtaaccagatcggctcttttctaggcatttgagagcgggctgaagtatcaaagtgcgccgtggaaagtgaacaaattgatcccgatgaggaaatctttagtttgagagtcagtgattgcgttttaacgaggcgataataatacaagattctgtgatctatacaaacctgttcgtctcaactgcgacagtggaaacggtgtttagtcataggtcgcctaattgacgcctgatcgcctgacagaatcatgccaagcaaaagcaacctgcaactcatgcctgcacgca

SEQ ID NO: 14879 - DNA, 585 bp, Muscodor strobelii
  misc_feature: SGI cDNA ID NO. 564914
  misc_feature: Elevated expression when VOC is produced
  misc_feature: Encodes the peptide sequence at SEQ ID NO 14880
atgcccctgtcagaacatcaagaagcgcttacggcctcgctcgctaaagcgaacttggtgccaggcgcagcggcgagcctcatatcattggcttgccgcccgacaacaatcctctccgtgaaattcggagagaaagccgttgagctaggcacgttcttccgcgccggggagtgcaaagagccgcctacgattgcatttactgccgaggttgatgcaccccacaatggatcgtatagtcttattttgacggatcctgatgcaccaacgcctgacgagcccaaatttgcgttctggagacactgggtagtatccggattgcgttctagcgggagcgacgaagcggttgaattgacaaagtatttgggccctggacctaaggatgactctaagccacaccgatacttgttcctactttatcgtgagccggagggcttcgccttgtcaaaggaagacgtcggtggcgaggagtttgttcaacgccgatcattcaatcccactgattatgccatgcgccatcgcttgcaacttgtcggcgtcaattggatgtattgtgctggagatgggtggcaagaagaggcttcataa

SEQ ID NO: 14880 - protein, 194 aa, Muscodor strobelii
  misc_feature: SGI Peptide ID NO. 564914
  misc_feature (30)..(186): Pfam Id: PF01161 Pfam Desc: Phosphatidylethanolamine-binding protein
  misc_feature (30)..(140): Pfam Id: PF01161 Pfam Desc: Phosphatidylethanolamine-binding protein
  misc_feature (20)..(192): NCBI GI: 261354844 Blast Desc: conserved [Verticillium albo-atrum VaMs.102]
  misc_feature (1)..(191): NCBI GI: 256722926 Blast Desc: NECHADRAFT_72804 [Nectria haematococca mpVI 77-13-4]
  misc_feature (1)..(193): NCBI GI: 67902834 Blast Desc: AN8404.2 [Aspergillus nidulans FGSC A4] gi|40747870|gb|EAA67026.1| AN8404.2 [Aspergillus nidulans FGSC A4] gi|259484338|tpe|CBF80471.1| TPA: protease inhibitor (Tfs1),
  misc_feature (8)..(191): NCBI GI: 46114266 Blast Desc: FG02975.1 [Gibberella zeae PH-1]
  misc_feature (8)..(191): NCBI GI: 115396414 Blast Desc: conserved [Aspergillus terreus NIH2624] gi|114193415|gb|EAU35115.1| conserved [Aspergillus terreus NIH2624]
  misc_feature (1)..(191): NCBI GI: 119474289 Blast Desc: phosphatidylethanolamine-binding protein [Neosartorya fischeri NRRL 181] gi|119407173|gb|EAW17123.1| phosphatidylethanolamine-binding protein [Neosartorya fischeri
  misc_feature (1)..(189): NCBI GI: 39952547 Blast Desc: MGG_01843 [Magnaporthe grisea 70-15] gi|145020291|gb|EDK04420.1| MGG_01843 [Magnaporthe grisea 70-15]
  misc_feature (1)..(191): NCBI GI: 70986256 Blast Desc: phosphatidylethanolamine-binding protein [Aspergillus fumigatus Af293] gi|66846251|gb|EAL86584.1| phosphatidylethanolamine-binding protein, [Aspergillus fumigatus
  misc_feature (10)..(192): NCBI GI: 169618369 Blast Desc: SNOG_12375 [Phaeosphaeria nodorum SN15] gi|111059068|gb|EAT80188.1| SNOG_12375 [Phaeosphaeria nodorum SN15]
  misc_feature (3)..(191): NCBI GI: 238505046 Blast Desc: phosphatidylethanolamine-binding protein, [Aspergillus flavus NRRL3357] gi|220689866|gb|EED46216.1| phosphatidylethanolamine-binding protein, [Aspergillus flavus
  misc_feature: Useful for introducing or modulating the production of volatile compounds
MPLSEHQEALTASLAKANLVPGAAASLISLACRPTTILSVKFGEKAVELGTFFRAGECKEPPTIAFTAEVDAPHNGSYSLILTDPDAPTPDEPKFAFWRHWVVSGLRSSGSDEAVELTKYLGPGPKDDSKPHRYLFLLYREPEGFALSKEDVGGEEFVQRRSFNPTDYAMRHRLQLVGVNWMYCAGDGWQEEAS

SEQ ID NO: 14881 - DNA, 3903 bp, Muscodor strobelii
  misc_feature: SGI EST ID NO. CUFF.35702.1
  misc_feature: Variant of the nucleotide sequence at SEQ ID NO 14879
cagaacatcaagaagcgcttacggcctcgctcgctaaagcgaacttggtgccaggcgcagcggcgagcctcatatcattggcttgccgcccgacaacaatcctctccgtgaaattcggagagaaagccgttgagctaggcacgttcttccgcgccggggagtgcaaagagccgcctacgattgcatttactgccgaggttgatgcaccccacaatggatcgtatagtcttattttgacggatcctgatgcaccaacgcctgacgagcccaaatttgcgttctggagacactgggtagtatccggattgcgttctagcgggagcgacgaagcggttgaattgacaaagtatttgggccctggacctaaggatgactctaagccacaccgatacttgttcctactttatcgtgagccggagggcttcgccttgtcaaaggaagacgtcggtggcgaggagtttgttcaacgccgatcattcaatcccactgattatgccatgcgccatcgcttgcaacttgtcggcgtcaattggatgtattgtgctggagatgggtggcaagaagaggcttcataatcgggacctctaacacgtggacaaaattcgaaaagcatttgggaatcagggatacacatagcatataccgagaatcagcgtcaacatcaacttgtacagaaccatcgtggcatatgctgagcaacgggctgccttgatcatgctgtctgtgataagttgcatcatacacacaatcccattgttcgtgtcttcattgttcagatatgaatcgctttcgcatgtaagagcaatgagacactggttgaaagagcgactttcaaagactggtcatgaaaagctcctgtttgcagtattgtatttgaacagcagccacaagtgcggccgcatcataccatgctggcttccaaaaataagtcaatttctacaaaaggataatgtcagtgctccggtctagcaacttccttgccgacatcgagcaatacctggattcccaagaggcggagtgcaacgtactagacgtcacatgtcagatatgccagtgcaaaaaactcgacgtatcgaaagcggctcgtccatttacattaatcgagaagccattgaccagttgggttgatcaagttgaacatgccgctaggttgcatgctcgaaacatcgaacggaccgttgcatttccttgcggtcacgttttcggcgatcgatgtgttggcaaattgtttgtcgatgatagaaataaaagctcagcttgtcctctttgcggatatcaaatgagtcacacaggctgtgggcacgcgatagctccgacattgattcctatcaacggcacagctcccgtccgggatctattcgcgctaacgatctctgaaggtggccagccaccaaaaaactgcaaacagtgtcgatggcagtctatcagagcgaaactaagatatgcccttagctcagaatgtgtaatctgcaggcaaaaactcaagaccgggttcccagtagatccaatcgaacatgatgcgcatcgagtgcaccacattgagacagggatcagagaggcattgcttcagataatggagcttgtacagccaatattcgttacgcgaaagaccgaattagcagaccagaaggctgtggaggatgaggatcgtagagccgttaaccgttctctgcttcacgccatggtgctaacagatctcgaaagtactatctggtttcggaccccaacgaagaagatctccaaagagcaacaatggaaacacgacaagggtcttgaaagtattgaggattgtgttattgcctggctagctgaaccttcctcgactggtcggcgcatgtggtagttggatctacctaaaagggcatcatgatgcgaatatttatagaagcgggctgtgacgttgaggtacagcagcggttggagtagtggagtcggggtccttaccggccggtacctatctcgcctacctcccagatctgcagccccgccctttaggctaggcgacgacagcagcctaacaacttcgtctcgcgcttggccaatggcgagttttaccatcgcaagaagaggcgtgggataggcgtcaactcagcctatgagtcaaaagattgttgcctatgcagttatgctatctctgatagcagtagccaactacattgagaagttcatcgccaatactggattctttgccgacaagcgatgaaacgtacgaggcgcgatgggacgtgtgaggctagctttgtgccgtagtggctcatgaaacccaatatcacatttacatcgacggaacgtttgtgccacacttgtacatacatgtattcgttaatgttgcactaggcagactgaagcgtctgcacgataggttagtttcatcgttgtttgtttaaggcgatgttgcactggaccgcgaaccaaccccgttgcctatagtagcatggatatcaccggggtatattctcttttctggggtttcgctccttcccaaccttattagtgcacaatgtgccttccgttttgatagtgtaacgactaccttccttccctcctttcgatttggttgtgctttcagccttcctctcctctcttcccaccgcttggttgacgcgctattatctttgatctcttgacattcaagccactctcacaacgctcttgcccctgaggtctagcggccctaattacatcacggcagccaacacatcaagaacagagactcagtcacgatgttgaacgttgccgctcttgcccttcgaggcttcctggtaagccaccactgtatcactatgtgttgcagttgcaagcatcctgttgctgacacaaatacaagctcatcttcggagcagtcgttctggggctgtctgtcacgctcgcaaagcagcaggagtttggcagtccaccgtccgagacatcattcgacagctttgttggcgctttcggcattatcgtctccggccttgcgatcctgtcgatcttcatctccgcgatcccaaaggtgggcgtcatggccgcagacgcacttgcatcggttttctacttggcaggtgccatcgccttgacagtcgctcttaagccagtatcaagctgcacatccaatagtgacgtggcagagttcgagcgattcaacaacaagcttctcaacggaggctgcgagaatgtcaagggtggcaaagtttgtgctgctggtccgaatggcgcatggaccggcccgcgctgccagaaggttcaagccgactacgtcttcggatatttgggattcgtctttggcgcagcatcgatactcgtcactttccttgcgcacaggcgcggctcatctaccaacgcaacgatcgtttaagtctcaaaattgttgattatgcgcggtctatttgggcgttggagacccagtcagagctaaatcgggacctgggagcgtgagaataagagtgccggaaatataatcagggctgcacagacgcctacgggaatatgtacgacatcgcattgctgtggctttacatgagcaatgtggcggttgaggtacggtttcgggaacagtacacatactgtcagagggatatctatcagggtgtttggtgagggtatcaccaaagggatcaagatcagatacaggggttgggcttatgcttagtgtcgacgtataatgtctagacgcgtgtgatggctacggccacggtgttaggtacaacaaattccacagattcaaatgatgaaaagaggatcttgggcatggtatcgggtgacttgtcggtgtgaatcagtagaacaactaatcgacgctgcagtatctttagaaacattggttcgagcgctaaggatgattggcatcatagcccaaggacagcgtcgttacctagaaatctggcggcggtgaataatgttggttgtagagggatgtgataaaat

SEQ ID NO: 14882 - DNA, 546 bp, Muscodor strobelii
  misc_feature: SGI cDNA ID NO. 564915
  misc_feature: Elevated expression when VOC is produced
  misc_feature: Encodes the peptide sequence at SEQ ID NO 14883
atgttgaacgttgccgctcttgcccttcgaggcttcctgctcatcttcggagcagtcgttctggggctgtctgtcacgctcgcaaagcagcaggagtttggcagtccaccgtccgagacatcattcgacagctttgttggcgctttcggcattatcgtctccggccttgcgatcctgtcgatcttcatctccgcgatcccaaaggtgggcgtcatggccgcagacgcacttgcatcggttttctacttggcaggtgccatcgccttgacagtcgctcttaagccagtatcaagctgcacatccaatagtgacgtggcagagttcgagcgattcaacaacaagcttctcaacggaggctgcgagaatgtcaagggtggcaaagtttgtgctgctggtccgaatggcgcatggaccggcccgcgctgccagaaggttcaagccgactacgtcttcggatatttgggattcgtctttggcgcagcatcgatactcgtcactttccttgcgcacaggcgcggctcatctaccaacgcaacgatcgtttaa

SEQ ID NO: 14883 - protein, 181 aa, Muscodor strobelii
  misc_feature: SGI Peptide ID NO. 564915
  misc_feature (2)..(175): NCBI GI: 121719534 Blast Desc: conserved [Aspergillus clavatus NRRL 1] gi|119404664|gb|EAW15040.1| conserved [Aspergillus clavatus NRRL 1]
  misc_feature (1)..(178): NCBI GI: 116194336 Blast Desc: [Chaetomium globosum CBS 148.51] gi|88179679|gb|EAQ87147.1| [Chaetomium globosum CBS 148.51]
  misc_feature (1)..(151): NCBI GI: 85105105 Blast Desc: NCU05230 [Neurospora crassa OR74A] gi|28923473|gb|EAA32654.1| [Neurospora crassa OR74A]
  misc_feature (9)..(173): NCBI GI: 67902870 Blast Desc: AN8422.2 [Aspergillus nidulans FGSC A4] gi|40747888|gb|EAA67044.1| AN8422.2 [Aspergillus nidulans FGSC A4] gi|259484361|tpe|CBF80514.1| TPA: conserved [Aspergillus FGSC
  misc_feature (4)..(173): NCBI GI: 169596468 Blast Desc: SNOG_00997 [Phaeosphaeria nodorum SN15] gi|111071372|gb|EAT92492.1| SNOG_00997 [Phaeosphaeria nodorum SN15]
  misc_feature (9)..(172): NCBI GI: 189202168 Blast Desc: conserved [Pyrenophora tritici-repentis Pt-1C-BFP] gi|187984519|gb|EDU50007.1| conserved [Pyrenophora tritici-repentis Pt-1C-BFP]
  misc_feature (3)..(127): NCBI GI: 171683615 Blast Desc: protein product [Podospora anserina] gi|170941767|emb|CAP67421.1| protein product [Podospora anserina]
  misc_feature (15)..(172): NCBI GI: 261358283 Blast Desc: [Verticillium albo-atrum VaMs.102]
  misc_feature (14)..(173): NCBI GI: 154311427 Blast Desc: BC1G_06566 [Botryotinia fuckeliana B05.10] gi|150850963|gb|EDN26156.1| BC1G_06566 [Botryotinia fuckeliana B05.10]
  misc_feature (9)..(172): NCBI GI: 169596470 Blast Desc: SNOG_00998 [Phaeosphaeria nodorum SN15] gi|160701315|gb|EAT92493.2| SNOG_00998 [Phaeosphaeria nodorum SN15]
  misc_feature: Useful for introducing or modulating the production of volatile compounds
MLNVAALALRGFLLIFGAVVLGLSVTLAKQQEFGSPPSETSFDSFVGAFGIIVSGLAILSIFISAIPKVGVMAADALASVFYLAGAIALTVALKPVSSCTSNSDVAEFERFNNKLLNGGCENVKGGKVCAAGPNGAWTGPRCQKVQADYVFGYLGFVFGAASILVTFLAHRRGSSTNATIV

SEQ ID NO: 14884 - DNA, 3903 bp, Muscodor strobelii; identical to SEQ ID NO: 14881
  misc_feature: SGI EST ID NO. CUFF.35702.1
  misc_feature: Variant of the nucleotide sequence at SEQ ID NO 14882

SEQ ID NO: 14885 - DNA, 2298 bp, Muscodor strobelii
  misc_feature: SGI cDNA ID NO. 564916
  misc_feature: Elevated expression when VOC is produced
  misc_feature: Encodes the peptide sequence at SEQ ID NO 14886
atgtggtggtcaagcaactcttcgccttttcaggctgttttagcggccggtgctgctgtgtctgaatatgctcattcacctccagtatacccaacaccacccatgaaaggcgcaggcgcctgggctggatcattcaatcttgcaaaggaacttgtcaatcagatgaccttggaagaaaaggtcaatgtcacacggggttttacaacaaccgacaacacctgcgcaggaaacactggaacggtgcctaggctcaattggcccggtctctgtcttcatgatgctggcaatggagttcgggcgacagacctcgtcaactcttatccctctgcaatccatgcaggcgctagctgggacagaaatttgaccaaaaacagagcgtattacatgggcaaggaattcaaagccaagggagtcaatgtgctcctgggaccaaatgctggacctctgggaagatcaccgcttggtggacgtaattgggagggcttctcgatagatccgtatctttccggtcaacttgtagccgaaagcattgttggtcaccaagacgcaggagtcattgcgaatctaaagcacttcatcggaaatgaacaagagacctaccgccgcccttacttcggagttgaagccgcatcgtctaatattgatgacaagactctacatgagttctacctttggcctttcgtagacggtgttaaagcaggtgtcgcatcggttatgtgctcatacaatcggatcaacaacacatacggctgtatgaatagtaagcttctaaatggcgttctcaaaacggagctggagttcgacggcttcgtattgctagactggagtgcccgacacgaagttgatagcgcgaatgctggtttggacatggtgatgccaacgggtgaatttgattatctcgccgaagccgtcctcaatggcacagtggaagaatccagagtcacagacatggcgactagaatcatcgccgcgtggtatcttgttggccaagatggcgacaagttccccaaacccggcattggaatgaaaaatctcacacagcctcatgagcaagttgatgcccggataatggagtccaggagtgtcataatggagggggcaatagccggtcatgttctggtgaagaacaatgatgctttgccgtttcaaaagaaccccgtaatgctctctatatttggatatgatgcgacggtccccgcaaccaagaataccgatttcttattccaacacggctacacttcgtcacctgagatgggagaagccgagcttgggacgccgcaacattttaatcaggccgctcgaggtggtacaatcgtgactggaggcagagccggtgcaaatggtcctgcatatatgatcgatccattgagtgccatccagtatcgtgcgcgtacagacggaacttgggtgaattgggatctcaagtcagttgttcccgatgtcaacgcagcctcagatgcctgtctagtgtttataaatgccatagctaccgaggggtgggatcgtgatgggctacacgatgacttcagcgatggacttgttctcaacgtcgctgccaagtgcgctaacaccatcgtgataattcacgctgctggtatccggcttgttgaccaatggatcgagcatcctaacgtcactgcaactgtcatcgcgcatcttccgggacaagacagtggatcagcgttagtcaaacttctctacggtgaagcagggttttcggggaaactgccttatacattggcgcgcaacgaaagcgactactctgtatacgacatttgcggactgtcttcaccaagtgacattgatccacaatgcgattacattgaaggcgtatatctcgattatcgcagcttcgacgaaaagaatatcactcctcgatacgaattcggctttggtctgagttacacaacgttcgagtactcttcattatcaatagaggcgttcccttccttgtcggattctgcggggaagctatacccggtctcaactggagatgatctatgggaaattgtcgcgagagtggatgcatctgtgacgaattccggttctgttggcggatcggaaattgcgcagctatatcttgggattccaaacagcccgcccaagcaattgcgcggctttgagaagacacacatctcacaatctgagtcatcacacgtcagcttcgaactcacaaggcgtgatttcagtgtatgggatgtgacttcacaagcgtggattgttcagcctggcaattacactgtttcaatcggcgcaagcagtcgggacattaggttaatgggaaatattgaggtttga

SEQ ID NO: 14886 - protein, 765 aa, Muscodor strobelii
  misc_feature: SGI Peptide ID NO. 564916
  misc_feature (78)..(293): Pfam Id: PF00933 Pfam Desc: Glycosyl hydrolase family 3 N terminal domain
  misc_feature (371)..(615): Pfam Id: PF01915 Pfam Desc: Glycosyl hydrolase family 3 C terminal domain
  misc_feature (18)..(759): NCBI GI: 256724035 Blast Desc: NECHADRAFT_51328 [Nectria haematococca mpVI 77-13-4]
  misc_feature (12)..(765): NCBI GI: 31747174 Blast Desc: Cel3e [Hypocrea jecorina]
  misc_feature (30)..(759): NCBI GI: 46116032 Blast Desc: FG03858.1 [Gibberella zeae PH-1]
  misc_feature (21)..(765): NCBI GI: 39942856 Blast Desc: MGG_03508 [Magnaporthe grisea 70-15] gi|145009933|gb|EDJ94589.1| MGG_03508 [Magnaporthe grisea 70-15]
  misc_feature (23)..(763): NCBI GI: 154305615 Blast Desc: BC1G_07622 [Botryotinia fuckeliana B05.10] gi|150853141|gb|EDN28333.1| BC1G_07622 [Botryotinia fuckeliana B05.10]
  misc_feature (23)..(765): NCBI GI: 119494233 Blast Desc: glycosyl hydrolase, [Neosartorya fischeri NRRL 181] gi|119412174|gb|EAW22115.1| glycosyl hydrolase, [Neosartorya fischeri NRRL 181]
  misc_feature (23)..(765): NCBI GI: 145242946 Blast Desc: An11g00200 [Aspergillus niger] gi|134078691|emb|CAK48253.1| protein product [Aspergillus niger]
  misc_feature (23)..(765): NCBI GI: 238488403 Blast Desc: beta-glucosidase, [Aspergillus flavus NRRL3357] gi|220697827|gb|EED54167.1| beta-glucosidase, [Aspergillus flavus NRRL3357]
  misc_feature (23)..(765): NCBI GI: 169762594 Blast Desc: [Aspergillus oryzae RIB40] gi|83770225|dbj|BAE60358.1| protein product [Aspergillus oryzae]
  misc_feature (23)..(765): NCBI GI: 70996706 Blast Desc: beta-glucosidase [Aspergillus fumigatus Af293] gi|66850743|gb|EAL91070.1| beta-glucosidase, [Aspergillus fumigatus Af293]
  misc_feature (12)..(654): SWISSPROT Homolog: EC 3.2.1.21 Beta-glucosidase
  misc_feature: Useful for introducing or modulating the production of volatile compounds
MWWSSNSSPFQAVLAAGAAVSEYAHSPPVYPTPPMKGAGAWAGSFNLAKELVNQMTLEEKVNVTRGFTTTDNTCAGNTGTVPRLNWPGLCLHDAGNGVRATDLVNSYPSAIHAGASWDRNLTKNRAYYMGKEFKAKGVNVLLGPNAGPLGRSPLGGRNWEGFSIDPYLSGQLVAESIVGHQDAGVIANLKHFIGNEQETYRRPYFGVEAASSNIDDKTLHEFYLWPFVDGVKAGVASVMCSYNRINNTYGCMNSKLLNGVLKTELEFDGFVLLDWSARHEVDSANAGLDMVMPTGEFDYLAEAVLNGTVEESRVTDMATRIIAAWYLVGQDGDKFPKPGIGMKNLTQPHEQVDARIMESRSVIMEGAIAGHVLVKNNDALPFQKNPVMLSIFGYDATVPATKNTDFLFQHGYTSSPEMGEAELGTPQHFNQAARGGTIVTGGRAGANGPAYMIDPLSAIQYRARTDGTWVNWDLKSVVPDVNAASDACLVFINAIATEGWDRDGLHDDFSDGLVLNVAAKCANTIVIIHAAGIRLVDQWIEHPNVTATVIAHLPGQDSGSALVKLLYGEAGFSGKLPYTLARNESDYSVYDICGLSSPSDIDPQCDYIEGVYLDYRSFDEKNITPRYEFGFGLSYTTFEYSSLSIEAFPSLSDSAGKLYPVSTGDDLWEIVARVDASVTNSGSVGGSEIAQLYLGIPNSPPKQLRGFEKTHISQSESSHVSFELTRRDFSVWDVTSQAWIVQPGNYTVSIGASSRDIRLMGNIEV

SEQ ID NO: 14887 - DNA, 4074 bp, Muscodor strobelii
  misc_feature: SGI EST ID NO. CUFF.35560.0
  misc_feature: Variant of the nucleotide sequence at SEQ ID NO 14885
ggcgaggctggtacccgtggcatttcgagcttcaatggggttcctacatatatctagatttgttcaggactgatttaaatttgtcatactatattctactttgattttttgccattaattcacaattggtgtaacgaagtagcactgccgacgactgctcaagagccaactgagacgttagtggtgagttaagcattatttgagactggcacaattataattgtcggatgtggtggtcaagcaactcttcgccttttcaggctgttttagcggccggtgctgctgtgtctgaatatgctcattcacctccagtatacccaacacccgaatcgaagaccttggctgaccttgcttaccagcacccatgaaaggcgcaggcgcctgggctggatcattcaatcttgcaaaggaacttgtcaatcagatgaccttggaagaaaaggtcaatgtcacacggggttttacaacaaccgacaacacctgcgcaggaaacactggaacggtgcctaggctcaattggcccggtctctgtcttcatgatgctggcaatggagttcgggcgacagacctcgtcaactcttatccctctgcaatccatgcaggcgctagctgggacagaaatttgaccaaaaacagagcgtattacatgggcaaggaattcaaagccaagggagtcaatgtgctcctgggaccaaatgctggacctctgggaagatcaccgcttggtggacgtaattgggagggcttctcgatagatccgtatctttccggtcaacttgtagccgaaagcattgttggtcaccaagacgcaggagtcattgcgaatctaaagcacttcatcggaaatgaacaagagacctaccgccgcccttacttcggagttgaagccgcatcgtctaatattgatgacaagactctacatgagttctacctttggcctttcgtagacggtgttaaagcaggtgtcgcatcggttatgtgctcatacaatcggatcaacaacacatacggctgtatgaatagtaagcttctaaatggcgttctcaaaacggagctggagttcgacggcttcgtattgctagactggagtgcccgacacgaagttgatagcgcgaatgctggtttggacatggtgatgccaacgggtgaatttgattatctcgccgaagccgtcctcaatggcacagtggaagaatccagagtcacagacatggcgactagaatcatcgccgcgtggtatcttgttggccaagatggcgacaagttccccaaacccggcattggaatgaaaaatctcacacagcctcatgagcaagttgatgcccggataatggagtccaggagtgtcataatggagggggcaatagccggtcatgttctggtgaagaacaatgatgctttgccgtttcaaaagaaccccgtaatgctctctatatttggatatgatgcgacggtccccgcaaccaagaataccgatttcttattccaacacggctacacttcgtcacctgagatgggagaagccgagcttgggacgccgcaacattttaatcaggccgctcgaggtggtacaatcgtgactggaggcagagccggtgcaaatggtcctgcatatatgatcgatccattgagtgccatccagtatcgtgcgcgtacagacggaacttgggtgaattgggatctcaagtcagttgttcccgatgtcaacgcagcctcagatgcctgtctagtgtttataaatgccatagctaccgaggggtgggatcgtgatgggctacacgatgacttcagcgatggacttgttctcaacgtcgctgccaagtgcgctaacaccatcgtgataattcacgctgctggtatccggcttgttgaccaatggatcgagcatcctaacgtcactgcaactgtcatcgcgcatcttccgggacaagacagtggatcagcgttagtcaaacttctctacggtgaagcagggttttcggggaaactgccttatacattggcgcgcaacgaaagcgactactctgtatacgacatttgcggactgtcttcaccaagtgacattgatccacaatgcgattacattgaaggcgtatatctcgattatcgcagcttcgacgaaaagaatatcactcctcgatacgaattcggctttggtctgagttacacaacgttcgagtactcttcattatcaatagaggcgttcccttccttgtcggattctgcggggaagctatacccggtctcaactggagatgatctatgggaaattgtcgcgagagtggatgcatctgtgacgaattccggttctgttggcggatcggaaattgcgcagctatatcttgggattccaaacagcccgcccaagcaattgcgcggctttgagaagacacacatctcacaatctgagtcatcacacgtcagcttcgaactcacaaggcgtgatttcagtgtatgggatgtgacttcacaagcgtggattgttcagcctggcaattacactgtttcaatcggcgcaagcagtcgggacattaggttaatgggaaatattgaggtttgagtacctcgtgaacatcaggcaaggagacaaagctctgagattggatttctctttaacgaaacagatcttcgaatattggggatatagacgaagagacgctctatctttgaggtgataataacttcttaaattacttctagccctgtctcgcttgatctagttcgactttattctgtgtgatgtcgtcgatctcggctaacacttccggtgtcagcttatccagtatttcaaccgctttcacgttctcaacgatttgctctggacggcttgcacccgtaatgacgctcgatacattcgggttctttagacaccaggcaacagcaagttgactctgcgtcactcctagcttatctgcaatagtctttagctttttgctcttcgcaatcttatcctgccagtccgcgttgccatattgactacgcaaggtgtctccaaacccatccttactgacagcgatacgtgaatcatcaggcggagcatctaccgcatcgttatacttgccacttagtatcccgaagaattgaggactgaacgtcgttaagccaataccacatcgagagtacagacgctggaactctccttctaccttcttccgcatgaggatgttgtagaatggctgctcaaccactggcggaatcatccgaaggtcttttgcgatgccaactgcttctgcaatctcatctgcgctccactccgaggtgccccaatacatcgccatgccatgatcaatgacatagttgaatgccctgactgtctcctccatgggcgttagccgatcaggacggtgcgcgtagacgatgtcgacgtagcgtaagtcaagccgttgaagcgaagcctccagtccttcgatgatgtgttttcgcgacagtccgtgattattgattagaatctcgccattcacggcgccccagtttatctgtcgtcgtcagttatatgcgcgctcgtacttcgctcgtattccttgaacagtgactcgtaccttcgtacttatcactaagtcgctgcgcttccagccgaatttcttgattgcttgccccatcactatttccgatttgccggccgtgtaactgcgtatgatttttgagtttcttgataacgcaaacaggcatcatgtggcccttacttttctgccgtgtcaaagaagttgaccccgagatcgtaagcttgtttcatgcattgaaacgttttctctgaagtaagggtcagatttgcgcgtcttctactaatgtgggtggaagataccatcgtcaacatgaccgccaaagctatgcaatcgtcaacattcctgctcttcatgcccattgttcttagagtgaaacctacgtcagccatcctccgagtccaattacagagacatgaagccccgatttacctagtcgtcgatagaccatccccgtcttacgaggttcctcgaacgccatgatgttctaatttgcggaagtgtcttaacaatgtcaattcaatgaacgcacttgcactcaactaatcaatatcagttctcccattgagccccc

SEQ ID NO: 14888 - DNA, 1056 bp, Muscodor strobelii
  misc_feature: SGI cDNA ID NO. 564917
  misc_feature: Elevated expression when VOC is produced
  misc_feature: Encodes the peptide sequence at SEQ ID NO 14889
atggcgttcgaggaacctcgtaagacggggatggtctatcgacgactaggtaaatcggggcttcatgtctctgtaattggactcggaggatggctgacctttggcggtcatgttgacgatgagaaaacgtttcaatgcatgaaacaagcttacgatctcggggtcaacttctttgacacggcagaaaattacacggccggcaaatcggaaatagtgatggggcaagcaatcaagaaattcggctggaagcgcagcgacttagtgataagtacgaagataaactggggcgccgtgaatggcgagattctaatcaataatcacggactgtcgcgaaaacacatcatcgaaggactggaggcttcgcttcaacggcttgacttacgctacgtcgacatcgtctacgcgcaccgtcctgatcggctaacgcccatggaggagacagtcagggcattcaactatgtcattgatcatggcatggcgatgtattggggcacctcggagtggagcgcagatgagattgcagaagcagttggcatcgcaaaagaccttcggatgattccgccagtggttgagcagccattctacaacatcctcatgcggaagaaggtagaaggagagttccagcgtctgtactctcgatgtggtattggcttaacgacgttcagtcctcaattcttcgggatactaagtggcaagtataacgatgcggtagatgctccgcctgatgattcacgtatcgctgtcagtaaggatgggtttggagacaccttgcgtagtcaatatggcaacgcggactggcaggataagattgcgaagagcaaaaagctaaagactattgcagataagctaggagtgacgcagagtcaacttgctgttgcctggtgtctaaagaacccgaatgtatcgagcgtcattacgggtgcaagccgtccagagcaaatcgttgagaacgtgaaagcggttgaaatactggataagctgacaccggaagtgttagccgagatcgacgacatcacacagaataaagtcgaactagatcaagcgagacagggctag

SEQ ID NO: 14889 - protein, 351 aa, Muscodor strobelii
  misc_feature: SGI Peptide ID NO. 564917
  misc_feature (17)..(340): Pfam Id: PF00248 Pfam Desc: Aldo/keto reductase family
  misc_feature (1)..(350): NCBI GI: 46127935 Blast Desc: FG08345.1 [Gibberella zeae PH-1]
  misc_feature (1)..(350): NCBI GI: 189200801 Blast Desc: voltage-gated potassium channel subunit beta-1 channel subunit beta-1 [Pyrenophora tritici-repentis Pt-1C-BFP] gi|187983836|gb|EDU49324.1| voltage-gated potassium channel
  misc_feature (11)..(350): NCBI GI: 145230141 Blast Desc: An01g09590 [Aspergillus niger] gi|134055494|emb|CAK44009.1| protein product [Aspergillus niger]
  misc_feature (11)..(350): NCBI GI: 171677706 Blast Desc: protein product [Podospora anserina] gi|170936921|emb|CAP61580.1| protein product [Podospora anserina]
  misc_feature (11)..(350): NCBI GI: 119494295 Blast Desc: voltage-gated K+ channel beta subunit (KCNAB), [Neosartorya fischeri NRRL 181] gi|119412205|gb|EAW22146.1| voltage-gated K+ channel beta subunit (KCNAB), [Neosartorya NRRL
  misc_feature (11)..(350): NCBI GI: 159131818 Blast Desc: voltage-gated K+ channel beta subunit (KCNAB), [Aspergillus fumigatus A1163]
  misc_feature (11)..(350): NCBI GI: 238507165 Blast Desc: voltage-gated K+ channel beta subunit (KCNAB), [Aspergillus flavus NRRL3357] gi|220689497|gb|EED45848.1| voltage-gated K+ channel beta subunit (KCNAB), [Aspergillus
  misc_feature (7)..(351): NCBI GI: 121700589 Blast Desc: K+ channel subunit Kat, [Aspergillus clavatus NRRL 1] gi|119396702|gb|EAW07133.1| K+ channel subunit Kat, [Aspergillus clavatus NRRL 1]
  misc_feature (11)..(350): NCBI GI: 70996654 Blast Desc: voltage-gated K+ channel beta subunit (KCNAB) [Aspergillus fumigatus Af293] gi|66850717|gb|EAL91044.1| voltage-gated K+ channel beta subunit (KCNAB), [Aspergillus
  misc_feature (11)..(350): NCBI GI: 169786199 Blast Desc: [Aspergillus oryzae RIB40] gi|83776308|dbj|BAE66427.1| protein product [Aspergillus oryzae]
  misc_feature (2)..(337): SWISSPROT Homolog: EC 1.1.1.91 Aryl-alcohol dehydrogenase (NADP(+))
  misc_feature: Useful for introducing or modulating the production of volatile compounds
MAFEEPRKTGMVYRRLGKSGLHVSVIGLGGWLTFGGHVDDEKTFQCMKQAYDLGVNFFDTAENYTAGKSEIVMGQAIKKFGWKRSDLVISTKINWGAVNGEILINNHGLSRKHIIEGLEASLQRLDLRYVDIVYAHRPDRLTPMEETVRAFNYVIDHGMAMYWGTSEWSADEIAEAVGIAKDLRMIPPVVEQPFYNILMRKKVEGEFQRLYSRCGIGLTTFSPQFFGILSGKYNDAVDAPPDDSRIAVSKDGFGDTLRSQYGNADWQDKIAKSKKLKTIADKLGVTQSQLAVAWCLKNPNVSSVITGASRPEQIVENVKAVEILDKLTPEVLAEIDDITQNKVELDQARQG

SEQ ID NO: 14890 - DNA, 2554 bp, Muscodor strobelii
  misc_feature: SGI EST ID NO. CUFF.35561.4
  misc_feature: Variant of the nucleotide sequence at SEQ ID NO 14888
gttcgaggaacctcgtaagacggggatggtctatcgacgactaggtaaatcggggcttcatgtctctgtaattggactcggaggatggctgacgtaggtttcactctaagaacaatgggcatgaagagcaggaatgttgacgattgcatagctttggcggtcatgttgacgatggtatcttccacccacattagtagaagacgcgcaaatctgacccttacttcagagaaaacgtttcaatgcatgaaacaagcttacgatctcggggtcaacttctttgacacggcagaaaattacacggccggcaaatcggaaatagtgatggggcaagcaatcaagaaattcggctggaagcgcagcgacttagtgataagtacgaagataaactggggcgccgtgaatggcgagattctaatcaataatcacggactgtcgcgaaaacacatcatcgaaggactggaggcttcgcttcaacggcttgacttacgctacgtcgacatcgtctacgcgcaccgtcctgatcggctaacgcccatggaggagacagtcagggcattcaactatgtcattgatcatggcatggcgatgtattggggcacctcggagtggagcgcagatgagattgcagaagcagttggcatcgcaaaagaccttcggatgattccgccagtggttgagcagccattctacaacatcctcatgcggaagaaggtagaaggagagttccagcgtctgtactctcgatgtggtattggcttaacgacgttcagtcctcaattcttcgggatactaagtggcaagtataacgatgcggtagatgctccgcctgatgattcacgtatcgctgtcagtaaggatgggtttggagacaccttgcgtagtcaatatggcaacgcggactggcaggataagattgcgaagagcaaaaagctaaagactattgcagataagctaggagtgacgcagagtcaacttgctgttgcctggtgtctaaagaacccgaatgtatcgagcgtcattacgggtgcaagccgtccagagcaaatcgttgagaacgtgaaagcggttgaaatactggataagctgacaccggaagtgttagccgagatcgacgacatcacacagaataaagtcgaactagatcaagcgagacagggctagaagtaatttaagaagttattatcacctcaaagatagagcgtctcttcgtctatatccccaatattcgaagatctgtttcgttaaagagaaatccaatctcagagctttgtctccttgcctgatgttcacgaggtactcaaacctcaatatttcccattaacctaatgtcccgactgcttgcgccgattgaaacagtgtaattgccaggctgaacaatccacgcttgtgaagtcacatcccatacactgaaatcacgccttgtgagttcgaagctgacgtgtgatgactcagattgtgagatgtgtgtcttctcaaagccgcgcaattgcttgggcgggctgtttggaatcccaagatatagctgcgcaatttccgatccgccaacagaaccggaattcgtcacagatgcatccactctcgcgacaatttcccatagatcatctccagttgagaccgggtatagcttccccgcagaatccgacaaggaagggaacgcctctattgataatgaagagtactcgaacgttgtgtaactcagaccaaagccgaattcgtatcgaggagtgatattcttttcgtcgaagctgcgataatcgagatatacgccttcaatgtaatcgcattgtggatcaatgtcacttggtgaagacagtccgcaaatgtcgtatacagagtagtcgctttcgttgcgcgccaatgtataaggcagtttccccgaaaaccctgcttcaccgtagagaagtttgactaacgctgatccactgtcttgtcccggaagatgcgcgatgacagttgcagtgacgttaggatgctcgatccattggtcaacaagccggataccagcagcgtgaattatcacgatggtgttagcgcacttggcagcgacgttgagaacaagtccatcgctgaagtcatcgtgtagcccatcacgatcccacccctcggtagctatggcatttataaacactagacaggcatctgaggctgcgttgacatcgggaacaactgacttgagatcccaattcacccaagttccgtctgtacgcgcacgatactggatggcactcaatggctaccataatggtaagatcaatctgctttgctgaaggaggtaggcacaaacttacatcgatcatatatgcaggaccatttgcaccggctctgcctccagtcacgattgtaccacctcgagcggcctgattaaaatgttgcggcgtcccaagctcggcttctcccatctcaggtgacgaagtgtagccgtgttggaataagaaatcggtattcttggttgcggggaccgtcgcatcatatccaaatatagagagcattacggggttcttttgaaacggcaaagcatcattgttcttcaccagaacatgaccggctattgccc

SEQ ID NO: 14891 - DNA, 1068 bp, Muscodor strobelii
  misc_feature: SGI cDNA ID NO. 564918
  misc_feature: Encodes the peptide sequence at SEQ ID NO 14892
atgccctcagccatgacaacaacgatgaacgcggcttctgctgatattgtaggaggccatcccgactctcgaccaactatcgaatcaccactagtttactcaggtagcctagacgcatttgaacaaaatgacttgactccagtcataggacgagagttttacggtcttcaaatccgcgatctgttgagatgggaagataaaagtgtgagagatcttgctgtgactgtttcccaacggggcgttgttttcctgagagatcaagatgtgacaccgacagagatgaaagacttcatcacccgactgtcaaaggtcgcgggatgcccaacaagttctgacctccacgtgcatcctcttaccgaggaaggtagcgaattgggagatcaagtcagtgtcatttcgagcgagaagcaaaaaaagggtggtggtttgacccatcaactctctgacgtcagtcggtttgccagtacaggatggcatagcgatattacatttgaaaaggttccgtccgactacgctttgttgaaaattcatactctcccaaagaccggaggagacactctttgggcttctggctacgaattatatgaccgactctcagagccgatgaggaaatttcttgaaagtctcacagcaactcacgatgccaatttcttccacgatgaagcaacacgtcttggcagccccttacgcaaaggaatccgaggttcgctcctcaaccagggcgagaatctgaaaacggagcatcccgtaattcgtaccaatccagtaacaggatggaaatctgtatacgtgaacaaagggtttacaaagagaattaatggtgtgaccaaagacgaaagtgatgttttactcaattgtctcttcaacttagtcacccaaaatcacgacgcgcaagtccgcttcaagtggaaccgaaacgattgcgcaatatgggacaatcgatctacgctacactgcgcgacatatgattacgccgccgcgagggccggcgatcgggttgctagtctcggcgaagcgccttatcttgatcttggaagtaagagtcgacgcgaagctctagacgactaa

SEQ ID NO: 14892 - protein, 355 aa, Muscodor strobelii
  misc_feature: SGI Peptide ID NO. 564918
  misc_feature (41)..(342): Pfam Id: PF02668 Pfam Desc: Taurine catabolism dioxygenase TauD, TfdA family
  misc_feature (1)..(353): NCBI GI: 256733423 Blast Desc: NECHADRAFT_77499 [Nectria haematococca mpVI 77-13-4]
  misc_feature (1)..(343): NCBI GI: 46127925 Blast Desc: FG08340.1 [Gibberella zeae PH-1]
  misc_feature (1)..(353): NCBI GI: 145230135 Blast Desc: An01g09560 [Aspergillus niger] gi|134055491|emb|CAK44006.1| protein product [Aspergillus niger]
  misc_feature (9)..(355): NCBI GI: 70996660 Blast Desc: TfdA family taurine dioxygenase [Aspergillus fumigatus Af293] gi|66850720|gb|EAL91047.1| TfdA family taurine dioxygenase, [Aspergillus fumigatus Af293] TfdA family taurine
  misc_feature (9)..(353): NCBI GI: 119494289 Blast Desc: TfdA family taurine dioxygenase, [Neosartorya fischeri NRRL 181] gi|119412202|gb|EAW22143.1| TfdA family taurine dioxygenase, [Neosartorya fischeri NRRL 181]
  misc_feature (1)..(353): NCBI GI: 39942074 Blast Desc: MGG_03117 [Magnaporthe grisea 70-15] gi|145015911|gb|EDK00401.1| MGG_03117 [Magnaporthe grisea 70-15]
  misc_feature (1)..(353): NCBI GI: 169773205 Blast Desc: [Aspergillus oryzae RIB40] gi|83768932|dbj|BAE59069.1| protein product [Aspergillus oryzae]
  misc_feature (1)..(353): NCBI GI: 238491156 Blast Desc: TfdA family taurine dioxygenase, [Aspergillus flavus NRRL3357] gi|220697228|gb|EED53569.1| TfdA family taurine dioxygenase, [Aspergillus flavus NRRL3357]
  misc_feature (1)..(353): NCBI GI: 115397327 Blast Desc: ATEG_05077 [Aspergillus terreus NIH2624] gi|114192446|gb|EAU34146.1| ATEG_05077 [Aspergillus terreus NIH2624]
  misc_feature (16)..(353): NCBI GI: 212541664 Blast Desc: TfdA family taurine dioxygenase, [Penicillium marneffei ATCC 18224] gi|210068286|gb|EEA22378.1| TfdA family taurine dioxygenase, [Penicillium marneffei ATCC 18224]
  misc_feature (45)..(345): SWISSPROT Homolog: EC 1.14.11.17 Taurine dioxygenase
MPSAMTTTMNAASADIVGGHPDSRPTIESPLVYSGSLDAFEQNDLTPVIGREFYGLQIRDLLRWEDKSVRDLAVTVSQRGVVFLRDQDVTPTEMKDFITRLSKVAGCPTSSDLHVHPLTEEGSELGDQVSVISSEKQKKGGGLTHQLSDVSRFASTGWHSDITFEKVPSDYALLKIHTLPKTGGDTLWASGYELYDRLSEPMRKFLESLTATHDANFFHDEATRLGSPLRKGIRGSLLNQGENLKTEHPVIRTNPVTGWKSVYVNKGFTKRINGVTKDESDVLLNCLFNLVTQNHDAQVRFKWNRNDCAIWDNRSTLHCATYDYAAARAGDRVASLGEAPYLDLGSKSRREALDD

SEQ ID NO: 14893 - DNA, 2165 bp, Muscodor strobelii
  misc_feature: SGI EST ID NO. CUFF.35519.0
  misc_feature: Variant of the nucleotide sequence at SEQ ID NO 14891
ggaagtttggtgctacttacaagattttgccttcccactaccgccttgcccgaatggtccatctcctcgatcccttgaccggacggtgctctgctgatctcggccatcttatcaacttgtgttaatcacttaaggcttgggattttgagaaggcgaatgatactgtcaagtcaacatcgaaaggcacaagaagcgagagtatcacaaagcttataagtggattgccatcagcggcggtctagccaacttattactcgtacctggtactcgggactgcacaataaaaagcatgcttgccgatatgccgacccaagattcgacgaaatctattgctcattccagatcaggcatgcattaagcagttcgatgtgaatgcggggtcgaaactggcaagaagtccgatgcccccagccatgagcagcgcatgaacgggattgcgtgtcgaggccacttcagtcgtctattaaaccagcctataacccctgtggctgaatcaaaagttcaactagtttgtatagtatattcaattttgtacctcacaatacaggggccctttggaagcacttttgtgttcactggtggtggtgcaatacaaacgccggatcacgaaatctgacccttgtcatcatatccacattacgatcaaagagtcaacctccgacatgccctcagccatgacaacaacgatgaacgcggcttctgctgatattgtaggaggccatcccgactctcgaccaactatcgaatcaccactagtttactcaggtagcctagacgcatttgaacaaaatgacttgactccagtcataggacgagagttttacggtcttcaaatccgcgatctgttgagatgggaagataaaagtgtgagagatcttgctgtgactgtttcccaacggggcgttgttttcctgagagatcaagatgtgacaccgacagagatgaaagacttcatcacccgactgtcaaaggtcgcgggatgcccaacaagttctgacctccacgtgcatcctcttaccgaggaaggtagcgaattgggagatcaagtcagtgtcatttcgagcgagaagcaaaaaaagggtggtggtttgacccatcaactctctgacgtcagtcggtttgccagtacaggatggcatagcgatattacatttgaaaaggttccgtccgactacgctttgttgaaaattcatactctcccaaagaccggaggagacactctttgggcttctggctacgaattatatgaccgactctcagagccgatgaggaaatttcttgaaagtctcacagcaactcacgatgccaatttcttccacgatgaagcaacacgtcttggcagccccttacgcaaaggaatccgaggttcgctcctcaaccagggcgagaatctgaaaacggagcatcccgtaattcgtaccaatccagtaacaggatggaaatctgtatacgtgaacaaagggtttacaaagagaattaatggtgtgaccaaagacgaaagtgatgttttactcaattgtctcttcaacttagtcacccaaaatcacgacgcgcaagtccgcttcaagtggaaccgaaacgattgcgcaatatgggacaatcgatctacgctacactgcgcgacatatgattacgccgccgcgagggccggcgatcgggttgctagtctcggcgaagcgccttatcttgatcttggaagtaagagtcgacgcgaagctctagacgactaaaacttggtaatttgaactgccctcacggaagtgagagatcgatgatcttggaagcttgtagaagtgctgtagacgctcatatagaaagaatgttaatgggatgacaatttaagcatgcaccgaacacgccgacgaataacgctgatgtaaatatacatgatcatcaatcgtgctgtcgctatgtaattaaacatcgctatacttccacgctcgtctcgaggcaagagggttactcctggtgccttggcttgcgacattcctctatatatcatgctcggaccgattatagatattctacgtcctacgaattgtctctcgaagcagaaaataagacggtttcatcggaataagtcatgcatccaaccatctccgcatgagtctgaatcagttcctcggctcggggcacttctcccggtgggcaagccccgcttaggt

SEQ ID NO: 14894 - DNA, 1590 bp, Muscodor strobelii
  misc_feature: SGI cDNA ID NO. 564919
  misc_feature: Encodes the peptide sequence at SEQ ID NO 14895
atggccgagatcagcagagcaccgtccggtcaagggatcgaggagatggaccattcgggcaaggcggtagtgggaaggcaaaatcttcaccatgcagttccccctcatgagacgtatgagggagcacacagatgggacccttccgcaacttggtcacccgaagaagaagcacgggttgtccgtaaaacggacttgtatctattgatatgggtttgcatcatgttctttggcctgcagctagaccgcgggaacctctcaaatgctgtagcagacaacttactggacgatttgggtcttactaccgacgactacaacaatggctcaacaatacaactcatcttcttcctctccgcagaattccctgtacaagtggcaactaagcgatttggtttcaagcacatactgccattgatgatggtgctttggagcaccgtatcatgggctcaggccttcatgacaggaagagcgtcgttcttcgcaacgcgagctttaatcggattgttcgaaggcggttttattcccggtgtgattcttatgacaacttattattatacaagcagagaactctctgttcgtctcgctgcattctggtcgacgctcagcattgccagaataatctcggctcttctcgctgctggtatactagagcttcgagggacagcgggaagaccaggctggttcttcttgttcctcattgagggcctactcacttttctcattggcgtgatctcattcctttacctacctcgatcgccaactgcgacgaaatccgtcctatggcataagtcgtggtattcagagagggaggagatcatcatgatcaaccgcattcttcgagacgaccctgcaaagggtcttactgccttgaaggaacctgcaaagtggacagacatcaaacgtgcctggtccgataagtctatgtggggactgtatttcgtgggccttgtcgcatacattcctgcaacaccagtcacagcatacatctctctcacgataaaacgactcgggttcaaaacactctctgccaatcttctcacagcaccttcagctgcgttgcagattatcacgacgctggcgctggcttacagcagcgatcgctttaacgaacgaacatggcattgcttcttcggtgaattttggctgcttcctctcttcactgcgctcatcaccttgcctgatggaggacgagaatggggccggtggtcactggtcacgctaacttctggatatccttactttcatccaattgtgtcttcatggatctcggagaacacttttgatgttaagaagcgtgcaattacagctgccacgtataacgtgattgtacaggtcggatccctcattgggaaccagatttatcgctcgtgggactcgccatactacaagacgggcaacacagtttgtgtctcaatcgtggcgctttctttagtgacgttcctagcacaaaagttctatctgatacacctcaacaagaagaaagaagaagcttggaaccagatgactttagaagaacaggctgtttatcagaatgataaagaagcaagagagctggatggaaacaaacggcttgactttaggtttcaacactag

SEQ ID NO: 14895 - protein, 529 aa, Muscodor strobelii
  misc_feature: SGI Peptide ID NO. 564919
  misc_feature (71)..(450): Pfam Id: PF07690 Pfam Desc: Major Facilitator Superfamily
  misc_feature (16)..(529): NCBI GI: 39942076 Blast Desc: MGG_03118 [Magnaporthe grisea 70-15] gi|145015910|gb|EDK00400.1| MGG_03118 [Magnaporthe grisea 70-15]
  misc_feature (16)..(529): NCBI GI: 46127927 Blast Desc: FG08341.1 [Gibberella zeae PH-1]
  misc_feature (18)..(529): NCBI GI: 156066087 Blast Desc: SS1G_01055 [Sclerotinia sclerotiorum 1980] gi|154691913|gb|EDN91651.1| SS1G_01055 [Sclerotinia sclerotiorum 1980]
  misc_feature (10)..(527): NCBI GI: 189200799 Blast Desc: conserved [Pyrenophora tritici-repentis Pt-1C-BFP] gi|187983835|gb|EDU49323.1| conserved [Pyrenophora tritici-repentis Pt-1C-BFP]
  misc_feature (3)..(527): NCBI GI: 169620568 Blast Desc: SNOG_13484 [Phaeosphaeria nodorum SN15] gi|160704065|gb|EAT78931.2| SNOG_13484 [Phaeosphaeria nodorum SN15]
  misc_feature (24)..(529): NCBI GI: 154294248 Blast Desc: BC1G_13810 [Botryotinia fuckeliana B05.10] gi|150844820|gb|EDN20013.1| BC1G_13810 [Botryotinia fuckeliana B05.10]
  misc_feature (1)..(529): NCBI GI: 238507169 Blast Desc: MFS transporter, [Aspergillus flavus NRRL3357] gi|220689499|gb|EED45850.1| MFS transporter, [Aspergillus flavus NRRL3357]
  misc_feature (14)..(529): NCBI GI: 119494291 Blast Desc: MFS transporter, [Neosartorya fischeri NRRL 181] gi|119412203|gb|EAW22144.1| MFS transporter, [Neosartorya fischeri NRRL 181]
  misc_feature (27)..(529): NCBI GI: 212541662 Blast Desc: MFS transporter, [Penicillium marneffei ATCC 18224] gi|210068285|gb|EEA22377.1| MFS transporter, [Penicillium marneffei ATCC 18224]
  misc_feature (10)..(529): NCBI GI: 145230137 Blast Desc: An01g09570 [Aspergillus niger] gi|134055492|emb|CAK44007.1| protein product [Aspergillus niger]
MAEISRAPSGQGIEEMDHSGKAVVGRQNLHHAVPPHETYEGAHRWDPSATWSPEEEARVVRKTDLYLLIWVCIMFFGLQLDRGNLSNAVADNLLDDLGLTTDDYNNGSTIQLIFFLSAEFPVQVATKRFGFKHILPLMMVLWSTVSWAQAFMTGRASFFATRALIGLFEGGFIPGVILMTTYYYTSRELSVRLAAFWSTLSIARIISALLAAGILELRGTAGRPGWFFLFLIEGLLTFLIGVISFLYLPRSPTATKSVLWHKSWYSEREEIIMINRILRDDPAKGLTALKEPAKWTDIKRAWSDKSMWGLYFVGLVAYIPATPVTAYISLTIKRLGFKTLSANLLTAPSAALQIITTLALAYSSDRFNERTWHCFFGEFWLLPLFTALITLPDGGREWGRWSLVTLTSGYPYFHPIVSSWISENTFDVKKRAITAATYNVIVQVGSLIGNQIYRSWDSPYYKTGNTVCVSIVALSLVTFLAQKFYLIHLNKKKEEAWNQMTLEEQAVYQNDKEARELDGNKRLDFRFQH

SEQ ID NO: 14896 - DNA, 249 bp, Muscodor strobelii
  misc_feature: SGI EST ID NO. CUFF.35521.0
  misc_feature: Variant of the nucleotide sequence at SEQ ID NO 14894
actagagcttcgagggacagcgggaagaccaggctggttcttcttgttcctcattgagggcctactcacttttctcattggcgtgatctcattcctttacctacctcgatcgccaactgcgacgaaatccgtcctatggcataagtcgtggtattcagagagggaggagatcatcatgatcaaccgcattcttcgagacgaccctgcaaagggtcttactgccttgaaggaacctgcaaagtggacaga

SEQ ID NO: 14897 - DNA, 282 bp, Muscodor strobelii
  misc_feature: SGI cDNA ID NO. 564920
  misc_feature: Encodes the peptide sequence at SEQ ID NO 14898
atgcgttccgttctgatcacgatcctcgccgccacggccatcgcaatgcccatctcattcaatatccgtcaacttcctggccttggcagcgcgacctcgccactcaccaccgtcctatcggaggttggaaagcaagtcccatcttcaatgggcaaagttgaagatgctatcgactctcagaagaagaatagcacgcagccggccaacacgaaagccgcgagcggactgggtggactgactggccttctcggtggcctcactggcgggcttggaggaatctag

SEQ ID NO: 14898 - protein, 93 aa, Muscodor strobelii
  misc_feature: SGI Peptide ID NO. 564920
MRSVLITILAATAIAMPISFNIRQLPGLGSATSPLTTVLSEVGKQVPSSMGKVEDAIDSQKKNSTQPANTKAASGLGGLTGLLGGLTGGLGGI

SEQ ID NO: 14899 - DNA, 2102 bp, Muscodor strobelii
  misc_feature: SGI EST ID NO. CUFF.35530.0
  misc_feature: Variant of the nucleotide sequence at SEQ ID NO 14897
taagtcaacttcatctcaaattgaaaatcaagggatacattttgcacttttgaggttgatcgcgtttcgacgcatcatatacaaatagttgccgtctcccgacgttaatgaatggcctctttcctctcctcatctcataagcaattcactacagtcattcctttgcaacaccaaacaagagtccatcacgttcgagtacattcattcaaaacgccacttatttttcttctccatcaccaataagcaccatgcgttccgttctgatcacgatcctcgccgccacggccatcgcaatgcccatctcattcaatatccgtcaacttcctggccttggcagcgcgacctcgccactcaccaccgtcctatcggaggttggaaagcaagtcccatcttcaatgggcaaagttgaagatgctatcgactctcagaagaagaatagcacgcagccggccaacacgaaagccgcgagcggactgggtggactgactggccttctcggtggcctcactggcgggcttggaggaatctaggtgcattacgttatcttaattaataacgatctcaacaatttactaacatggttactcacagaaccgatcaatctcggcgctatttggtcaagtcacatgatatgatgaatcggatgtattcggtctaacgagatgcgttgaacgttcataattggtagaccgtggctcttcccaattagagccctgtgtattcagtatcccacggtgtaggaatatttgataaatggattcacatatgatgctctaaattccacgtgccattgccttcgatgtgaggtcaattttgctcacgcgacgattcctctgtcgatttgccatcacgtctgagcgtcaagacacccgagcgcggcgatcttatttctcatgaccgtgtccgtcgacgaactagcgaggtccagagatcttgtctcggatacaacgtcatcaagggtttctagggagtatattctgcctccgggcccgtagtgatggcgccgcacgcgcacagcacagacatgacccaaaagtgataggacggcttgtcggactgacccaaattgttgccgagccatcaatcggaactctagagagacggcggtactttctttgtgagtcatccttcatcacctcctttggtatgtccgatgggaaagattcgcttaagaaacaagtcctatcagtagacacacaacattcctagtacgattcggacgcggcgaaatacagtgtacgacgcaatagttgacgttcccgccagagccaggctcgtgcatacacaggtgcttgctgaccactatcgatctcatttcgatggcataggctccagtttctcctagcgagcgagacgttcggtctgacgatttcgaggggctggtgctcgatgaagcatcctgcgtgagatttaccgccaaaatcactcgaaatattgagcaatgacgttctgggctgatacctgaaggcggtaaataagtgtcatggggatagatttctttgacgtgccggtggcgggactctatctcgaccccggtcgttttccctctaaaatattgcattacagctgacaacatggtaaatgaccggtaggcgcttcatgttcagaaaagagtagctagttgtgctgagtcctctcatatcaaggcagctaagcagttgaagactaaaaccagccaactaaagtacctcgaagagtggaggctgctgtggtctcacatgtataggtacgcttagatacccggcgacaagtgaagatgttgggcgaatcgttcataataaggaaagtagcatcctatttctcttgttgaaatgattgaagatgattgtctcgttagattacagtgctcggtttcgataggcgcagatgccaagtgtctgcaaccatgttatctatcagcctagcagtgccgataacccctgctaagggcttccgcagcacagaatatttcgggtccatagtcgagatgaatatctagatttttcactccaaatcatgagaaacaagaacgtgcgcattgagaagatcacgaataaaagaacaatccgaattagggtcattttattatcgcaaacgagagccgcattgcacttgaaagcgtc

SEQ ID NO: 14900 - DNA, 1242 bp, Muscodor strobelii
  misc_feature: SGI cDNA ID NO. 564921
  misc_feature: Elevated expression when VOC is produced
  misc_feature: Encodes the peptide sequence at SEQ ID NO 14901
atgcagcgaccgccgcgtccgctgctggtcgtgcgcgccttgagtgctcaagcgatagccttttacttcagagcacccgctaaggctttcttccggatgcgcgtagactatctcgcctacgctagaaatgtgcatcaagctcagactgaattacttgcacgcgctgcggccagtgataaaactgcgtcccgtctgggtctcacaattcaacaggcatggcagtgggctcgaggaacgacgccaggtctcctcacatcggtgatccgccagcagggatggggagtcattccgcaacagatattgccgccgctcatggcgaatattggagttggcgctgttctgtacacaagctatttacaaatactcgggacccttcacgaggagagttcgaggtcttcgcggcgcgtgtttccaccaccagacccgattcacacgttcacagcagggttccttgcgggcagccttcaaagcgtcgtcgcggctcccttggatgcaatccaagcccgatatgatcaccgagacctcgttgctggaaacgggaacggtaagccgagaagtatatggtctttctcagcagaaaaattgcgagacattggcgttagaggcgtgttcgctggttggggtttatcatttctgaaggacagttttggtagtgccatctttttcagcacattcgagtacgtcaaggcgcaaggatattaccgcttcatcacatggtactacagcgggttaaatcaggacactattcatgtcctcgcacaaaagcgacctacttcgcaagatgacgataagcctatcatcattcgtccacattacgccatcgaaccgatgttcttattgctggcaggcattggggcatcatttacccagcaaatcttactccatcccctcacatatctccaagtcgagcattgggatcatctcgaagatctcgatgcgaaagcagcccaagtgaggaaagccactacagtcaacccaaacagacgacaacggaaatggagcatgcttcgtgcatactatcgtgcctacttagaaacctggcagcactgttcagcagaggctgctgcagacgggaaaggcatttggcgatggctctatcgcgggttttggtggaacacaatacgacaggtaccaagcacaagtgcaggcctgataatatttgagttagtgcgacgaaagtacggcaatcgggacgaacccgtccgtgtcgccaaagataattacgaaattcttcttgattga

SEQ ID NO: 14901 - protein, 413 aa, Muscodor strobelii
  misc_feature: SGI Peptide ID NO. 564921
  misc_feature (141)..(236): Pfam Id: PF00153 Pfam Desc: Mitochondrial carrier protein
  misc_feature (11)..(412): NCBI GI: 46110318 Blast Desc: FG02041.1 [Gibberella zeae PH-1]
  misc_feature (11)..(413): NCBI GI: 39977873 Blast Desc: MGG_06821 [Magnaporthe grisea 70-15] gi|145013624|gb|EDJ98265.1| MGG_06821 [Magnaporthe grisea 70-15]
  misc_feature (11)..(412): NCBI GI: 85093775 Blast Desc: NCU02337 [Neurospora crassa OR74A] gi|28921215|gb|EAA30527.1| conserved [Neurospora crassa OR74A] gi|40804604|emb|CAF05865.1| [Neurospora crassa]
  misc_feature (11)..(412): NCBI GI: 171681351 Blast Desc: protein product [Podospora anserina] gi|170940634|emb|CAP65862.1| protein product [Podospora anserina]
  misc_feature (11)..(412): NCBI GI: 116179462 Blast Desc: CHGG_00359 [Chaetomium globosum CBS 148.51] gi|88184656|gb|EAQ92124.1| CHGG_00359 [Chaetomium globosum CBS 148.51]
  misc_feature (69)..(413): NCBI GI: 261359751 Blast Desc: mitochondrial carrier protein [Verticillium albo-atrum VaMs.102]
  misc_feature (11)..(412): NCBI GI: 259484548 Blast Desc: TPA: mitochondrial carrier protein, (AFU_orthologue; AFUA_1G07710) [Aspergillus nidulans FGSC A4]
  misc_feature (11)..(413): NCBI GI: 238490097 Blast Desc: mitochondrial carrier protein, [Aspergillus flavus NRRL3357] gi|220698674|gb|EED55014.1| mitochondrial carrier protein, [Aspergillus flavus NRRL3357]
  misc_feature (11)..(412): NCBI GI: 239613561 Blast Desc: mitochondrial carrier protein [Ajellomyces dermatitidis ER-3]
  misc_feature (11)..(412): NCBI GI: 261192872 Blast Desc: mitochondrial carrier protein [Ajellomyces dermatitidis SLH14081] gi|239588977|gb|EEQ71620.1| mitochondrial carrier protein [Ajellomyces dermatitidis SLH14081]
  misc_feature: Useful for introducing or modulating the production of volatile compounds
MQRPPRPLLVVRALSAQAIAFYFRAPAKAFFRMRVDYLAYARNVHQAQTELLARAAASDKTASRLGLTIQQAWQWARGTTPGLLTSVIRQQGWGVIPQQILPPLMANIGVGAVLYTSYLQILGTLHEESSRSSRRVFPPPDPIHTFTAGFLAGSLQSVVAAPLDAIQARYDHRDLVAGNGNGKPRSIWSFSAEKLRDIGVRGVFAGWGLSFLKDSFGSAIFFSTFEYVKAQGYYRFITWYYSGLNQDTIHVLAQKRPTSQDDDKPIIIRPHYAIEPMFLLLAGIGASFTQQILLHPLTYLQVEHWDHLEDLDAKAAQVRKATTVNPNRRQRKWSMLRAYYRAYLETWQHCSAEAAADGKGIWRWLYRGFWWNTIRQVPSTSAGLIIFELVRRKYGNRDEPVRVAKDNYEILLD

SEQ ID NO: 14902 - DNA, 1503 bp, Muscodor strobelii
  misc_feature: SGI cDNA ID NO. 564922
  misc_feature: Encodes the peptide sequence at SEQ ID NO 14903
atgataaaagcggtcaacttcaagtcaacactctggaactatagtcgccgctccttctttacttgctcaacaacgaagccaaaccgccagaaacgcaaagtatcagaactgcagattctacccgagaagtttactcagccggaactacgagaccaggtcagcgcctcgggacggatattctgggatttcacaagcgctaggctccgcgaagtcacggatatgtctgaatataggcagcaagatggcgagagaatcattgtagatccaagttgcttgaattcagacgactcgaaaccatctggcctctcacgacacgacacgagattccccgacgttgaagaacaagtgatgcagggcagcggaagtaggaacgaaattgagcgtatgcccctgttcgtgacctcattcgcccgagtatatcggactagtgagcccccttcacgtttctggacacaacagtttggcgtcattgatcctgcctcgactccgacaaaacagatgacatatgtctgtcctccgcatatctgggggttctctctacgcaataggatttggcaaaaatacgaggtagggaacttgaggcctgtccagttccaagagaatgcctggtctcgcttagtcatcgatcaagagtacaaagatgtcgttcaagctatggttaatagccaactgaagaagtccggccattttgaagacattattaggggtaaaggaggcggtgtcgtcattctcttacatggcccgcccggggttggcaaaacgttgacagcagaatccgtagctgaaagtgtgaagaagccactctatatggtgactgctggtgacttgggcactgaccccgaacagctggaattgaagctatccgaaatcttccaatcagcggcaagatgggacgcaattcttctcttggacgaagcagacatatttttgcaagacagagattacgacaatcttacacggaacgcactggtgtcgatattcctgagaacactggaatatttccagggtatcatgttcctcaccagcaaccgtgtcggagtgtttgatcaagcttttcagtcgccaattcacgttactctcggcattcctgaatttgacgaagacacacgaaaagcagtttggaaaatattcatcacggacctcggacgcaaacgacgagatggatcggaacccctcctcagcgtagacgagtgcaaagcgcttggaagagaggtcctcaactcatgggctcgggagcctctcaatggccgacagatcaggaactgcgtgcgaagcgcactagctccagcagctgataaaaaggaaaaggtttccgccaagcatttcaatattgtaattcgtttaggcaatacgttcacaacgtatatgaataggttgcataagctccactcggatgaaattgcgcaggtgaaaggcgatcgattggctgaaatgagaggacttttggaaaagagcggcacaaatggcaatggtccaggcgacaaagaagcccaggggcattaa

SEQ ID NO: 14903 - protein, 500 aa, Muscodor strobelii
  misc_feature: SGI Peptide ID NO. 564922
  misc_feature (242)..(432): Pfam Id: PF00004 Pfam Desc: ATPase family associated with various cellular activities (AAA)
  misc_feature (242)..(371): Pfam Id: PF00004 Pfam Desc: ATPase family associated with various cellular activities (AAA)
  misc_feature (164)..(465): NCBI GI: 189209339 Blast Desc: conserved [Pyrenophora tritici-repentis Pt-1C-BFP] gi|187977095|gb|EDU43721.1| conserved [Pyrenophora tritici-repentis Pt-1C-BFP]
  misc_feature (34)..(482): NCBI GI: 46105200 Blast Desc: FG00228.1 [Gibberella zeae PH-1]
  misc_feature (156)..(452): NCBI GI: 145237308 Blast Desc: An07g02150 [Aspergillus niger] gi|134075769|emb|CAK39306.1| protein product [Aspergillus niger]
  misc_feature (91)..(452): NCBI GI: 238482701 Blast Desc: AAA family ATPase, [Aspergillus flavus NRRL3357] gi|220700639|gb|EED56977.1| AAA family ATPase, [Aspergillus flavus NRRL3357]
  misc_feature (164)..(459): NCBI GI: 119190819 Blast Desc: CIMG_05457 [Coccidioides immitis RS]
  misc_feature (164)..(459): NCBI GI: 240107320 Blast Desc: ATPase, AAA family protein [Coccidioides posadasii C735 delta SOWgp]
  misc_feature (91)..(452): NCBI GI: 169766068 Blast Desc: [Aspergillus oryzae RIB40] gi|83765360|dbj|BAE55503.1| protein product [Aspergillus oryzae]
  misc_feature (156)..(459): NCBI GI: 119482988 Blast Desc: NFIA_026990 [Neosartorya fischeri NRRL 181] gi|119409677|gb|EAW19625.1| NFIA_026990 [Neosartorya fischeri NRRL 181]
  misc_feature (158)..(459): NCBI GI: 212537109 Blast Desc: AAA family ATPase, [Penicillium marneffei ATCC 18224] gi|210068452|gb|EEA22543.1| AAA family ATPase, [Penicillium marneffei ATCC 18224]
  misc_feature (164)..(459): NCBI GI: 258565107 Blast Desc: conserved [Uncinocarpus reesii 1704] gi|237906999|gb|EEP81400.1| conserved [Uncinocarpus reesii 1704]
MIKAVNFKSTLWNYSRRSFFTCSTTKPNRQKRKVSELQILPEKFTQPELRDQVSASGRIFWDFTSARLREVTDMSEYRQQDGERIIVDPSCLNSDDSKPSGLSRHDTRFPDVEEQVMQGSGSRNEIERMPLFVTSFARVYRTSEPPSRFWTQQFGVIDPASTPTKQMTYVCPPHIWGFSLRNRIWQKYEVGNLRPVQFQENAWSRLVIDQEYKDVVQAMVNSQLKKSGHFEDIIRGKGGGVVILLHGPPGVGKTLTAESVAESVKKPLYMVTAGDLGTDPEQLELKLSEIFQSAARWDAILLLDEADIFLQDRDYDNLTRNALVSIFLRTLEYFQGIMFLTSNRVGVFDQAFQSPIHVTLGIPEFDEDTRKAVWKIFITDLGRKRRDGSEPLLSVDECKALGREVLNSWAREPLNGRQIRNCVRSALAPAADKKEKVSAKHFNIVIRLGNTFTTYMNRLHKLHSDEIAQVKGDRLAEMRGLLEKSGTNGNGPGDKEAQGH

SEQ ID NO: 14904 - DNA, 3520 bp, Muscodor strobelii
  misc_feature: SGI EST ID NO. CUFF.35537.0
  misc_feature: Variant of the nucleotide sequence at SEQ ID NO 14902
agggcgcagaagcgtatgatgaagcacggagtcataaaatctcctgtgcaaatacgattttggatatattagatagaaatttcgttgacgtcacaagaccttttgagtcttggaactccgacgcgtcgccagatactatattgtttcgagaactatggatgatatacaaacctggtactattgtattcgtcagactagaagatcagcctccgtttgcgttgagcatagatgatgttgaatatgcagcttctctttttgaagtaccagggccaaggatggggccaaaaggaccacaggttgcgaagaggggacccttcacatattcgagttcggatcatatatctgaaactgctcatccgttgttgatacgtgcctggggcttttgtcaccataagccagggtcgcactacgacgggaaatttggcctcaggacgtatttgattttcattaacccatttttcggtagacgcaaagtatcagaactgcagattctacccgagaagtttactcagccggaactacgagaccaggtcagcgcctcgggacggatattctgggatttcacaagcgctaggctccgcgaagtcacggatatgtctgaatataggcagcaagatggcgagagaatcattgtagatccaagttgcttgaattcagacgactcgaaaccatctggcctctcacgacacgacacgagattccccgacgttgaagaacaagtgatgcagggcagcggaagtaggaacgaaattgagcgtatgcccctgttcgtgacctcattcgcccgagtatatcggactagtgagcccccttcacgtttctggacacaacagtttggcgtcattgatcctgcctcgactccgacaaaacagatgacatatgtctgtcctccgcatatctgggggttctctctacgcaataggatttggcaaaaatacgaggtagggaacttgaggcctgtccagttccaagagaatgcctggtctcgcttagtcatcgatcaagagtacaaagatgtcgttcaagctatggttaatagccaactgaagaagtccggccattttgaagacattattaggggtaaaggaggcggtgtcgtcattctcttacatggcccgcccggggttggcaaaacgttgacagcagaatccgtagctgaaagtgtgaagaagccactctatatggtgactgctggtgacttgggcactgaccccgaacagctggaattgaagctatccgaaatcttccaatcagcggcaagatgggacgcaattcttctcttggacgaagcagacatatttttgcaagacagagattacgacaatcttacacggaacgcactggtgtcgatattcctgagaacactggaatatttccagggtatcatgttcctcaccagcaaccgtgtcggagtgtttgatcaagcttttcagtcgccaattcacgttactctcggcattcctgaatttgacgaagacacacgaaaagcagtttggaaaatattcatcacggacctcggacgcaaacgacgagatggatcggaacccctcctcagcgtagacgagtgcaaagcgcttggaagagaggtcctcaactcatgggctcgggagcctctcaatggccgacagatcaggaactgcgtgcgaagcgcactagctccagcagctgataaaaaggaaaaggtttccgccaagcatttcaatattgtaattcgtttaggcaatacgttcacaacgtatatgaataggttgcataagctccactcggatgaaattgcgcaggtgaaaggcgatcgattggctgaaatgagaggacttttggaaaagagcggcacaaatggcaatggtccaggcgacaaagaagcccaggggcattaatacttgaagaatcgcagtgccgcaataggtctgaggcgaatgataaagagtagatgatcttgtcttgggagtgtattcaaacatatacaagggagatttatctagtatctctacatatcagtataacaaagtctttgccctctaatacactgtgtatcatgaatctatcgacgcctcaacgccgtaatgctgtctcaatcaagaagaatttcgtaattatctttggcgacacggacgggttcgtcccgattgccgtactttcgtcgcactaactcaaatattatcaggcctgcacttgtgcttggtacctgtcgtattgtgttccaccaaaacccgcgatagagccatcgccaaatgcctttcccgtctgcagcagcctctgctgaacagtgctgccaggtttctaagtaggcacgatagtatgcacgaagcatgctccatttccgttgtcgtctgtttgggttgactgtagtggctttcctcacttgggctgctttcgcatcgagatcttcgagatgatcccaatgctcgacttggagatatgtgaggggatggagtaagatttgctgggtaaatgatgccccaatgcctgccagcaataagaacatcggttcgatggcgtaatgtggacgaatgatgataggcttatcgtcatcttgcgaagtaggtcgcttttgtgcgaggacatgaatagtgtcctgatttaacccgctgtagtaccatgtgatgaagcggtaatatccttgcgccttgacgtactcgaatgtgctgaaaaagatggcactaccaaaactgtccttcagaaatgataaaccccaaccagcgaacacgcctctaacgccaatgtctcgcaatttttctgctgagaaagaccatatacttctcggcttaccgttcccgtttccagcaacgaggtctcggtgatcatatcgggcttggattgcatccaagggagccgcgacgacgctttgaaggctgcccgcaaggaaccctgctgtgaacgtgtgaatcgggtctggtggtggaaacacgcgccgcgaagacctcgaactctcctcgtgaagggtcccgagtatttgtaaatagcttgtgtacagaacagcgccaactccaatattcgccatgagcggcggcaatatctgttgcggaatgactccccatccctgctggcggatcaccgatgtgaggagacctggcgtcgttcctcgagcccactgccatgcctgttgaattgtgagacccagacgggacgcagttttatcactggccgcagcgcgtgcaagtaattcagtctgagcttgatgcacatttctagcgtaggcgagatagtctacgcgcatccggaagaaagccttagcgggtgctctgaagtaaaaggctatcgcttgagcactcaaggcgcgcacgaccagcagcggacgcggcggtcgctgcattgttccttgactgcttctccaaggccccgtcaggtggaatcacaggtaggacaccacggtagacggtgtccccacgtgggccggttgaatcatcgcggcctgagggcattatctctccatatcattttggattttctgttcttttgatgcttggtcgtaggcggtacagaagagatacctcaaatacggaacttggtattcagcctg

SEQ ID NO: 14905 - DNA, 1320 bp, Muscodor strobelii
  misc_feature: SGI cDNA ID NO. 564923
  misc_feature: Encodes the peptide sequence at SEQ ID NO 14906
atggcattcctgcagaccatttgcggaagctcgtcgtcgagcactcgtgacttagcgggtgattggtcccgagctctagcaagtcaatccaccgttgttcacggctttgatagccttcgacacgcggtacgcaattacaacttagaagcctccaaagacaagcgcgatgtcatcgaaatagaagccgccaatttagagacaacgagcgaaagtgccgagagtcttctgatggcatccagcccatctacttcgaactcgaaaatggcagaaaagattaggcatggcttgcagaaattttgcgagacgtctctttactattcagctattgtagacacgttcattcagcatcatccggagtggacggccttggcttggggtgcaatcaaattcctgatcattgtgcccgttgaataccaacgcgtcaaggagaagattactttacacttgggaagtctgggtgagaagttcaagattgtacacatttttgttcagtttttcccaagtataaccatcgtcaaagcggccagcgcgatgtacgccgcattcgcgcagttcctggaaaagtcaattgcatggcttaaatcgagtcaattgaaacgaataatcaaagcaactcttcaaccatacgataccagccttaagccgatacttgactcaattgatcaagcttatgcgacgttgaaagagcaagttgaggtacataagttcttgagagatactgggctttctcatcaaattgcacaaaatgtagcatctttacaatcatttgctgtcgatacgagagaagagatgagcagaatgcgcgacatgcttcaagcccgaagagacttagaaccggtaaagccagatctacaggcaccgtcacactcaagtttagccaaagtcaagaataaagtcatgactttaccagagtttaatacccgaaaaacatatttgagcgacgctgtcccccttgaccatgatttagagactatgaggatccgtcaggctatcttacccgtggtgcaacacaacgagcgtcttcagattctaaatcgagaagatttctctcggtggatcgctatgcctcagtcaggtatcctgtggattgatggattcagccttatcggcagacgagagcagattttaaacaagctcgacattgacgatttcgaccccgaaaatgaagatgaaatggaatccacaggtctcacaagcggggtggagcgtggacttggagacctcgatatctacgatcagactctccacgaagctcccgagattcctttgatatctacgaatgaaccggaaaagaccaaagatctgggcaacaacgattag

SEQ ID NO: 14906 - protein, 439 aa, Muscodor strobelii
  misc_feature: SGI Peptide ID NO. 564923
  misc_feature (96)..(233): NCBI GI: 256726536 Blast Desc: NECHADRAFT_39343 [Nectria haematococca mpVI 77-13-4]
  misc_feature (105)..(275): NCBI GI: 115449839 Blast Desc: [Aspergillus terreus NIH2624] gi|114187658|gb|EAU29358.1| [Aspergillus terreus NIH2624]
  misc_feature (86)..(229): NCBI GI: 169604254 Blast Desc: SNOG_05138 [Phaeosphaeria nodorum SN15] gi|160706528|gb|EAT87529.2| SNOG_05138 [Phaeosphaeria nodorum SN15]
  misc_feature (6)..(313): NCBI GI: 145609736 Blast Desc: MGG_03034 [Magnaporthe grisea 70-15] gi|145017126|gb|EDK01489.1| MGG_03034 [Magnaporthe grisea 70-15]
  misc_feature (104)..(244): NCBI GI: 189205346 Blast Desc: conserved [Pyrenophora tritici-repentis Pt-1C-BFP] gi|187986107|gb|EDU51595.1| conserved [Pyrenophora tritici-repentis Pt-1C-BFP]
  misc_feature (8)..(313): NCBI GI: 149210699 Blast Desc: MGCH7_ch7g822 [Magnaporthe grisea 70-15] gi|86196777|gb|EAQ71415.1| MGCH7_ch7g822 [Magnaporthe grisea 70-15]
  misc_feature (49)..(384): NCBI GI: 119482337 Blast Desc: NFIA_092610 [Neosartorya fischeri NRRL 181] gi|119409351|gb|EAW19300.1| conserved [Neosartorya fischeri NRRL 181]
  misc_feature (110)..(241): NCBI GI: 171685450 Blast Desc: protein product [Podospora anserina] gi|170942686|emb|CAP68339.1| protein product [Podospora anserina]
  misc_feature (28)..(287): NCBI GI: 116182820 Blast Desc: [Chaetomium globosum CBS 148.51] gi|88186335|gb|EAQ93803.1| [Chaetomium globosum CBS 148.51]
  misc_feature (70)..(217): NCBI GI: 71002752 Blast Desc: NACHT domain protein [Aspergillus fumigatus Af293] gi|66853695|gb|EAL94019.1| NACHT domain protein [Aspergillus fumigatus Af293]
MAFLQTICGSSSSSTRDLAGDWSRALASQSTVVHGFDSLRHAVRNYNLEASKDKRDVIEIEAANLETTSESAESLLMASSPSTSNSKMAEKIRHGLQKFCETSLYYSAIVDTFIQHHPEWTALAWGAIKFLIIVPVEYQRVKEKITLHLGSLGEKFKIVHIFVQFFPSITIVKAASAMYAAFAQFLEKSIAWLKSSQLKRIIKATLQPYDTSLKPILDSIDQAYATLKEQVEVHKFLRDTGLSHQIAQNVASLQSFAVDTREEMSRMRDMLQARRDLEPVKPDLQAPSHSSLAKVKNKVMTLPEFNTRKTYLSDAVPLDHDLETMRIRQAILPVVQHNERLQILNREDFSRWIAMPQSGILWIDGFSLIGRREQILNKLDIDDFDPENEDEMESTGLTSGVERGLGDLDIYDQTLHEAPEIPLISTNEPEKTKDLGNND

SEQ ID NO: 14907 - DNA, 872 bp, Muscodor strobelii
  misc_feature: SGI EST ID NO. CUFF.35548.0
  misc_feature: Variant of the nucleotide sequence at SEQ ID NO 14905
ttggcttggggtgcaatcaaattcctgatcattgtgcccgttgaataccaacgcgtcaaggagaagattactttacacttgggaagtctgggtgagaagttcaagattgtacacatttttgttcagtttttcccaagtataaccatcgtcaaagcggccagcgcgatgtacgccgcattcgcgcagttcctggaaaagtcaattgcatggcttaaatcgagtcaattgaaacgaataatcaaagcaactcttcaaccatacgataccagccttaagccgatacttgactcaattgatcaagcttatgcgacgttgaaagagcaagttgaggtacataagttcttgagagatactgggctttctcatcaaattgcacaaaatgtagcatctttacaatcatttgctgtcgatacgagagaagagatgagcagaatgcgcgacatgcttcaagtcctatgctcagcccgaagagacttagaaccggtaaagccagatctacaggcaccgtcacactcaagtttagccaaagtcaagaataaagtcatgactttaccagagtttaatacccgaaaaacatatttgagcgacgctgtcccccttgaccatgatttagagactatgaggatccgtcaggctatcttacccgtggtgcaacacaacgagcgtcttcagattctaaatcgagaagatttctctcggtggatcgctatgcctcagtcaggtatcctgtggattgatgggtatgagcttcccggtcgcggcagttggatggcagagtttgcattgagtattgcgcatgcatctcttctttccggatacgagaccttatactcttttaatgctgctcaacacgatactcggcatgcttacgc

SEQ ID NO: 14908 - DNA, 1938 bp, Muscodor strobelii
  misc_feature: SGI cDNA ID NO. 564924
  misc_feature: Encodes the peptide sequence at SEQ ID NO 14909
atgaagcgactaaaggccttcttctcgagcctagatggtcacgacgaactagtgacaggcccatacgagtataccccgctctcagacccctcgaacacgttccgcctcctccgcttacagcgcggccttcgcgacgtcgagacaggatggagtggcctgcggttgcgaggtacgctatttgaggcgccgctggacgcaccgcccgagtacttcgcgctctcttacacatggggcgacgcatcggtgctcagtgatgagattgtgcttgacggaggtcgcatatgcccgataacggcgagttgcgctgcggcacttcgtcgcatgttgcgaggcaaaacatcccggattgtatgggttgactccgtctgcataaaccaggccgacacgcctgcggctctcgcggagcgcggctgtcaggttgccgctatggatcgcatctatcgccaggctgtccaagtcaatgtgcacctaggcgaaggcgatgcggcgtcggacgttgcctgcgagacgctaaaaggtcttgcgtcggcgtacctacttgcgaaaataccagggccgcttcaagactcaggccggaggaaatacgaggcattagcagacgacgctttacgactgagtccagagtacccctatggaaaattacacggattcttcagacgaccgtggtttagacgtacatgggtattacaagaggtcgcacttgcacaaaaagtcatgttctactgcggcgaatacatgatacgcctcgagctgattgtggcgggcgctgatttcacgaggcttccatactccaagcttgacgcttctgctggacactggcgatcttatctggaatggcacgatacattgaaagagctcattcaacgaaaggagaagggtgaaacgctatcgaacgtcggcctatcgctctctggcgtattactactgtcggctatggtgctcgaagcgactaggccggaggataaggtctttgggatgtacggcatctgcaagaggcttggctacggattgcccgcaccggactactcgaagcccctcactcagacttacactgaagcggccatagcaatcattcatcatgatcagaacctcgagttattatcgaccgtaatcgagtcgcaagcttggtcagacggcctgccgtcatgggtaccgaactttgccggtgtttcgcgtcgatggagcccttcagatccgccacacgtgcagactagcattaagcaagatccagcagtgtcgggcttcagcaaatgtgaatttgttcttgatgcccatcttcgaagcttgaaagtgaagggacgtcgggtagatagaatcagtacagtcggaaacccctggatacaggatcatacccagaccatgctaggggatgctccagaggccctatggtcgggggaagattttatcagtgccttcggaagctggctgaacattgtgagagatcgcgaggacagaccctctggtagatatgccatcgaactggtggtgcgagtaatagcagacgcagatagagcattgaggagccagcccttggtagctcttgagcagaaagtgagatgcgcatctgtattgttgacgctgtttggttgggatggaggcggcttgccttacaaggatatcacggatttacctggcagtaatgatttctcccaggaacatggcgagcgccgcattttccagaatgctttctcaccgttagcgggtgcaggctggaagacattgttccggtctgtatgcggctatatcgggctcggcacacatagtgttaaggtcgatgatctggtagtcgtgatccatggctgtccatttgctgccctcatccgtccttgggagtctgggttcaagtacgtaggtgcagcttgtgtgggtgaaatcatggatggtagcttttggaacgatgggtcagctgccgacgatgaatggttcgaactggtttga

SEQ ID NO: 14909 - protein, 645 aa, Muscodor strobelii
  misc_feature: SGI Peptide ID NO. 564924
  misc_feature (70)..(231): Pfam Id: PF06985 Pfam Desc: Heterokaryon incompatibility protein (HET)
  misc_feature (70)..(165): Pfam Id: PF06985 Pfam Desc: Heterokaryon incompatibility protein (HET)
  misc_feature (22)..(395): NCBI GI: 256722982 Blast Desc: NECHADRAFT_86908 [Nectria haematococca mpVI 77-13-4]
  misc_feature (14)..(408): NCBI GI: 46129272 Blast Desc: FG08821.1 [Gibberella zeae PH-1]
  misc_feature (46)..(449): NCBI GI: 256721216 Blast Desc: NECHADRAFT_101059 [Nectria haematococca mpVI 77-13-4]
  misc_feature (67)..(640): NCBI GI: 256724990 Blast Desc: NECHADRAFT_77031 [Nectria haematococca mpVI 77-13-4]
  misc_feature (31)..(622): NCBI GI: 145245067 Blast Desc: An11g08370 [Aspergillus niger] gi|134079496|emb|CAK46028.1| protein product [Aspergillus niger]
  misc_feature (25)..(633): NCBI GI: 168042194 Blast Desc: [Physcomitrella patens subsp. patens] gi|162675113|gb|EDQ61612.1| [Physcomitrella patens subsp. patens]
  misc_feature (22)..(645): NCBI GI: 256724356 Blast Desc: NECHADRAFT_87552 [Nectria haematococca mpVI 77-13-4]
  misc_feature (16)..(407): NCBI GI: 256728561 Blast Desc: NECHADRAFT_85980 [Nectria haematococca mpVI 77-13-4]
  misc_feature (22)..(636): NCBI GI: 171690382 Blast Desc: protein product [Podospora anserina] gi|170945139|emb|CAP71250.1| protein product [Podospora anserina]
  misc_feature (22)..(387): NCBI GI: 171691096 Blast Desc: protein product [Podospora anserina] gi|170945496|emb|CAP71608.1| protein product [Podospora anserina]
MKRLKAFFSSLDGHDELVTGPYEYTPLSDPSNTFRLLRLQRGLRDVETGWSGLRLRGTLFEAPLDAPPEYFALSYTWGDASVLSDEIVLDGGRICPITASCAAALRRMLRGKTSRIVWVDSVCINQADTPAALAERGCQVAAMDRIYRQAVQVNVHLGEGDAASDVACETLKGLASAYLLAKIPGPLQDSGRRKYEALADDALRLSPEYPYGKLHGFFRRPWFRRTWVLQEVALAQKVMFYCGEYMIRLELIVAGADFTRLPYSKLDASAGHWRSYLEWHDTLKELIQRKEKGETLSNVGLSLSGVLLLSAMVLEATRPEDKVFGMYGICKRLGYGLPAPDYSKPLTQTYTEAAIAIIHHDQNLELLSTVIESQAWSDGLPSWVPNFAGVSRRWSPSDPPHVQTSIKQDPAVSGFSKCEFVLDAHLRSLKVKGRRVDRISTVGNPWIQDHTQTMLGDAPEALWSGEDFISAFGSWLNIVRDREDRPSGRYAIELVVRVIADADRALRSQPLVALEQKVRCASVLLTLFGWDGGGLPYKDITDLPGSNDFSQEHGERRIFQNAFSPLAGAGWKTLFRSVCGYIGLGTHSVKVDDLVVVIHGCPFAALIRPWESGFKYVGAACVGEIMDGSFWNDGSAADDEWFELV

SEQ ID NO: 14910 - DNA, 1759 bp, Muscodor strobelii
  misc_feature: SGI EST ID NO. CUFF.35581.0
  misc_feature: Variant of the nucleotide sequence at SEQ ID NO 14908
tgcgagacgctaaaaggtcttgcgtcggcgtacctacttgcgaaaataccagggccgcttcaagactcaggccggaggaaatacgaggcattagcagacgacgctttacgactgagtccagagtacccctatggaaaattacacggattcttcagacgaccgtggtttagacgtacatgggtattacaagaggtcgcacttgcacaaaaagtcatgttctactgcggcgaatacatgatacgcctcgagctgattgtggcgggcgctgatttcacgaggcttccatactccaagcttgacgcttctgctggacactggcgatcttatctggaatggcacgatacattgaaagagctcattcaacgaaaggagaagggtgaaacgctatcgaacgtcggcctatcgctctctggcgtattactactgtcggctatggtgctcgaagcgactaggccggaggataaggtctttgggatgtacggcatctgcaagaggcttggctacggattgcccgcaccggactactcgaagcccctcactcagacttacactgaagcggccatagcaatcattcatcatgatcagaacctcgagttattatcgaccgtaatcgagtcgcaagcttggtcagacggcctgccgtcatgggtaccgaactttgccggtgtttcgcgtcgatggagcccttcagatccgccacacgtgcagactagcattaagcaagatccagcagtgtcgggcttcagcaaatgtgaatttgttcttgatgcccatcttcgaagcttgaaagtgaagggacgtcgggtagatagaatcagtacagtcggaaacccctggatacaggatcatacccagaccatgctaggggatgctccagaggccctatggtcgggggaagattttatcagtgccttcggaagctggctgaacattgtgagagatcgcgaggacagaccctctggtagatatgccatcgaactggtggtgcgagtaatagcagacgcagatagagcattgaggagccagcccttggtagctcttgagcagaaagtgagatgcgcatctgtattgttgacgctgtttggttgggatggaggcggcttgccttacaaggatatcacggatttacctggcagtaatgatttctcccaggaacatggcgagcgccgcattttccagaatgctttctcaccgttagcgggtgcaggctggaagacattgttccggtctgtatgcggctatatcgggctcggcacacatagtgttaaggtcgatgatctggtagtcgtgatccatggctgtccatttgctgccctcatccgtccttgggagtctgggttcaagtacgtaggtgcagcttgtgtgggtgaaatcatggatggtagcttttggaacgatgggtcagctgccgacgatgaatggttcgaactggtttgattggagccaatagtgttgcagccatcgaaagcattgccattgtagatagcatatcacgtgctgaagacacataacatgatggacaggtcaaaggcaatgcttgtggtatcccattgggggactcttcatcattcaatatataatgtcagtaaataattagtaatcatattcctcaacgccttatatgcttcctatcatgcaggtgttattgatacatgtctacgcccaagcagcctctagcattatcgttcaccctataggtaggacgtttacttcgttcttaagaaaggatgagcttccgtattcagaacatctaccgata

SEQ ID NO: 14911 - DNA, 1638 bp, Muscodor strobelii
  misc_feature: SGI cDNA ID NO. 564925
  misc_feature: Elevated expression when VOC is produced
  misc_feature: Encodes the peptide sequence at SEQ ID NO 14912
atgaacgatgacttcaaacctctcataccaagtagggctagttttgattggagccaggtaccggcgcggggacttcccgcagaaattacgtctttaccaaaacgcagttggctgtcacggaaactgccctctattcaagccaagttctccactggacatccagcatatgagaacctcagggaatggagacggcgcgaggtaaagaaggtattcgtcaatgattgggaggcttataagagatatgcttggctgaaagacgcgctcaagccgatctccggcagcttccgggaccaattctctggctgggctgcaacacttgttgattcgcttgacactttgtggatcatggggctccggcacacgttcgatgaagccgttgacgccgcatccaagatcgatttcggcgcgtcgagctctcaccaagtgaacacctttgaaaccaatatcagatacttgggtggtctgcttgcggcgtacgatctcagtaaacgtgaaactttgctacagaaagcaactgagctcggcgatctactatatgtggcttttaatacgaacaaccgtctcccagtagatttcatcaacgttccaaaagcaaaggaggggtcgagactagttctggagcgcaccgttgtttcggcttcgccaggaacactatccctggagcttactcgcttgtcccagctgacgggcgatccaaaatattacgacgctatcgatagaatcatgaatctttttcacgaaggtcagaataagaccgttcttcccggtctgtggccgatgatggtctctatgaatgatgcggatgtggtcggaggtaatcagtttacgcttgctggttgtgccgatagcttgtatgaatatcttccgaaaatgcacgctctccttgatggaatagagccgaagtacgaagaaatgagcgtgagcttcttagaagctgcgaagaagctactgttcagaccgatgatccccggaaacgaacgtattcttatggcgagcagtgcttgggtggaaaacaacggccaggtcaagctggatcaagaatcggaacacttagggtgttatctcggaggagtctacgcccttgctggtaaacttcatggcaacaaggagtatattaacattggtgcgaagctcactagcggatgtgtatatgcctatcggtcatttcctacaggaataatgcctgaacgacttaatatggtagcatgcaagtctttcgaagattgcgaatgggacgcagaaaccttcgagctggagaagaaaaagcagaaggaagcaaaggatcatctcccaccaggtttcactacagcaaaagatcctcgatatctacttagacctgaggccatcgagagcgtgttcgtcatgtatcgcataactgggaaccctatatggcaggaacttgggtgggaaatgttcgagtccattgtcaaaggcacaagaacaccattaggaacccacgcctcagtgaacgatgtcactcgcgcgatgagaattctgcctaaggatgattatatggagagtttctggttcgcagagacactcaagtatttttatctgctattttgtccgccggatataatcagtctagatgactatgttctgaatacggaagctcatcctttcttaagaacgaagtaa

SEQ ID NO: 14912 - protein, 545 aa, Muscodor strobelii
  misc_feature: SGI Peptide ID NO. 564925
  misc_feature (70)..(543): Pfam Id: PF01532 Pfam Desc: Glycosyl hydrolase family 47
  misc_feature (70)..(396): Pfam Id: PF01532 Pfam Desc: Glycosyl hydrolase family 47
  misc_feature (442)..(543): Pfam Id: PF01532 Pfam Desc: Glycosyl hydrolase family 47
  misc_feature (8)..(545): NCBI GI: 169607329 Blast Desc: SNOG_06721 [Phaeosphaeria nodorum SN15] gi|111064252|gb|EAT85372.1| SNOG_06721 [Phaeosphaeria nodorum SN15]
  misc_feature (7)..(542): NCBI GI: 116200504 Blast Desc: CHGG_10797 [Chaetomium globosum CBS 148.51] gi|88175511|gb|EAQ82979.1| CHGG_10797 [Chaetomium globosum CBS 148.51]
  misc_feature (72)..(543): NCBI GI: 171676352 Blast Desc: protein product [Podospora anserina] gi|170936242|emb|CAP60901.1| protein product [Podospora anserina]
  misc_feature (8)..(543): NCBI GI: 256734566 Blast Desc: NECHADRAFT_90164 [Nectria haematococca mpVI 77-13-4]
  misc_feature (8)..(543): NCBI GI: 46122819 Blast Desc: FG05787.1 [Gibberella zeae PH-1]
  misc_feature (17)..(545): NCBI GI: 119474483 Blast Desc: glycosyl hydrolase family 47 protein [Neosartorya fischeri NRRL 181] gi|119407270|gb|EAW17220.1| glycosyl hydrolase family 47 protein [Neosartorya fischeri NRRL 181]
  misc_feature (12)..(543): NCBI GI: 261361297 Blast Desc: endoplasmic reticulum mannosyl-oligosaccharide 1,2-alpha-mannosidase [Verticillium albo-atrum VaMs.102]
  misc_feature (17)..(544): NCBI GI: 258567080 Blast Desc: conserved [Uncinocarpus reesii 1704] gi|237905730|gb|EEP80131.1| conserved [Uncinocarpus reesii 1704]
  misc_feature (11)..(506): NCBI GI: 85091588 Blast Desc: NCU09028 [Neurospora crassa OR74A] gi|28920369|gb|EAA29739.1| [Neurospora crassa OR74A]
  misc_feature (2)..(544): NCBI GI: 240106928 Blast Desc: endoplasmic reticulum mannosyl-oligosaccharide 1,2-alpha-mannosidase, [Coccidioides posadasii C735 delta SOWgp]
  misc_feature (10)..(541): SWISSPROT Homolog: EC 3.2.1.113 Mannosyl-oligosaccharide 1,2-alpha-mannosidase
  misc_feature: Useful for introducing or modulating the production of volatile compounds
MNDDFKPLIPSRASFDWSQVPARGLPAEITSLPKRSWLSRKLPSIQAKFSTGHPAYENLREWRRREVKKVFVNDWEAYKRYAWLKDALKPISGSFRDQFSGWAATLVDSLDTLWIMGLRHTFDEAVDAASKIDFGASSSHQVNTFETNIRYLGGLLAAYDLSKRETLLQKATELGDLLYVAFNTNNRLPVDFINVPKAKEGSRLVLERTVVSASPGTLSLELTRLSQLTGDPKYYDAIDRIMNLFHEGQNKTVLPGLWPMMVSMNDADVVGGNQFTLAGCADSLYEYLPKMHALLDGIEPKYEEMSVSFLEAAKKLLFRPMIPGNERILMASSAWVENNGQVKLDQESEHLGCYLGGVYALAGKLHGNKEYINIGAKLTSGCVYAYRSFPTGIMPERLNMVACKSFEDCEWDAETFELEKKKQKEAKDHLPPGFTTAKDPRYLLRPEAIESVFVMYRITGNPIWQELGWEMFESIVKGTRTPLGTHASVNDVTRAMRILPKDDYMESFWFAETLKYFYLLFCPPDIISLDDYVLNTEAHPFLRTK

SEQ ID NO: 14913 - DNA, 3991 bp, Muscodor strobelii
  misc_feature: SGI EST ID NO. CUFF.35582.1
  misc_feature: Variant of the nucleotide sequence at SEQ ID NO 14911
agttcgggagatttccgttggcccacttgccaaatgcaggtagcgacctcgaaatgagggtgccaaggggcgcgtctgtcctcaaagtctccttgccaaggaacatccccatgtaacggcgtgtctctgcatggcgcaaaccttacgttattgccgcttgccgtttctctctcctttgaggaaccgatgaactgtacgtaatgtgaaaaactaaaatgcctcattcgaacgacatgcatcacaaaatatgtcctccacgcgtggcgccattgaatttcattggcataaccaggtgctgttgggtggcttatgcttagagattttgccaacgccaagccgatggccaagatctaacaagaatctgacaaacggcagcgcctagatgagcgaccgcgtctagccaacgtccagccgcagatcaaactaccgaacgctaggcacgtgagaacaagtcaacttctcctctccgtgcatggcgggaggtagaataatctgcatttccccggatcatttcatcggtaggacattttaattgtcgtctcataactcattcattcttcgcttgtcgcctgtcttctacggtattaacatattcacctgcttttacataatatgagcgccgctattctttgcggttgataatagtgggattcaaatccccgtctctatccttcattgctaagccaagtgctacttcactccaatatgtatcattatttgagccagaatcgaaacacactaatccttctggtcgggcttctagtgctatgttggacactagcagcacgctttcgagatgacactctatcggagttcaagaccttagagcggcatatgaacgatgacttcaaacctctcataccaagtagggctagttttgattggagccaggtaccggcgcggggacttcccgcagaaattacgtctttaccaaaacgcagttggctgtcacggaaactgccctctattcaagccaagttctccactggacatccagcatatgagaacctcagggaatggagacggcgcgaggtaaagaaggtattcgtcaatgattgggaggcttataagagatatgcttggctgaaagacgcgctcaagccgatctccggcagcttccgggaccaattctctggctgggctgcaacacttgttgattcgcttgacactttgtggatcatggggctccggcacacgttcgatgaagccgttgacgccgcatccaagatcgatttcggcgcgtcgagctctcaccaagtgaacacctttgaaaccaatatcagatacttgggtggtctgcttgcggcgtacgatctcagtaaacgtgaaactttgctacagaaagcaactgagctcggcgatctactatatgtggcttttaatacgaacaaccgtctcccagtagatttcatcaacgttccaaaagcaaaggaggggtcgagactagttctggagcgcaccgttgtttcggcttcgccaggaacactatccctggagcttactcgcttgtcccagctgacgggcgatccaaaatattacgacgctatcgatagaatcatgaatctttttcacgaaggtcagaataagaccgttcttcccggtctgtggccgatgatggtctctatgaatgatgcggatgtggtcggaggtaatcagtttacgcttgctggttgtgccgatagcttgtatgaatatcttccgaaaatgcacgctctccttgatggaatagagccgaagtacgaagaaatgagcgtgagcttcttagaagctgcgaagaagctactgttcagaccgatgatccccggaaacgaacgtattcttatggcgagcagtgcttgggtggaaaacaacggccaggtcaagctggatcaagaatcggaacacttagggtgttatctcggaggagtctacgcccttgctggtaaacttcatggcaacaaggagtatattaacattggtgcgaagctcactagcggatgtgtatatgcctatcggtcatttcctacaggaataatgcctgaacgacttaatatggtagcatgcaagtctttcgaagattgcgaatgggacgcagaaaccttcgagctggagaagaaaaagcagaaggaagcaaaggatcatctcccaccaggtttcactacagcaaaagatcctcgatatctacttagacctgaggccatcgagagcgtgttcgtcatgtatcgcataactgggaaccctatatggcaggaacttgggtgggaaatgttcgagtccattgtcaaaggcacaagaacaccattaggaacccacgcctcagtgaacgatgtcactcgcgcgatgagaattctgcctaaggatgattatatggagagtttctggttcgcagagacactcaagtatttttatctgctattttgtccgccggatataatcagtctagatgactatgttctgaatacggaagctcatcctttcttaagaacgaagtaaacgtcctacctatagggtgaacgataatgctagaggctgcttgggcgtagacatgtatcaataacacctgcatgataggaagcatataaggcgttgaggaatatgattactaattatttactgacattatatattgaatgatgaagagtcccccaatgggataccacaagcattgcctttgacctgtccatcatgttatgtgtcttcagcacgtgatatgctatctacaatggcaatgctttcgatggctgcaacactattggctccaatcaaaccagttcgaaccattcatcgtcggcagctgacccatcgttccaaaagctaccatccatgatttcacccacacaagctgcacctacgtacttgaacccagactcccaaggacggatgagggcagcaaatggacagccatggatcacgactaccagatcatcgaccttaacactatgtgtgccgagcccgatatagccgcatacagaccggaacaatgtcttccagcctgcacccgctaacggtgagaaagcattctggaaaatgcggcgctcgccatgttcctgggagaaatcattactgccaggtaaatccgtgatatccttgtaaggcaagccgcctccatcccaaccaaacagcgtcaacaatacagatgcgcatctcactttctgctcaagagctaccaagggctggctcctcaatgctctatctgcgtctgctattactcgcaccaccagttcgatggcatatctaccagagggtctgtcctcgcgatctctcacaatgttcagccagcttccgaaggcactgataaaatcttcccccgaccatagggcctctggagcatcccctagcatggtctgggtatgatcctgtatccaggggtttccgactgtactgattctatctacccgacgtcccttcactttcaagcttcgaagatgggcatcaagaacaaattcacatttgctgaagcccgacactgctggatcttgcttaatgctagtctgcacgtgtggcggatctgaagggctccatcgacgcgaaacaccggcaaagttcggtacccatgacggcaggccgtctgaccaagcttgcgactcgattacggtcgataataactcgaggttctgatcatgatgaatgattgctatggccgcttcagtgtaagtctgagtgaggggcttcgagtagtccggtgcgggcaatccgtagccaagcctcttgcagatgccgtacatcccaaagaccttatcctccggcctagtcgcttcgagcaccatagccgacagtagtaatacgccagagagcgataggccgacgttcgatagcgtttcacccttctcctttcgttgaatgagctctttcaatgtatcgtgccattccagataagatcgccagtgtccagcagaagcgtcaagcttggagtatggaagcctcgtgaaatcagcgcccgccacaatcagctcgaggcgtatcatgtattcgccgcagtagaacatgactttttgtgcaagtgcgacctctt

SEQ ID NO: 14914 - DNA, 303 bp, Muscodor strobelii
  misc_feature: SGI cDNA ID NO. 564926
  misc_feature: Encodes the peptide sequence at SEQ ID NO 14915
atgcagttctctgccgtcgtcgctctattcctgcccgttgtggccgccaatcttcaggcgacgaccaccaccagcagcgttgcacccaccagcacagcagatctcgaggctatctgcgagtcgcaagcgggtccttacgcggacgactgcccgcgctgcctctctagatgcgccaccagtactgacgttgaggactgctactacagcactttcttcaccatcaatggtatccaagccgactgcgaggcacatggcggcaacaactgcgagggatacgctcttgaccaggtctgccctcagtag

SEQ ID NO: 14915 - protein, 100 aa, Muscodor strobelii
  misc_feature: SGI Peptide ID NO. 564926
MQFSAVVALFLPVVAANLQATTTTSSVAPTSTADLEAICESQAGPYADDCPRCLSRCATSTDVEDCYYSTFFTINGIQADCEAHGGNNCEGYALDQVCPQ

SEQ ID NO: 14916 - DNA, 920 bp, Muscodor strobelii
  misc_feature: SGI EST ID NO. CUFF.35569.1
  misc_feature: Variant of the nucleotide sequence at SEQ ID NO 14914
catccccttgctaggtgagggtctggactaggcacccgcagggtctaagggtctcaccgacgttaactgctctaatctacccacatattacttgcattagggatgaattttagcgcatatggtacacaatcctgacaattaaactccgtacaagctttgacaccttacgaggatccacgatgctattcgtagaagccatattgagagcaattctgtaatatcgtaaagcgtacaggcagccatctggtgcctaggtatgccgcaaggatgtcgatagtggaagaccgaagatcccaatataaatagtgttgacgttcgcccttgaaccgaatttgcaaacatcgacagccagcatccctcgaagcacatctttgttcgacacctaacaaaatcatctcttccatccagcgaaatgcagttctctgccgtcgtcgctctattcctgcccgttgtggccgccaatcttcaggcgacgaccaccaccagcagcgttgcacccaccagcacagcagatctcgaggctatctgcgagtcgcaagcgggtccttacgcggacgactgcccgcgctgcctctctagatgcgccaccagtactgacgttgaggactgctactacagcactttcttcaccatcaatggtatccaagccgactgcgaggcacatggcggcaacaactgcgagggatacgctcttgaccaggtctgccctcagtagctgttatgaacaatatcgccgtgcttaaggccccgtcttaaagaacggcattgctcggagaggagaatcaatgtgacaggaggatagagggagatatgatcacataatcatcatcaatagaatgccacataggaaatatatcggtagaatcagacatgtcaccgttctgctctgtgaagttccgtcatttttcaggccattgaaa

SEQ ID NO: 14917 - DNA, 1041 bp, Muscodor strobelii
  misc_feature: SGI cDNA ID NO. 564927
  misc_feature: Encodes the peptide sequence at SEQ ID NO 14918
atgcctggaactccgcgccgccggtccgtaaggacttcaaatcccgcttcagcagctatccgtcggccagattctccagctatcaatcagcatgaagatccgcctatggcacgttccggcccattcatcggccagagacattcccaccggctttccgctgcggcgctcgttgaaggaaacgatatcatacgtgacatcaatcgacccctccctggcgacgttttcggtcgcgacagaccccagcttcatccagatctacaaagacaaagaaatgcctatttcgagaatgagtttgcagccactaatcgcagcgaagatcccttagcatcgcgcattcgtgatgaagcaatggtcgtagccgagtttaagaccaatctcaatatgaaggatgaacttggcttcgtcacgcacttggcatggtatctctcgattcgttacaagcgccccgtgtcatcaatctgcgtcacgatacagcagggggcctgcatatttttcggcggaacttttgaggcctcgtgctgtttgacaattttcgccctcccagaactagtacagcccgcaacgaacaggagaaatgctagcttgcttcaacagcatattcgggacgcactcaatattgtcccttcacgaacctacattcgatttgaagcaacacctgcggagaacatgtccgttggaggctatatggcgtctgcagaagtcgacgaccccaagaaaagcaccgtggaccgtaagtcgagcctctcgcggaagccgtcaactttcctgaagagtatgagatctctaagtaatttgggagggttcatgtcaacgaacgatcttgcgggaagcgagtacatgccgccgaacggcaatgcagatgaccaatcgcgtataggtaccataccagaggtatctgtagcaccaaccgacgacaacggagtgggaaatatgaacggcaatacgaaggagcacaagaaggagaagactgtccgccgaagcaagagtattttgtttcccctcttcggtcacaagactggagacgataagcgagtaacttag

SEQ ID NO: 14918 - protein, 346 aa, Muscodor strobelii
  misc_feature: SGI Peptide ID NO. 564927
  misc_feature (121)..(230): Pfam Id: PF01187 Pfam Desc: Macrophage migration inhibitory factor (MIF)
  misc_feature (72)..(344): NCBI GI: 171685870 Blast Desc: protein product [Podospora anserina] gi|170942896|emb|CAP68549.1| protein product [Podospora anserina]
  misc_feature (60)..(262): NCBI GI: 145615573 Blast Desc: MGG_05693 [Magnaporthe grisea 70-15] gi|145022386|gb|EDK06406.1| MGG_05693 [Magnaporthe grisea 70-15]
  misc_feature (58)..(336): NCBI GI: 116207320 Blast Desc: CHGG_02953 [Chaetomium globosum CBS 148.51] gi|88183550|gb|EAQ91018.1| CHGG_02953 [Chaetomium globosum CBS 148.51]
  misc_feature (30)..(236): NCBI GI: 256729741 Blast Desc: NECHADRAFT_46561 [Nectria haematococca mpVI 77-13-4]
  misc_feature (60)..(204): NCBI GI: 85084205 Blast Desc: NCU00380 [Neurospora crassa OR74A] gi|28918355|gb|EAA28030.1| [Neurospora crassa OR74A]
  misc_feature (22)..(248): NCBI GI: 46122123 Blast Desc: FG05439.1 [Gibberella zeae PH-1]
  misc_feature (88)..(250): NCBI GI: 189208380 Blast Desc: MIF domain containing protein [Pyrenophora tritici-repentis Pt-1C-BFP] gi|187976616|gb|EDU43242.1| MIF domain containing protein [Pyrenophora tritici-repentis
  misc_feature (72)..(262): NCBI GI: 169599234 Blast Desc: SNOG_02436 [Phaeosphaeria nodorum SN15] gi|160704564|gb|EAT90648.2| SNOG_02436 [Phaeosphaeria nodorum SN15]
  misc_feature (56)..(339): NCBI GI: 156037802 Blast Desc: SS1G_12615 [Sclerotinia sclerotiorum 1980] gi|154698023|gb|EDN97761.1| SS1G_12615 [Sclerotinia sclerotiorum 1980]
  misc_feature (56)..(260): NCBI GI: 154315322 Blast Desc: BC1G_04700 [Botryotinia fuckeliana B05.10] gi|150847663|gb|EDN22856.1| BC1G_04700 [Botryotinia fuckeliana B05.10]
MPGTPRRRSVRTSNPASAAIRRPDSPAINQHEDPPMARSGPFIGQRHSHRLSAAALVEGNDIIRDINRPLPGDVFGRDRPQLHPDLQRQRNAYFENEFAATNRSEDPLASRIRDEAMVVAEFKTNLNMKDELGFVTHLAWYLSIRYKRPVSSICVTIQQGACIFFGGTFEASCCLTIFALPELVQPATNRRNASLLQQHIRDALNIVPSRTYIRFEATPAENMSVGGYMASAEVDDPKKSTVDRKSSLSRKPSTFLKSMRSLSNLGGFMSTNDLAGSEYMPPNGNADDQSRIGTIPEVSVAPTDDNGVGNMNGNTKEHKKEKTVRRSKSILFPLFGHKTGDDKRVT

SEQ ID NO: 14919 - DNA, 1188 bp, Muscodor strobelii
  misc_feature: SGI cDNA ID NO. 564928
  misc_feature: Encodes the peptide sequence at SEQ ID NO 14920
atgtcgtcgaggcttcgcggacgagatgacttctatgagcgccttgatgatgaggcatcttcgccgctcgaacccagcactcccacaccggctcaactgaatctaacacgagtatttgaacagaaccaacaaagacaacagaagaatgataatgtcaaggctcctgagcagccaccagatgtggcggcgaaaggaaagcctaggcttctgctcatgggtcagaggaggagtggcaaatcatctatctcaagtgtagtcttccacaagttgccacctagcgaaacgctttttcttgagtccaccgctcggatccagaaagaccagttgaatccttccttcatggactttcaagtatgggattttccgggccagatcgacatatttgagaacccgactttcgacatcgatgcgatgttcggggagataggagcgttaatatgggttatcgatgcacaagacgattacatggaagccgttgcccgtctcaatgttaccatattgaacttacaacgaacgtatccgaatgtaaagattgaggtcttcatacacaaagtcgacgggttatcagacgactacaagttggatatccagcgcgatataacaatacgtattcaagacgagctctcggaccatggattcgagaacgcccctgttactttccacttgacgagtatctacaatcacagcatattcgaggctttcagccgagttatacagaagctcattccgcgactgggaatactcgaatctatgctgaccaacctttgtcgcacatgtcggttcgagaaagcatacctcttcgatgttatgtctaagatctacatcgcgacggacagttcggcagccgatatgacgagttatgagatctgctcggattatatcgatgtcattatagacgttacggaggtatatggcagttggccgcgttccggcaaataccgcgaaagccttgagggaccgccctggaaccagaagctggatgaccaggttgcctccaactgggctgaaagctgtatggtactaagcgatggcaacaaacctatcgttcttcgcgaagtcgacaaatacctagcgttggttgcgattatgaaagaagacagctacgacaagatgccgttagtgaacatgaacgtggaagtcgttgtgcaagggctcaaggactttttcgagattacgaaaccgagatag

SEQ ID NO: 14920 - protein, 395 aa, Muscodor strobelii
  misc_feature: SGI Peptide ID NO. 564928
  misc_feature (156)..(390): Pfam Id: PF04670 Pfam Desc: Gtr1/RagA G protein conserved region
  misc_feature (156)..(305): Pfam Id: PF04670 Pfam Desc: Gtr1/RagA G protein conserved region
  misc_feature (29)..(395): NCBI GI: 261360170 Blast Desc: GTP-binding protein GTR2 [Verticillium albo-atrum VaMs.102]
  misc_feature (12)..(395): NCBI GI: 46122121 Blast Desc: FG05438.1 [Gibberella zeae PH-1]
  misc_feature (15)..(395): NCBI GI: 256729742 Blast Desc: [Nectria haematococca mpVI 77-13-4]
  misc_feature (16)..(395): NCBI GI: 171685874 Blast Desc: protein product [Podospora anserina] gi|170942898|emb|CAP68551.1| protein product [Podospora anserina]
  misc_feature (29)..(395): NCBI GI: 156037806 Blast Desc: SS1G_12617 [Sclerotinia sclerotiorum 1980] gi|154698025|gb|EDN97763.1| SS1G_12617 [Sclerotinia sclerotiorum 1980]
  misc_feature (17)..(335): NCBI GI: 116207322 Blast Desc: conserved [Chaetomium globosum CBS 148.51] gi|88183551|gb|EAQ91019.1| conserved [Chaetomium globosum CBS 148.51]
  misc_feature (27)..(395): NCBI GI: 39941566 Blast Desc: MGG_05694 [Magnaporthe grisea 70-15] gi|145022387|gb|EDK06407.1| MGG_05694 [Magnaporthe grisea 70-15]
  misc_feature (112)..(395): NCBI GI: 164429037 Blast Desc: NCU00376 [Neurospora crassa OR74A] gi|157072382|gb|EAA28026.2| NCU00376 [Neurospora crassa OR74A]
  misc_feature (19)..(389): NCBI GI: 189208951 Blast Desc: Gtr1/RagA G domain containing protein [Pyrenophora tritici-repentis Pt-1C-BFP] gi|187976901|gb|EDU43527.1| Gtr1/RagA G domain containing protein [Pyrenophora tritici-repentis
  misc_feature (25)..(389): NCBI GI: 258578413 Blast Desc: GTP-binding protein GTR2 [Uncinocarpus reesii 1704] gi|237903654|gb|EEP78055.1| GTP-binding protein GTR2 [Uncinocarpus reesii 1704]
MSSRLRGRDDFYERLDDEASSPLEPSTPTPAQLNLTRVFEQNQQRQQKNDNVKAPEQPPDVAAKGKPRLLLMGQRRSGKSSISSVVFHKLPPSETLFLESTARIQKDQLNPSFMDFQVWDFPGQIDIFENPTFDIDAMFGEIGALIWVIDAQDDYMEAVARLNVTILNLQRTYPNVKIEVFIHKVDGLSDDYKLDIQRDITIRIQDELSDHGFENAPVTFHLTSIYNHSIFEAFSRVIQKLIPRLGILESMLTNLCRTCRFEKAYLFDVMSKIYIATDSSAADMTSYEICSDYIDVIIDVTEVYGSWPRSGKYRESLEGPPWNQKLDDQVASNWAESCMVLSDGNKPIVLREVDKYLALVAIMKEDSYDKMPLVNMNVEVVVQGLKDFFEITKPR

SEQ ID NO: 14921 - DNA, 6539 bp, Muscodor strobelii
  misc_feature: SGI EST ID NO. CUFF.36207.0
  misc_feature: Variant of the nucleotide sequence at SEQ ID NO 14919
gagtggcaaatcatctatctcaagtgtagtcttccacaagttgccacctagcgaaacgctttttcttgagtccaccgctcggatccagaaagaccagttgaatccttccttcatggactttcaagtatgggattttccgggccagatcgacatatttgagaacccgactttcgacatcgatgcgatgttcggggagataggagcgttaatatgggttatcgatgcacaagacgattacatggaagccgttgcccgtctcaatgttaccatattgaacttacaacgaacgtatccgaatgtaaagattgaggtcttcatacacaaagtcgacgggttatcagacgactacaagttggatatccagcgcgatataacaatacgtattcaagacgagctctcggaccatggattcgagaacgcccctgttactttccacttgacgagtatctacaatcacagcatattcgaggctttcagccgagttatacagaagctcattccgcgactgggaatactcgaatctatgctgaccaacctttgtcgcacatgtcggttcgagaaagcatacctcttcgatgttatgtctaagatctacatcgcgacggacagttcggcagccgatatgacgagttatgagatctgctcggattatatcgatgtcattatagacgttacggaggtatatggcagttggccgcgttccggcaaataccgcgaaagccttgagggaccgccctggaaccagaagctggatgaccaggttgcctccaactgggctgaaagctgtatggtactaagcgatggcaacaaacctatcgttcttcgcgaagtcgacaaatacctagcgttggttgcgattatgaaagaagacagctacgacaagatgccgttagtgaacatgaacgtggaagtcgttgtgcaagggctcaaggactttttcgagattacgaaaccgagataggactcgaagcccgtccaattcaatgtcgttgccacgaagtcgaggatactacaaagcagccaggcaggccagaaaagctattggtgatgtgaagcgaacacgaaaaatctgtggatcagaccaggtcgcgggatgatgcagtcacgagggtcgcacaaaccttcgtgtttcacgtctctgtctgatgttgtcagcctcgatcaagctgatattctgtattatattatcagagaggctttggtaaataaaattcggttgcgcggtcatcctatctctgacgaaaggtttgttcaccacaacataagtttaggaatctacaagcaggacttggcaagacaagtttctgatacaatgacaggtgaaaactagataaagcaaaccaacagctccgataaatacaggataggcaatgttcatttgttggttcattcatcaagggtatattaagggtatctgcaacatatacacactcctcccatcaccaccaccatcctcagattttcaaatccccagaacaagatcaaccaaatcctccggctcctcccaaaaatccaataccacaatcccaagtctcgcacccttcaagcgtccaagcaaccccgccaatctcaaattcacacccccctctcccccctcgctaccaagcgccatagtctcaggataaaccggcggactaacatcgacatgcgtaccactcgtaaacgtgacgaaaagcccatcatgcggtcccgtagacgctttaaacaagtggctctgcaccgcggcgaacttcgcctcgatgttatcggagattgtctcgtatccatctggataataataatcctctatatacgccgtgccatttgtgctgctgttatacaccagttcgaaatctttcgtgttgtctgtccagagggagggactcatgtggagacctgggatggtttgttctgcctctgggggaagatctgataagtcgaagcgtctgaatagtaatattttcccccggtggtctcctagtgtgccagtaacgccgcggagaggagatatgtagtgggtagctgctggtgtgttaagtacacggtatagttcactctggactagagcaccggaagtggcattggcttttgttgagggttcgtactgaaaactgaggatcacgaattcagacgggtgggcatccagccaggcgtaaaagccgaaaagtacatcttcgaccgtcgccttagcgctcagcagcgcagccccgtgccaaaagacgaggttcgcgtcttccgggtcatatgcgaatctcaggtcgaagaagcggatccctgcttccagagactgagagatagatttagtctggcaacgatactgttttgcgattcccggtgtcaggccatcacagcgggttgcgtaggagagagagtcttgcgtgagttggctgtaattccatgtcgccgcgtcgtgagtcccgggtatgtttagttgggttattggggttgagtctgggatggctttcatccattctgctcgtgatgatgagtatgatgatgattgagaggaactattggggaaaccgaagatctcgctgctgtcagagaggatcttttgcagcgcaaaatctgatagggagtttgctgagatcaggggtgcgtgggtgaggaacgttgttaggactgttgtgagcctcatttttgggttggtaaacttgtcgcagctccgtaaagctagactccagcggcgaaacgcgagagactgttttcagaaagctaatctagatacatcagacttgagtaacgcaaacacgtttctttataacatatacattgatagtcgaagtaaatactaagtagaatgaaatgagtctcacatgatttacatggatgttgagccgagtagcctattgcaaagtccggggtagatacgtcataccctagtgctgactgcttttgaccactcgcaataaggtctcttcagaaaaacagagcggacttgattctgacaacaattgaaagtccgctgctttgcgatcgctgaaaaaaaaaaaaaaaaggttgcgtttcaatgatgctttgatgcgaggtgcgcgcggtgatccatcactgagttttacgaaaccccgtggcaagcgcggcacatttgataggccaatgccactagtgtgaagtatcgccttgtctctatgatcttcactgcctcgactccatgtattaagaagtcggattttctaaagcgaacacggctcgtttgattgttattattagtatatgtatcttgttctatcaattagaaatcgtctgtttccattggggccgctgcagtattgatatatatagtcgcaaagtctcatcaggcccagaatttcggagcctttggttcatgcgtcgcaatatcttcttgtgtctgcttcaacacagctacgagaagcgttgtggtctcatttgtaaagcaacagtggcaatctcgctctgctccttgctctgcacaatgccagcctctacgccaatctcaattatacctccaaacccaagattgaacgcctgttgcctttgtcatgcagttggtgatgggcatgcgccttactccctctcttctcccgctcttgttgaagagcactcgctggtttatctacccaagacgttcgtacagggggaaatgtcgtatcgaaaaatgtcaagtcggaaatcggtgctatgatgggtgatgcatttgtatgctgtggtattgtacaatgatagcacttggtaggtgtgtttaggtaactggacccttcattcttgtgacacagtttgctattgcaacattagctctccgtatattttagtcatgtgccacagatatcagccctaagtgcgcttcgatctgagtcgcactatgctcgcgaagcatagctcttgtagacatcggggatcgactcaccaccaaccagtccatgccctcgttgacaccgctgccctcaacggcggagcaagcgacgatactccaattccgatcgcggagctcacccaagcgaagggcttctgatatttcacctgcccccttggcgccaggctgatcttgtttgttcgcaaatacgagcagggcagcatctttgagctcgtcttcgttcaacatggcgcttaattcgtccgcggcggtctgcaggcgttcgatatcggtggagtcgacgacgaagatgacggcggccgtgttggcgtagtaacaccgccagtatggtcgaatgctagtctgtccaccgagatcccagacgttgaagttcaaatttttgtaggaaacggattcgacgttgaagcctatcgtggggatcgtcgttacgacttcgcctatctgtgccggcgttgtcagtttcctgtgctcttgaatcttgccccctgactctagaatgagggacgacaccaaagcacactggggagtgtctcaccttgagtctgtacaatagtgtcgtctttccggcgttatcctaaaaacaatagaactgtaagccagtggtcccgagaaatggtgggtatctgaggtcttccataccagaccgaggattaatattctgatttctttcttcgcccagagcaggccagagagccacgatacactttgacccatgttgacgacgtgggggagtgcagcgatcgtagacggataaccgggagtattcgcagttgcctttcgagggcacgagggcacgcgatcttatcgccgcgacaccagtctatctttgggaaaagctttggactgtcgtagacgtaaacgtcttcgggaggcttgaaaggggtccaaggggtggcggataggtgggatattagtcgtacggaaggtagacagtcaagaagtcaaagagttgacgagagccaagctaccacttaaaagtaactaattaagcaggtaggcagggcagttattggtcacaggctaccgttttagtgatgcactgatgtctacgtggcggcttgacggtgagacgtgtactgagagtatcgaggaggttgatgaagaccaatgttctagaacaaagctgtttgtgttgatttgtatgtagattgccgatctctctatttttttgtccctgacgaaaaatactcctaagaggccgccgggtgttcagggatgctggaatagaacgaatttaatcatggagatcggatcatgcagacctcaagcactgtactcgcggcctgactagcggtaatcggcacttgacgagtttgagcaccgactgaagcactgaagcagcaacgacacgcgctatgtgaaagttgacacagtggactgggacagaagtcagagtgttgctgtaaatggacatagcccctgtcatcgcaacttggaacccttggacgttggcttcacaaaggtccgggcggctctaaactcattggggtaaactgactacttagcttaataatgggattgaataggtagtggaatgatggaatagaagcgacgacggaacagatggccccttatcttatcagctctgttggcttcaaagaaatgccttatgtccgagtcatatgactgccgtcagcaacagacagctgacagtggttctgagtgatatggagcgaagccccacctacccggaacttctcaccaaacaaccgaagatttgcccacaactctcacaaccatccgctggggctgcaaaaccctcgcgcaaccaaaaatctccagcccgctaacaggtgatttggctactccacctgactccctctctttctctttcgccgcagaaagaagacatcaccaatccatctcgacatttcgaccagcaatagcagtcaagatgccgagccacaagtctttccgaaccaagcagaagctcgccaaggcgcagaagcagaaccgtcccatccctcaatggattcgtctccgaaccaacaacaccattaggtacaacgccaagagacgtcactggcgcaagacccgtcttggcatttagatgcctcgcctcctgctttacctacatcgaccgcccatcgtctatctcctacctgcgagacccgccgaggcatcccattgtcaacataaattcacttcgtttcgtgcgccgcggtcgaccaaaggaatgggggacgatctttgacgaggataaatgacctgtccacctggtctaaaatggatcatgatttgatagacagatgagaaacgaaaatggagcgaaatccacacccaaggtcgatgaagggaaaaagaaattgtgtgttgttgctggcgcagatatcggttttcttcacggctcctgtcatttaaggtctgcatggtaccggtaccggtcataagggaaatgaaataagacgatcaaaaacaccataacgattctcaaagctttgatgtgacaaggaggtgtagacgctcaatatcttgtgatagataatgaacactcgacctcttgcgggctgtcatgcctgaatgtatcatatgggtaatttgacagaaccagactaacattggccgcgtcagcaacaacaagacgaactacccgtactgtatgttacgacctgtatccaggaggagagtcgaatgcgcacacatttcgcacacattgtaagtcaaggaatgacacgccagcaacaacccagtaggtgcttcgtaatctcaaaaactttcgaccattctc

SEQ ID NO: 14922 - DNA, 1155 bp, Muscodor strobelii
  misc_feature: SGI cDNA ID NO. 564929
  misc_feature: Encodes the peptide sequence at SEQ ID NO 14923
atgaggctcacaacagtcctaacaacgttcctcacccacgcacccctgatctcagcaaactccctatcagattttgcgctgcaaaagatcctctctgacagcagcgagatcttcggtttccccaatagttcctctcaatcatcatcatactcatcatcacgagcagaatggatgaaagccatcccagactcaaccccaataacccaactaaacatacccgggactcacgacgcggcgacatggaattacagccaactcacgcaagactctctctcctacgcaacccgctgtgatggcctgacaccgggaatcgcaaaacagtatcgttgccagactaaatctatctctcagtctctggaagcagggatccgcttcttcgacctgagattcgcatatgacccggaagacgcgaacctcgtcttttggcacggggctgcgctgctgagcgctaaggcgacggtcgaagatgtacttttcggcttttacgcctggctggatgcccacccgtctgaattcgtgatcctcagttttcagtacgaaccctcaacaaaagccaatgccacttccggtgctctagtccagagtgaactataccgtgtacttaacacaccagcagctacccactacatatctcctctccgcggcgttactggcacactaggagaccaccgggggaaaatattactattcagacgcttcgacttatcagatcttcccccagaggcagaacaaaccatcccaggtctccacatgagtccctccctctggacagacaacacgaaagatttcgaactggtgtataacagcagcacaaatggcacggcgtatatagaggattattattatccagatggatacgagacaatctccgataacatcgaggcgaagttcgccgcggtgcagagccacttgtttaaagcgtctacgggaccgcatgatgggcttttcgtcacgtttacgagtggtacgcatgtcgatgttagtccgccggtttatcctgagactatggcgcttggtagcgaggggggagaggggggtgtgaatttgagattggcggggttgcttggacgcttgaagggtgcgagacttgggattgtggtattggatttttgggaggagccggaggatttggttgatcttgttctggggatttga

SEQ ID NO: 14923 - protein, 384 aa, Muscodor strobelii
  misc_feature: SGI Peptide ID NO. 564929
  misc_feature (7)..(384): NCBI GI: 212533343 Blast Desc: PMAA_073570 [Penicillium marneffei ATCC 18224] gi|210072192|gb|EEA26281.1| PMAA_073570 [Penicillium marneffei ATCC 18224]
  misc_feature (57)..(384): NCBI GI: 156037348 Blast Desc: SS1G_12385 [Sclerotinia sclerotiorum 1980] gi|154697796|gb|EDN97534.1| SS1G_12385 [Sclerotinia sclerotiorum 1980]
  misc_feature (18)..(362): NCBI GI: 154293171 Blast Desc: BC1G_14570 [Botryotinia fuckeliana B05.10] gi|150845610|gb|EDN20803.1| BC1G_14570 [Botryotinia fuckeliana B05.10]
  misc_feature (17)..(384): NCBI GI: 242777835 Blast Desc: TSTA_093970 [Talaromyces stipitatus ATCC 10500] gi|218722733|gb|EED22151.1| TSTA_093970 [Talaromyces stipitatus ATCC 10500]
  misc_feature (18)..(325): NCBI GI: 170096276 Blast Desc: [Laccaria bicolor S238N-H82] gi|164645726|gb|EDR09973.1| [Laccaria bicolor S238N-H82]
  misc_feature (70)..(384): NCBI GI: 169856478 Blast Desc: CC1G_13081 [Coprinopsis cinerea okayama7#130] gi|116504026|gb|EAU86921.1| CC1G_13081 [Coprinopsis cinerea okayama7#130]
  misc_feature (18)..(331): NCBI GI: 170111073 Blast Desc: [Laccaria bicolor S238N-H82] gi|164638419|gb|EDR02697.1| [Laccaria bicolor S238N-H82]
  misc_feature (18)..(384): NCBI GI: 170118903 Blast Desc: [Laccaria bicolor S238N-H82] gi|164634388|gb|EDQ98741.1| [Laccaria bicolor S238N-H82]
  misc_feature (18)..(183): NCBI GI: 170096746 Blast Desc: [Laccaria bicolor S238N-H82] gi|164645961|gb|EDR10208.1| [Laccaria bicolor S238N-H82]
  misc_feature (70)..(175): NCBI GI: 238602916 Blast Desc: MPER_04075 [Moniliophthora perniciosa FA553] gi|215467178|gb|EEB96740.1| MPER_04075 [Moniliophthora perniciosa FA553]
MRLTTVLTTFLTHAPLISANSLSDFALQKILSDSSEIFGFPNSSSQSSSYSSSRAEWMKAIPDSTPITQLNIPGTHDAATWNYSQLTQDSLSYATRCDGLTPGIAKQYRCQTKSISQSLEAGIRFFDLRFAYDPEDANLVFWHGAALLSAKATVEDVLFGFYAWLDAHPSEFVILSFQYEPSTKANATSGALVQSELYRVLNTPAATHYISPLRGVTGTLGDHRGKILLFRRFDLSDLPPEAEQTIPGLHMSPSLWTDNTKDFELVYNSSTNGTAYIEDYYYPDGYETISDNIEAKFAAVQSHLFKASTGPHDGLFVTFTSGTHVDVSPPVYPETMALGSEGGEGGVNLRLAGLLGRLKGARLGIVVLDFWEEPEDLVDLVLGI

SEQ ID NO: 14924 - DNA, 543 bp, Muscodor strobelii
  misc_feature: SGI cDNA ID NO. 564930
  misc_feature: Reduced expression when VOC is produced
  misc_feature: Encodes the peptide sequence at SEQ ID NO 14925
atgggtcaaagtgtatcgtggctctctggcctgctctgggcgaagaaagaaatcagaatattaatcctcggtctggataacgccggaaagacgacactattgtacagactcaagataggcgaagtcgtaacgacgatccccacgataggcttcaacgtcgaatccgtttcctacaaaaatttgaacttcaacgtctgggatctcggtggacagactagcattcgaccatactggcggtgttactacgccaacacggccgccgtcatcttcgtcgtcgactccaccgatatcgaacgcctgcagaccgccgcggacgaattaagcgccatgttgaacgaagacgagctcaaagatgctgccctgctcgtatttgcgaacaaacaagatcagcctggcgccaagggggcaggtgaaatatcagaagcccttcgcttgggtgagctccgcgatcggaattggagtatcgtcgcttgctccgccgttgagggcagcggtgtcaacgagggcatggactggttggtgcaaactgtgtcacaagaatga

SEQ ID NO: 14925 - protein, 180 aa, Muscodor strobelii
  misc_feature: SGI Peptide ID NO. 564930
  misc_feature (1)..(177): Pfam Id: PF00025 Pfam Desc: ADP-ribosylation factor family
  misc_feature (19)..(129): Pfam Id: PF08477 Pfam Desc: Miro-like protein
  misc_feature (19)..(179): Pfam Id: PF00071 Pfam Desc: Ras family
  misc_feature (15)..(177): Pfam Id: PF09439 Pfam Desc: Signal recognition particle receptor beta subunit
  misc_feature (1)..(178): NCBI GI: 256733139 Blast Desc: NECHADRAFT_38639 [Nectria haematococca mpVI 77-13-4]
  misc_feature (1)..(174): NCBI GI: 145602360 Blast Desc: conserved [Magnaporthe grisea 70-15] gi|145010786|gb|EDJ95442.1| conserved [Magnaporthe grisea 70-15]
  misc_feature (1)..(180): NCBI GI: 154319981 Blast Desc: ADP-ribosylation factor-like protein 1 [Botryotinia fuckeliana B05.10] gi|150854710|gb|EDN29902.1| ADP-ribosylation factor-like protein 1 [Botryotinia fuckeliana B05.10]
  misc_feature (1)..(180): NCBI GI: 156065069 Blast Desc: SS1G_00545 [Sclerotinia sclerotiorum 1980] gi|154691404|gb|EDN91142.1| SS1G_00545 [Sclerotinia sclerotiorum 1980]
  misc_feature (1)..(180): NCBI GI: 85091674 Blast Desc: ADP-ribosylation factor 1 [Neurospora crassa OR74A] gi|28920413|gb|EAA29781.1| ADP-ribosylation factor 1 [Neurospora crassa OR74A]
  misc_feature (1)..(174): NCBI GI: 46125085 Blast Desc: FG06920.1 [Gibberella zeae PH-1]
  misc_feature (1)..(178): NCBI GI: 116207496 Blast Desc: conserved [Chaetomium globosum CBS 148.51] gi|88183638|gb|EAQ91106.1| conserved [Chaetomium globosum CBS 148.51]
  misc_feature (1)..(180): NCBI GI: 261192374 Blast Desc: ADP-ribosylation factor 1 [Ajellomyces dermatitidis SLH14081] gi|239589469|gb|EEQ72112.1| ADP-ribosylation factor 1 [Ajellomyces dermatitidis SLH14081] gi|239615183|gb|EEQ92170.1| 1
  misc_feature (1)..(180): NCBI GI: 225556202 Blast Desc: ADP-ribosylation factor [Ajellomyces capsulatus G186AR]
  misc_feature (1)..(180): NCBI GI: 255950536 Blast Desc: Pc22g21390 [Penicillium chrysogenum Wisconsin 54-1255] gi|211593052|emb|CAP99427.1| Pc22g21390 [Penicillium chrysogenum Wisconsin 54-1255]
  misc_feature: Useful for introducing or modulating the production of volatile compounds
MGQSVSWLSGLLWAKKEIRILILGLDNAGKTTLLYRLKIGEVVTTIPTIGFNVESVSYKNLNFNVWDLGGQTSIRPYWRCYYANTAAVIFVVDSTDIERLQTAADELSAMLNEDELKDAALLVFANKQDQPGAKGAGEISEALRLGELRDRNWSIVACSAVEGSGVNEGMDWLVQTVSQE

SEQ ID NO: 14926 - DNA, 1870 bp, Muscodor strobelii
  misc_feature: SGI EST ID NO. CUFF.36208.1
  misc_feature: Variant of the nucleotide sequence at SEQ ID NO 14924
ttaccccaatgagtttagagccgcccggacctttgtgaagccaacgtccaagggttccaagttgcgatgacaggggctatgtccatttacagcaacactctgacttctgtcccagtccactgtgtcaactttcacatagcgcgtgtcgttgctgcttcagtgcttcagtcggtgctcaaactcgtcaagtgccgattaccgctagtcaggccgcgagtacagtgcttgaggtctgcatgatccgatctccatgattaaattcgttctattccagcatccctgaacacccggcggcctcttaggagtatttttcgtcagggacaaaaaaatagagagatcggcaatctacatacaaatcaacacaaacagctttgttctagaacattggtcttcatcaacctcctcgatactctcagtacacgtctcaccgtcaagccgccacgtagacatcagtgcatcactaaaacggtagcctgtgaccaataactgccctgcctacctgcttaattagttacttttaagtggtagcttggctctcgtcaactctttgacttcttgactgtctaccttccgtacgactaatatcccacctatccgccaccccttggacccctttcaagcctcccgaagacgtttacgtctacgacagtccaaagcttttcccaaagatagactggtgtcgcggcgataagatcgcgtgccctcgtgccctcgaaaggcaactgcgaatactcccggttatccgtctacgatcgctgcactcccccacgtcgtcaacatgggtcaaagtgtatcgtggctctctggcctgctctgggcgaagaaagaaatcagaatattaatcctcggtctggataacgccggaaagacgacactattgtacagactcaagataggcgaagtcgtaacgacgatccccacgataggcttcaacgtcgaatccgtttcctacaaaaatttgaacttcaacgtctgggatctcggtggacagactagcattcgaccatactggcggtgttactacgccaacacggccgccgtcatcttcgtcgtcgactccaccgatatcgaacgcctgcagaccgccgcggacgaattaagcgccatgttgaacgaagacgagctcaaagatgctgccctgctcgtatttgcgaacaaacaagatcagcctggcgccaagggggcaggtgaaatatcagaagcccttcgcttgggtgagctccgcgatcggaattggagtatcgtcgcttgctccgccgttgagggcagcggtgtcaacgagggcatggactggttggtgcaaactgtgtcacaagaatgaagggtccagttacctaaacacacctaccaagtgctatcattgtacaataccacagcatacaaatgcatcacccatcatagcaccgatttccgacttgacatttttcgatacgacatttccccctgtacgaacgtcttgggtagataaaccagcgagtgctcttcaacaagagcgggagaagagagggagtaaggcgcatgcccatcaccaactgcatgacaaaggcaacaggcgttcaatcttgggtttggaggtataattgagattggcgtagaggctggcattgtgcagagcaaggagcagagcgagattgccactgttgctttacaaatgagaccacaacgcttctcgtagctgtgttgaagcagacacaagaagatattgcgacgcatgaaccaaaggctccgaaattctgggcctgatgagactttgcgactatatatatcaatactgcagcggccccaatggaaacagacgatttctaattgatagaacaagatacatatactaataataacaatcaaacgagccgtgttcgctttagaaaat

SEQ ID NO: 14927 - DNA, 504 bp, Muscodor strobelii
  misc_feature: SGI cDNA ID NO. 564931
  misc_feature: Encodes the peptide sequence at SEQ ID NO 14928
atggcttccgagggacccatcatgctccgccttcagagcaatgacaaccagcagatggaggttgagaagactgtcgctgagcgaagtctgctgatcaagaacatgttggaggatcttggcgagggtgccgctggacaagtcatccctattcctaacgtcactgagcccgtcctccgcaaggtcatcgagtggtgcgagcaccaccgcaacgaccccccttcctccaacgacgacgactccgacaaccgcaagaagaccacggacatcgacgagtgggaccagaagttcatgcaggttgaccaggagatgctcttcgagatcatcctcgcttctaactatctcgacatcaagcctctcctcgatgttggttgcaagactgtcgccaacatgatcaagggcaagtctcccgaggagattcgcaagacattcaacatcacgaatgacttcacacccgaggaagaggagcagattcgccgggagaacgagtgggctgaggatcgttaa

SEQ ID NO: 14928 - protein, 167 aa, Muscodor strobelii
  misc_feature: SGI Peptide ID NO. 564931
  misc_feature (89)..(166): Pfam Id: PF01466 Pfam Desc: Skp1 family, dimerisation domain
  misc_feature (7)..(70): Pfam Id: PF03931 Pfam Desc: Skp1 family, tetramerisation domain
  misc_feature (3)..(167): NCBI GI: 46125089 Blast Desc: FG06922.1 [Gibberella zeae PH-1]
  misc_feature (1)..(167): NCBI GI: 240109240 Blast Desc: sulphur metabolism negative regulator, [Coccidioides posadasii C735 delta SOWgp]
  misc_feature (9)..(167): NCBI GI: 85091678 Blast Desc: NCU08991 [Neurospora crassa OR74A] gi|164423124|ref|XP_001728027.1| conserved , variant [Neurospora crassa OR74A] gi|22086560|gb|AAM90676.1|AF402682_1 negative ,
  misc_feature (11)..(167): NCBI GI: 256733140 Blast Desc: [Nectria haematococca mpVI 77-13-4]
  misc_feature (11)..(167): NCBI GI: 50897833 Blast Desc: SCF complex subunit Skp1 [Fusarium oxysporum f. sp. lycopersici]
  misc_feature (3)..(167): NCBI GI: 154319985 Blast Desc: BC1G_01973 [Botryotinia fuckeliana B05.10] gi|154319987|ref|XP_001559310.1| BC1G_01974 [Botryotinia fuckeliana B05.10] gi|150854712|gb|EDN29904.1| BC1G_01973 B05.10]
  misc_feature (3)..(167): NCBI GI: 156065065 Blast Desc: SCF complex subunit Skp1 [Sclerotinia sclerotiorum 1980] gi|154691402|gb|EDN91140.1| SCF complex subunit Skp1 [Sclerotinia sclerotiorum 1980]
  misc_feature (3)..(167): NCBI GI: 39940524 Blast Desc: MGG_04978 [Magnaporthe grisea 70-15] gi|145010784|gb|EDJ95440.1| MGG_04978 [Magnaporthe grisea 70-15]
  misc_feature (1)..(167): NCBI GI: 238839267 Blast Desc: sulfur metabolite repression control protein C [Microsporum canis CBS 113480]
  misc_feature (1)..(166): NCBI GI: 119182323 Blast Desc: CIMG_06200 [Coccidioides immitis RS]
MASEGPIMLRLQSNDNQQMEVEKTVAERSLLIKNMLEDLGEGAAGQVIPIPNVTEPVLRKVIEWCEHHRNDPPSSNDDDSDNRKKTTDIDEWDQKFMQVDQEMLFEIILASNYLDIKPLLDVGCKTVANMIKGKSPEEIRKTFNITNDFTPEEEEQIRRENEWAEDR

SEQ ID NO: 14929 - DNA, 1555 bp, Muscodor strobelii
  misc_feature: SGI EST ID NO. CUFF.36072.0
  misc_feature: Variant of the nucleotide sequence at SEQ ID NO 14927
cgccgccaaaccttccacccacttccagttctcagcccaaaggcaaccaacacctgcactcaacgtcaagcggttggctttctatctccaatcttctctcacccaactataataagcacaccacctattctccttcctccccattgcgcagcatttgacttgcaaatctcatatcctcatcagacatacaactcgatcctttctgctacggtcggctcatttccaggtatttctccccacgccgcacgttgctgtcgaattcacccctctcattccacatcgacatccatatgcacatgcacatgctttagattacctgttacaaccccacgacttgcatgtgcctcgaccatttcgcaaacacttattttccctccatccaacgtccacacctatcccaactgcaaccatctcactcgtgcgacaagtcaacgactagcttcttactgtcctatagatcatattcccatcaacaatcgacccatccaccatccacttgaccaacaacatcattcacaatggcttccgagggacccatcatgctccgccttcagagcaatgacaaccagcagatggaggttgagaagactgtcgctgagcgaagtctgctgatcaagaacatgttggaggatcttggcgagggtgccgctggacaagtcatccctattcctaacgtcactgagcccgtcctccgcaaggtcatcgagtggtgcgagcaccaccgcaacgaccccccttcctccaacgacgacgactccgacaaccgcaagaagaccacggacatcgacgagtgggaccagaagttcatgcaggttgaccaggagatgctcttcgagatcatcctcgcttctaactatctcgacatcaagcctctcctcgatgttggttgcaagactgtcgccaacatgatcaagggcaagtctcccgaggagattcgcaagacattcaacatcacgaatgacttcacacccgaggaagaggagcagattcgccgggagaacgagtgggctgaggatcgttaaagcctctttgcccgagtgtttgtcgtttggacacatcagtaggtcctcgtacggagtgctggattgtgtgtcttgtaggtggcagggttgcacaagaggcgtttctctgccaggtttgttcatggcacggcgttatcggtatacttgcttttcagttcagacaggagaagcggtaaatatccatgaaacatcgtaaaagatcgttgcaaagccaaaaaggcgttgcgacttgtcatgggtttgacgcgcaggctcattaggtagcaaagacagactaccgccacaaaacgcactcgtcaattaaaacctaacgtcgtgaaaatggagtccatgaacacaagtcgatgtctcgtcaacgctcggatgtacctgtcccaccccacctcttatttatgccatagctgtggattttcagttttcaactcaatcatgtatctatgcatgagatgtaagatgatcatacgtaatgaaggctcaagagaattattctcgtgtcattgtcttagctacgccttgagaatacacgctactcg

SEQ ID NO: 14930 - DNA, 519 bp, Muscodor strobelii
  misc_feature: SGI cDNA ID NO. 564932
  misc_feature: Encodes the peptide sequence at SEQ ID NO 14931
atggcttccgagggacccatcatgctccgccttcagagcaatgacaaccagcagatggaggttgagaagactgtcgctgagcgaagtctgctgatcaagaacatgttggaggatcttggcgagggtgccgctggacaagtcatccctattcctaacgtcactgagcccgtcctccgcaaggtcatcgagtggtgcgagcaccaccgcaacgaccccccttcctccaacgacgacgactccgacaaccgcaagaagaccacggacatcgacgagtgggaccagaagttcatgcaggttgaccaggagatgctcttcgagatcatcctcgtactctatctcaaggcttctaactatctcgacatcaagcctctcctcgatgttggttgcaagactgtcgccaacatgatcaagggcaagtctcccgaggagattcgcaagacattcaacatcacgaatgacttcacacccgaggaagaggagcagattcgccgggagaacgagtgggctgaggatcgttaa

SEQ ID NO: 14931 - protein, 172 aa, Muscodor strobelii
  misc_feature: SGI Peptide ID NO. 564932
  misc_feature (89)..(171): Pfam Id: PF01466 Pfam Desc: Skp1 family, dimerisation domain
  misc_feature (7)..(70): Pfam Id: PF03931 Pfam Desc: Skp1 family, tetramerisation domain
  misc_feature (3)..(172): NCBI GI: 46125089 Blast Desc: FG06922.1 [Gibberella zeae PH-1]
  misc_feature (1)..(172): NCBI GI: 240109240 Blast Desc: sulphur metabolism negative regulator, [Coccidioides posadasii C735 delta SOWgp]
  misc_feature (9)..(172): NCBI GI: 85091678 Blast Desc: NCU08991 [Neurospora crassa OR74A] gi|164423124|ref|XP_001728027.1| conserved , variant [Neurospora crassa OR74A] gi|22086560|gb|AAM90676.1|AF402682_1 negative ,
  misc_feature (11)..(172): NCBI GI: 50897833 Blast Desc: SCF complex subunit Skp1 [Fusarium oxysporum f. sp. lycopersici]
  misc_feature (11)..(172): NCBI GI: 256733140 Blast Desc: [Nectria haematococca mpVI 77-13-4]
  misc_feature (3)..(172): NCBI GI: 156065065 Blast Desc: SCF complex subunit Skp1 [Sclerotinia sclerotiorum 1980] gi|154691402|gb|EDN91140.1| SCF complex subunit Skp1 [Sclerotinia sclerotiorum 1980]
  misc_feature (3)..(172): NCBI GI: 154319985 Blast Desc: BC1G_01973 [Botryotinia fuckeliana B05.10] gi|154319987|ref|XP_001559310.1| BC1G_01974 [Botryotinia fuckeliana B05.10] gi|150854712|gb|EDN29904.1| BC1G_01973 B05.10]
  misc_feature (3)..(172): NCBI GI: 39940524 Blast Desc: MGG_04978 [Magnaporthe grisea 70-15] gi|145010784|gb|EDJ95440.1| MGG_04978 [Magnaporthe grisea 70-15]
  misc_feature (1)..(172): NCBI GI: 238839267 Blast Desc: sulfur metabolite repression control protein C [Microsporum canis CBS 113480]
  misc_feature (1)..(171): NCBI GI: 119182323 Blast Desc: CIMG_06200 [Coccidioides immitis RS]
MASEGPIMLRLQSNDNQQMEVEKTVAERSLLIKNMLEDLGEGAAGQVIPIPNVTEPVLRKVIEWCEHHRNDPPSSNDDDSDNRKKTTDIDEWDQKFMQVDQEMLFEIILVLYLKASNYLDIKPLLDVGCKTVANMIKGKSPEEIRKTFNITNDFTPEEEEQIRRENEWAEDR

SEQ ID NO: 14932 - DNA, 1555 bp, Muscodor strobelii; identical to SEQ ID NO: 14929
  misc_feature: SGI EST ID NO. CUFF.36072.0
  misc_feature: Variant of the nucleotide sequence at SEQ ID NO 14930

SEQ ID NO: 14933 - DNA, 306 bp, Muscodor strobelii
  misc_feature: SGI cDNA ID NO. 564933
  misc_feature: Encodes the peptide sequence at SEQ ID NO 14934
atgcaattcattcagttcatcggcctcatcgccgccgtccttcccttgtctaccatggcttcacccgtggcttcaactgatgccatcgagcgtgacatcttccgccgccacgatatttgctcccacactgccggtatcggcgatacttgcaaccacggccctggtcctgatgagcctcatatctgcggaaacaatgacgtaaatgtgttgcactgcgtcaagggcaagtgggcactgctcaacaaatgtggcgcgggcaagcattgcacttgcacaagtgacgatgacatcgtttgcaagtcttaa

SEQ ID NO: 14934 - protein, 101 aa, Muscodor strobelii
  misc_feature: SGI Peptide ID NO. 564933
MQFIQFIGLIAAVLPLSTMASPVASTDAIERDIFRRHDICSHTAGIGDTCNHGPGPDEPHICGNNDVNVLHCVKGKWALLNKCGAGKHCTCTSDDDIVCKS

SEQ ID NO: 14935 - DNA, 339 bp, Muscodor strobelii
  misc_feature: SGI cDNA ID NO. 564934
  misc_feature: Encodes the peptide sequence at SEQ ID NO 14936
atggcaagccccgttggcgccgccctcgacaaccccatcgtccttgaggatgatgatgattctggctctggaggttcagagttcagtggtttcgataccatcatgtcggacgtcaaggatgaggatcaggacgagtctcatgatgataccgacgatggccaggagatctcccagttccttgacacattggctgtggaggagagtgacacctctgatttcaagaccaaagacttcgatgacgactccttcgatccctcggtcggcccgttgcctcccactcgcgccagagctttggtccagggacttggtgtatttaaatgtgtagtccgtaatagataa

SEQ ID NO: 14936 - protein, 112 aa, Muscodor strobelii
  misc_feature: SGI Peptide ID NO. 564934
MASPVGAALDNPIVLEDDDDSGSGGSEFSGFDTIMSDVKDEDQDESHDDTDDGQEISQFLDTLAVEESDTSDFKTKDFDDDSFDPSVGPLPPTRARALVQGLGVFKCVVRNR

SEQ ID NO: 14937 - DNA, 1107 bp, Muscodor strobelii
  misc_feature: SGI cDNA ID NO. 564935
  misc_feature: Encodes the peptide sequence at SEQ ID NO 14938
atgggtgactccgaaccactacaacaattcccccttggtcctgtccccgttagtacaaagaatgcggccctttgggtcttcatcgcagtcttcttcaccactgccacaggtctcaccagcttccgcatagcgactcttttcaaaggaaagacgaccttccgtgtagaggatggattccatctaggcgcactagtcgcatactacgcacttgtcattgccgaaagcattggtttgactttgcaaggattttgggactcgactcgagtccccgactctcaagcagctattgccttcaagtctgctttcataaggaacgagctttaccctgtggcgaacgggctagtgaagatcagcattcttctcttcctaatccgattgtttggggtctcgagactatttaaatttaccgccgggactcttatggttttctcgttggcttgggcgctgtacgactttagcatcatcttgtcaacatgccatccagtctcggcattctatgctgtctcggatgattactactacgcacattgcgccgatgcggaacgaggccgacgccaagccatctccggggtggtcaatttcgtcatcgaatttctaatctttctactccctctccctgtagtttttcgactgaagacatcgattgcgaacaagttgaagttcgccttgttcctcagtttcggtatcgcgactatcactgtatctcttgtgtctgcggtatatcttgtactacagtatatcaccgacgcaaatacagccacgaaagatattccagacggcatcaaggtcgtctcaagatacaggttcgttttggagactggcgtggcgatgacggtctcggccgctctttgcttccggccgagcatacataacggtttcaaggatgctacttcgttccttcgttcattgggagctgggaaacactctgccgatgcacgatcgaatgcatcgagcgagaaaggaatcgtactgcaggatttccacagtattcaacagataggcgatactcaagcccgacagcagaccacccatcagaaatctgctccaggcatgtatacccagatgctagacaatctatctgatgatagagtggacaaggtcagatga

SEQ ID NO: 14938 - protein, 368 aa, Muscodor strobelii
  misc_feature: SGI Peptide ID NO. 564935
  misc_feature (16)..(287): NCBI GI: 242779387 Blast Desc: integral membrane protein, [Talaromyces stipitatus ATCC 10500] gi|218723051|gb|EED22469.1| integral membrane protein, [Talaromyces stipitatus ATCC 10500]
  misc_feature (91)..(228): NCBI GI: 169775407 Blast Desc: [Aspergillus oryzae RIB40] gi|83770034|dbj|BAE60169.1| protein product [Aspergillus oryzae]
  misc_feature (85)..(249): NCBI GI: 212542453 Blast Desc: conserved [Penicillium marneffei ATCC 18224] gi|210066288|gb|EEA20381.1| conserved [Penicillium marneffei ATCC 18224]
  misc_feature (30)..(243): NCBI GI: 156057509 Blast Desc: [Sclerotinia sclerotiorum 1980] gi|154702271|gb|EDO02010.1| [Sclerotinia sclerotiorum 1980]
  misc_feature (70)..(237): NCBI GI: 226279560 Blast Desc: PAAG_06173 [Paracoccidioides brasiliensis Pb01]
  misc_feature (70)..(237): NCBI GI: 226287616 Blast Desc: PADG_07949 [Paracoccidioides brasiliensis Pb18]
  misc_feature (91)..(256): NCBI GI: 119488560 Blast Desc: NFIA_113640 [Neosartorya fischeri NRRL 181] gi|119410888|gb|EAW20833.1| conserved [Neosartorya fischeri NRRL 181]
  misc_feature (53)..(228): NCBI GI: 145231407 Blast Desc: An02g00470 [Aspergillus niger] gi|134056087|emb|CAK96262.1| protein product [Aspergillus niger]
  misc_feature (64)..(261): NCBI GI: 67538938 Blast Desc: AN5639.2 [Aspergillus nidulans FGSC A4] gi|40743542|gb|EAA62732.1| AN5639.2 [Aspergillus nidulans FGSC A4] gi|259484892|tpe|CBF81501.1| TPA: integral membrane protein,
  misc_feature (52)..(259): NCBI GI: 156051376 Blast Desc: SS1G_07095 [Sclerotinia sclerotiorum 1980] gi|154704873|gb|EDO04612.1| SS1G_07095 [Sclerotinia sclerotiorum 1980]
MGDSEPLQQFPLGPVPVSTKNAALWVFIAVFFTTATGLTSFRIATLFKGKTTFRVEDGFHLGALVAYYALVIAESIGLTLQGFWDSTRVPDSQAAIAFKSAFIRNELYPVANGLVKISILLFLIRLFGVSRLFKFTAGTLMVFSLAWALYDFSIILSTCHPVSAFYAVSDDYYYAHCADAERGRRQAISGVVNFVIEFLIFLLPLPVVFRLKTSIANKLKFALFLSFGIATITVSLVSAVYLVLQYITDANTATKDIPDGIKVVSRYRFVLETGVAMTVSAALCFRPSIHNGFKDATSFLRSLGAGKHSADARSNASSEKGIVLQDFHSIQQIGDTQARQQTTHQKSAPGMYTQMLDNLSDDRVDKVR

SEQ ID NO: 14939 - DNA, 2533 bp, Muscodor strobelii
  misc_feature: SGI EST ID NO. CUFF.35619.0
  misc_feature: Variant of the nucleotide sequence at SEQ ID NO 14937
ctcaccacggctaggtcaggggtttccaaccttcataccaaccaccatggtcaccgttatcaccggcaactagccgtcgttgccagggttgttgtcgcatctcgatatctacgtgccttttgcatctcacagtcctggatgctatccttggccgctagtcaagtccaccccaacggcgatatcatccagtaccctggtacaggacccaatcgacctatcttgatcatctcctttgccgtcggcagcggcgttaatcgcacgagatatcaacatgaaccacaacggcgggcttcgtccacaacccggttggcgtcaccgctgatactgtcaagatcatggaggtattgttttcccggcacttgtagacgagggcaatgcgcggcaagacatgaccgggattgatttctagagatggcctcggtacacgaatgaagcattgttcatcaatcttctcataggcctaattctgactgggttcaatgatatcgccgggaccgtttacaaaaggactggagacatgagtctcgatatctatcaagactcaaccccccacctgcggcccacaggcacctggatgccgatcccagttggacccatccgcttggatttcgttcctagagaccctgttcgcgacgaaacacaccagacgcacctttcccaattcctgtcaccatcacgagaaggtgggccttttcattgaactagtccaaccggcctgttgggtcaatcttgataccgatggcatgtcaccacgaaatggtagtagagtctccatgtagagatcgccttgtatctgcgtacaagtctccattccctttcttctcgtctggttttggagtcgccgctagcaagcatccatagagtatatccaatggaggcgactttgatttctagaactcaaagttgaataatgccacaacttctagtaccattgcgtaaaccagtctactatctgcgccgagcaaaaggccttggccccttggctgtattgcgtctggcccagactattgttatcatctgaaggatcgacactatttcagacgctattttacgacccactagccacgcgctcagctcatgtacatatgcatgccattccctcttcccgttgccgaaccagttatcgacgtctgtgctacgttctaaaggtttcaacctcaacagtatactcatatactgactggccaagtcttcggtaatggacgacacgtaagagttcgacgtatcaccagtacgatattcaacccatgagttaaccaattacgtcgctttgcatcagctgcaatgggtgactccgaaccactacaacaattcccccttggtcctgtccccgttagtacaaagaatgcggccctttgggtcttcatcgcagtcttcttcaccactgccacaggtctcaccagcttccgcatagcgactcttttcaaaggaaagacgaccttccgtgtagaggatggattccatctaggcgcactagtcgcatactacgcacttgtcattgccgaaagcattggtttgactttgcaaggattttgggactcgactcgagtccccgactctcaagcagctattgccttcaagtctgctttcataaggaacgagctttaccctgtggcgaacgggctagtgaagatcagcattcttctcttcctaatccgattgtttggggtctcgagactatttaaatttaccgccgggactcttatggttttctcgttggcttgggcgctgtacgactttagcatcatcttgtcaacatgccatccagtctcggcattctatgctgtctcggatgattactactacgcacattgcgccgatgcggaacgaggccgacgccaagccatctccggggtggtcaatttcgtcatcgaatttctaatctttctactccctctccctgtagtttttcgactgaagacatcgattgcgaacaagttgaagttcgccttgttcctcagtttcggtatcgcgactatcactgtatctcttgtgtctgcggtatatcttgtactacagtatatcaccgacgcaaatacagccacgaaagatattccagacggcatcaaggtcgtctcaagatacaggttcgttttggagactggcgtggcgatgacggtctcggccgctctttgcttccggccgagcatacataacggtttcaaggatgctacttcgttccttcgttcattgggagctgggaaacactctgccgatgcacgatcgaatgcatcgagcgagaaaggaatcgtactgcaggatttccacagtattcaacagataggcgatactcaagcccgacagcagaccacccatcagaaatctgctccaggcatgtatacccagatgctagacaatctatctgatgatagagtggacaaggtcagatgaccaggcggactgatgtacaggggaatactgcgtcagtcttcgaatacttcccgcggatcaacaagacacttgtataatcttggatatagttataatgatagcgaatgaaagcgattatgtgtttttggtttgtctatgcgcc

SEQ ID NO: 14940 - DNA, 510 bp, Muscodor strobelii
  misc_feature: SGI cDNA ID NO. 564936
  misc_feature: Encodes the peptide sequence at SEQ ID NO 14941
atgcattatcaagtagccttatcctgcttagcattggctacttcggcctttgcccaagtcttagaaccctctccaacttatccagatatctatttcccgcgcgagaacgagacaattgttgccggctcatcttacatcatcgaatgggatcaaagagagcaagtcggtcccgcgactctgtatcttctaggcggtgacgatgctgctagcctccgtgttctatcgactattgctaaggtccatttagaggatcaggaattgagattctggaaggttgactgtgagctcggtaccgacaaggcgtatgtaatcaagattgcctcagatcttgataatggggagacatatggtatctcgccggttttccatctttgtggtcccacttgccatgcctcgttcggcaatttgccaacaccttcttactcggctgtgcccagttctcactcagcgaagcctacttgcactccttactcgccgccaggttcgccgggaaggaggagccatccatag

SEQ ID NO: 14941 - protein, 169 aa, Muscodor strobelii
  misc_feature: SGI Peptide ID NO. 564936
  misc_feature (1)..(109): NCBI GI: 145602987 Blast Desc: MGG_04599 [Magnaporthe grisea 70-15] gi|145011328|gb|EDJ95984.1| MGG_04599 [Magnaporthe grisea 70-15]
  misc_feature (1)..(125): NCBI GI: 209570418 Blast Desc: [Glomerella graminicola]
  misc_feature (30)..(126): NCBI GI: 256735295 Blast Desc: NECHADRAFT_98847 [Nectria haematococca mpVI 77-13-4]
MHYQVALSCLALATSAFAQVLEPSPTYPDIYFPRENETIVAGSSYIIEWDQREQVGPATLYLLGGDDAASLRVLSTIAKVHLEDQELRFWKVDCELGTDKAYVIKIASDLDNGETYGISPVFHLCGPTCHASFGNLPTPSYSAVPSSHSAKPTCTPYSPPGSPGRRSHP

SEQ ID NO: 14942 - DNA, 693 bp, Muscodor strobelii
  misc_feature: SGI cDNA ID NO. 564937
  misc_feature: Encodes the peptide sequence at SEQ ID NO 14943
atggtcgtcttgacaggcggtgggagcggcgtcgtgggcatcttcgtcttgaccggccgtaagagtaagaaagcaatgaagaaagtcaccgcatttctcgtgccaatgagttatagcccaaagatcatcccctcacaggccaacatgatgagacgtgcgcagtcggcctgcaagcttgcgcaacagcactgtcaagtcggaaagcctttcgacaaagatctgcctaacaaggcaaccctgctgtgcttgcgatatgtcgacgaatccggtgggacgaacggctactaccggatcgagcctgccaggctggcgatgcagtacattgaggacatcaatgctggcaagaacattgacggggaccgaaaaggtctattctacatccttgaccgcatcgacaccggagagcgtgtcgaggaggagaaggagaagcaaaaggccatcaaggaggagggagtgaggatgctgaccaccgtatccttccgacgagccggcggcgatggcattaaggactacaatgtcaataagaagtacattagcaacaaaaccccctcttggatcatcgacaactggaaagtcaccttgtcttcgccgtgcccttcgctccttgaaaggatagactcggcgcgggagccacctgccaccacagggcgtatcaatcaagacaggagacccgacgcagggttaccaagctga

SEQ ID NO: 14943 - protein, 230 aa, Muscodor strobelii
  misc_feature: SGI Peptide ID NO. 564937
MVVLTGGGSGVVGIFVLTGRKSKKAMKKVTAFLVPMSYSPKIIPSQANMMRRAQSACKLAQQHCQVGKPFDKDLPNKATLLCLRYVDESGGTNGYYRIEPARLAMQYIEDINAGKNIDGDRKGLFYILDRIDTGERVEEEKEKQKAIKEEGVRMLTTVSFRRAGGDGIKDYNVNKKYISNKTPSWIIDNWKVTLSSPCPSLLERIDSAREPPATTGRINQDRRPDAGLPS

SEQ ID NO: 14944 - DNA, 741 bp, Muscodor strobelii
  misc_feature: SGI cDNA ID NO. 564938
  misc_feature: Encodes the peptide sequence at SEQ ID NO 14945
atgacgcagcctactaatgtggactcgtcccgggccttctctaatgatctagagcgaggaccggatgtactcgatcatcaaccaaaccgatcgacagtgtctttacccgacggtatcggatccgccatatcgtcaagcaactcctctatcataggcgatcctgatcagcccgggctgggagaagaatggggcccctcacatccatgcttcccacatctcaatccccacgtacccattaactccaatgagtataagaccacacgtatcatccggatccgcagagattggcttgtcgcaggtgatctcggccctgcattttctaatatgtatcccgagattctggatcctgctggtgtatcagagcaagagttccgccgcgtcatagagaagctgaatggtactctgcttcccatcttcaacccatatagttggagaaatattcttgatggtgtactgggcgtactatctggttgggtatgggaagattttggcctcacaaacgcgaagacaaatctcaatgctttggagatgtggatcgacaaatggaacgccgagatggagaagacgacaggcccagacgctttgtctcccaagatcatctcgctgcgacggacgggttatatgaacctcgatttccaaattcccgatccagaggtatccatctccaacagtgaaccggcttccagatctggtccaccaataacacccattgcctccaatggagcacaggttgcttcatga

SEQ ID NO: 14945 - protein, 246 aa, Muscodor strobelii
  misc_feature: SGI Peptide ID NO. 564938
  misc_feature (4)..(236): NCBI GI: 46125789 Blast Desc: FG07272.1 [Gibberella zeae PH-1]
  misc_feature (1)..(237): NCBI GI: 256733226 Blast Desc: NECHADRAFT_68612 [Nectria haematococca mpVI 77-13-4]
  misc_feature (8)..(228): NCBI GI: 261360138 Blast Desc: conserved [Verticillium albo-atrum VaMs.102]
  misc_feature (12)..(231): NCBI GI: 85084078 Blast Desc: NCU00126 [Neurospora crassa OR74A] gi|28918338|gb|EAA28014.1| [Neurospora crassa OR74A]
  misc_feature (16)..(224): NCBI GI: 145614382 Blast Desc: MGG_04837 [Magnaporthe grisea 70-15] gi|145021313|gb|EDK05442.1| MGG_04837 [Magnaporthe grisea 70-15]
  misc_feature (2)..(231): NCBI GI: 171686960 Blast Desc: protein product [Podospora anserina] gi|170943441|emb|CAP69094.1| protein product [Podospora anserina]
  misc_feature (8)..(210): NCBI GI: 116191843 Blast Desc: CHGG_05639 [Chaetomium globosum CBS 148.51] gi|88181552|gb|EAQ89020.1| CHGG_05639 [Chaetomium globosum CBS 148.51]
  misc_feature (9)..(228): NCBI GI: 154309802 Blast Desc: BC1G_07371 [Botryotinia fuckeliana B05.10] gi|150851832|gb|EDN27025.1| BC1G_07371 [Botryotinia fuckeliana B05.10]
  misc_feature (63)..(231): NCBI GI: 121713292 Blast Desc: conserved [Aspergillus clavatus NRRL 1] gi|119402410|gb|EAW12831.1| conserved [Aspergillus clavatus NRRL 1]
  misc_feature (63)..(231): NCBI GI: 159126419 Blast Desc: conserved [Aspergillus fumigatus A1163]
MTQPTNVDSSRAFSNDLERGPDVLDHQPNRSTVSLPDGIGSAISSSNSSIIGDPDQPGLGEEWGPSHPCFPHLNPHVPINSNEYKTTRIIRIRRDWLVAGDLGPAFSNMYPEILDPAGVSEQEFRRVIEKLNGTLLPIFNPYSWRNILDGVLGVLSGWVWEDFGLTNAKTNLNALEMWIDKWNAEMEKTTGPDALSPKIISLRRTGYMNLDFQIPDPEVSISNSEPASRSGPPITPIASNGAQVAS

SEQ ID NO: 14946 - DNA, 1255 bp, Muscodor strobelii
  misc_feature: SGI EST ID NO. CUFF.35658.0
  misc_feature: Variant of the nucleotide sequence at SEQ ID NO 14944
ctgatctgctacccaagaagtctatcataacaggctttcgaaagaggggccagagtatctcagatcaaggtcgaccccgtgccgtcagttttggtctcgttcgccctgagcctccaaggcaagctggtgcacgagtcaggaaagggaaaaggcaaggcggcaatgacgcagcctactaatgtggactcgtcccgggccttctctaatgatctagagcgaggaccggatgtactcgatcatcaaccaaaccgatcgacagtgtctttacccgacggtatcggatccgccatatcgtcaagcaactcctctatcataggcgatcctgatcagcccgggctgggagaagaatggggcccctcacatccatgcttcccacatctcaatccccacgtacccattaactccaatgagtataagaccacacgtatcatccggatccgcagagattggcttgtcgcaggtgatctcggccctgcattttctaatatgtatcccgagattctggatcctgctggtgtatcagagcaagagttccgccgcgtcatagagaagctgaatggtactctgcttcccatcttcaacccatatagttggagaaatattcttgatggtgtactgggcgtactatctggttgggtatgggaagattttggcctcacaaacgcgaagacaaatctcaatgctttggagatgtggatcgacaaatggaacgccgagatggagaagacgacaggcccagacgctttgtctcccaagatcatctcgctgcgacggacgggttatatgaacctcgatttccaaattcccgatccagaggtatccatctccaacagtgaaccggcttccagatctggtccaccaataacacccattgcctccaatggagcacaggttgcttcatgacacgatagttacaaacgaacaacaggtcacctacgaccctccttgcctggactaaccctccaccgtctcttacttaatcacacctgtcttatttcttttacaaaaaaaccttgccgtcctcttcgaggcttgtatgaattgacgaagataccctaagcttaacgcttcaaatactttttttctgaacataattttcagcatccttgtacacatgaatactgtctatttctcagcaacctgttcttgtacgcactgttttgtactaaaacatacttttgcccgcgagggcacgacgagactctggggataaagggggagagaagagatagtaatgaataataatttaccatca

SEQ ID NO: 14947 - DNA, 1494 bp, Muscodor strobelii
  misc_feature: SGI cDNA ID NO. 564939
  misc_feature: Encodes the peptide sequence at SEQ ID NO 14948
atggactttacagggatatgggtgcctacggagatcgttgacaagatcgtcggctacaacatcaccaatcccgaaatccttggggccggccggcgcgccacctacaagctggaggggcttgagttgagactcgtttgccacctgactgaagggctcttcaaccgcgttgcctcgtgggaggcactgaaagagtttgatcttgccaaggcctccaagatgatgtacggctacggaatgaagccagctacagtagcctggctccttgccacgaagatcagaggtcaccccgatgctaaggaaggacttgcggcacatatctggaggctggcggaggagatgtggacttggaagctagacaactctaagtctgggtctcaaccttttgagtactcgattcttggaaaatcggatgtcgccgcgttagacgcaggctctgatgagcagcttgattacgatttcatcagcgaagcctgtaacttactcgttgtcgttaagggctgctcttggggattcgatcagcttcaagcctctcctacaacctcgaccgacttttccccactcctaaataagagccaacaaggactagatgctatcgcgcatctaggtggcctccaagtagcaagctggtgtggagatgagtccatcgtggatgcattgctcgagcacagcgtggattcagattatcagcatgatatctcttcgagtcttcaggataatatcgactccagcggccagtatcatacttcgagcagtcagtttcacgacgattcggatagtcagcatagtgccactccggacaaacactttgggcgtcccttgtttgctgcggcatacaacggcagaaagaatatcgcaaagctccttaaagacgctggagcttcgttaaatggtgaagaaggaatcccttgggaggatcatgcttggtataattccgccaggcaacaaaactactggccagctgctgtggctgggcatcacaaacatattcagaccgaacgctatcttctggagcaatgcattcaggtgggctctccagtggatcacgcaaactgggcgcttctttatgcctcatcgcaaggattggtttgggctatccagttggccttggaacggccggatattgatgtgaatacagtaacatgcggtgaagaggttactctgctctacctagccaccaggtccgaacacaaggacatagtggctctgctgctccgggatcagcgtcttatacctgatacatcagattcacaatacctatcgccattagcgtgcgctgccgctggaggcagtgctgagatcttgcaactgcttctggacgatgcacgagtcgatcctggagagatattcgatgaccctgggaccgaacaagatttcttacacgattgccctcgcgtgactgccataatgctagccatgagcatggatatgtatgaccttgtcgttcattggagggaggaggaggaggagggggaggatgaagaaaacgaggcttag

SEQ ID NO: 14948 - protein, 497 aa, Muscodor strobelii
  misc_feature: SGI Peptide ID NO. 564939
  misc_feature (272)..(444): NCBI GI: 242803454 Blast Desc: ion channel nompc, [Talaromyces stipitatus ATCC 10500] gi|218717522|gb|EED16943.1| ion channel nompc, [Talaromyces stipitatus ATCC 10500]
  misc_feature (167)..(446): NCBI GI: 119474173 Blast Desc: Ankyrin repeat protein [Neosartorya fischeri NRRL 181] gi|119407115|gb|EAW17065.1| Ankyrin repeat protein [Neosartorya fischeri NRRL 181]
  misc_feature (192)..(445): NCBI GI: 238845653 Blast Desc: pfs [Microsporum canis CBS 113480]
  misc_feature (207)..(445): NCBI GI: 238845653 Blast Desc: pfs [Microsporum canis CBS 113480]
  misc_feature (204)..(444): NCBI GI: 157106769 Blast Desc: ankyrin 2,3/unc44 [Aedes aegypti] gi|108868779|gb|EAT33004.1| ankyrin 2,3/unc44 [Aedes aegypti]
  misc_feature (204)..(439): NCBI GI: 242788569 Blast Desc: ankyrin repeat containing protein [Talaromyces stipitatus ATCC 10500] gi|218721393|gb|EED20812.1| ankyrin repeat containing protein [Talaromyces stipitatus ATCC 10500]
  misc_feature (204)..(447): NCBI GI: 242816359 Blast Desc: multiple ankyrin repeats single kh domain protein, [Talaromyces stipitatus ATCC 10500] gi|218715100|gb|EED14523.1| multiple ankyrin repeats single kh domain protein, [Talaromyces
  misc_feature (162)..(439): NCBI GI: 67526171 Blast Desc: AN3543.2 [Aspergillus nidulans FGSC A4] gi|40739678|gb|EAA58868.1| AN3543.2 [Aspergillus nidulans FGSC A4] gi|259481936|tpe|CBF75924.1| TPA: conserved [Aspergillus FGSC
  misc_feature (272)..(444): NCBI GI: 157106769 Blast Desc: ankyrin 2,3/unc44 [Aedes aegypti] gi|108868779|gb|EAT33004.1| ankyrin 2,3/unc44 [Aedes aegypti]
  misc_feature (204)..(439): NCBI GI: 154310176 Blast Desc: BC1G_07008 [Botryotinia fuckeliana B05.10] gi|150851569|gb|EDN26762.1| BC1G_07008 [Botryotinia fuckeliana B05.10]
MDFTGIWVPTEIVDKIVGYNITNPEILGAGRRATYKLEGLELRLVCHLTEGLFNRVASWEALKEFDLAKASKMMYGYGMKPATVAWLLATKIRGHPDAKEGLAAHIWRLAEEMWTWKLDNSKSGSQPFEYSILGKSDVAALDAGSDEQLDYDFISEACNLLVVVKGCSWGFDQLQASPTTSTDFSPLLNKSQQGLDAIAHLGGLQVASWCGDESIVDALLEHSVDSDYQHDISSSLQDNIDSSGQYHTSSSQFHDDSDSQHSATPDKHFGRPLFAAAYNGRKNIAKLLKDAGASLNGEEGIPWEDHAWYNSARQQNYWPAAVAGHHKHIQTERYLLEQCIQVGSPVDHANWALLYASSQGLVWAIQLALERPDIDVNTVTCGEEVTLLYLATRSEHKDIVALLLRDQRLIPDTSDSQYLSPLACAAAGGSAEILQLLLDDARVDPGEIFDDPGTEQDFLHDCPRVTAIMLAMSMDMYDLVVHWREEEEEGEDEENEA

SEQ ID NO: 14949 - DNA, 1722 bp, Muscodor strobelii
  misc_feature: SGI cDNA ID NO. 564940
  misc_feature: Encodes the peptide sequence at SEQ ID NO 14950
atggcatggttgctcgccacgaagctcaaagcacgccccgattccgaaacagggcttgcagcgcaagtctgggaacgggcacgctcaatatcgtcttggaaggagcgtaaaataggacccgctcggcaatacgattacgactacatcaatgcagcttgcaacctgctagttgcaacaaagggcttggcttgggcttgccgccagcttcaagatccatccgattgcttgctgcactcgattctacggatggagaccccgtcgttagatgatctaatacaaatgggctgcctacagttggcaagttggtgtggagatggcttgctcgtggagacgctgttgaaacatggtattgatccgaatatttcccacgtagactttggtcgttcattgtttgctgctgcctataatggcaaaaccgaaattgcaagactcctcatcaacaatggagcttctcttgacggtgagaagtggtcgtctcgttacaaacccaacgacgaataccgctattggcctaccgcagtagcccgaagacgcgggcacgtccaaactgagcgatatctgctggaacgatgtctcaaatcggagtcatctgttcatagcaactgggcccttctttacgcgtcacagtggggagtgacatgggcagtacagttagctttaggacgactggacatcgatgtcaacactgcaacacgtcgccaaggactgactccgctcatgctagtaaccatcaacaataacgaagagattgtcgtgttgctcctaggtagaaacgacattcacataaatgcccaagagtctaaatatctccggacagcatttcatatcgcgtccgcgtccgacgaggaccgccaccaaattgcaggacatcttctctctcggcagaatctcgacccaaatactcacgactgtaacaatcacaatcctctgctctatgcagtaaagaagggattctatgatattacaagactgattctgcaacgatctgatattcgacttgatactccatgttacgacgattactcatggcttcggtgggcggtgcgtcataggaacgcacgtatagtgagccttttcctggaacgaaacgatttgaatccgaactacgatcccttccgcccacctctccacgaagcactgtcaaacaaggacacggagatcatacagcttcttttagcaaggcccgacatcaaccccaacgtcacggatgaacgagactggacaccactaagcgcggctgtggttatcggatgtaaagcgaatgtccaacttctatttaaccatcccaaaacggacctaaatgctgttcccaaaggtttcatgacgccgctgatgtatgcgacggtcttgttggataaagaagatatcttccagcttcttttaacaagtctcgacgtcgatcccaacgtcaaagacgacgaacttggcgatgcgccattactgtggtctgtgtatcatggaaaggaaacgaacgttcgacttttgttggagcacccaaagacggatccaaatctttctaccaaagagggcttgacggcgttggctatggcagtacgctatgaatacagagcgattgtcgaaatgcttctagagcatcctaagatcgacagagatctggtttctgagatcgatggcaggacgggtatgacaccgctggcgattgctcgggaagaggagttttatgatattgttgccctattggagaagaaggataaggattag

SEQ ID NO: 14950 - protein, 573 aa, Muscodor strobelii
  misc_feature: SGI Peptide ID NO. 564940
  misc_feature (234)..(267): Pfam Id: PF00023 Pfam Desc: Ankyrin repeat
  misc_feature (108)..(530): NCBI GI: 242761152 Blast Desc: ankyrin 2,3/unc44, [Talaromyces stipitatus ATCC 10500] gi|218723321|gb|EED22738.1| ankyrin 2,3/unc44, [Talaromyces stipitatus ATCC 10500]
  misc_feature (108)..(530): NCBI GI: 242761147 Blast Desc: ankyrin 2,3/unc44, [Talaromyces stipitatus ATCC 10500] gi|218723320|gb|EED22737.1| ankyrin 2,3/unc44, [Talaromyces stipitatus ATCC 10500]
  misc_feature (74)..(571): NCBI GI: 242771684 Blast Desc: ankyrin repeat-containing protein, [Talaromyces stipitatus ATCC 10500] gi|218721511|gb|EED20929.1| ankyrin repeat-containing protein, [Talaromyces stipitatus ATCC 10500]
  misc_feature (74)..(571): NCBI GI: 242825043 Blast Desc: ankyrin, [Talaromyces stipitatus ATCC 10500] gi|218712176|gb|EED11602.1| ankyrin, [Talaromyces stipitatus ATCC 10500]
  misc_feature (108)..(573): NCBI GI: 238845653 Blast Desc: pfs [Microsporum canis CBS 113480]
  misc_feature (97)..(567): NCBI GI: 238845653 Blast Desc: pfs [Microsporum canis CBS 113480]
  misc_feature (74)..(571): NCBI GI: 242827419 Blast Desc: ankyrin repeat-containing protein, [Talaromyces stipitatus ATCC 10500] gi|218711987|gb|EED11416.1| ankyrin repeat-containing protein, [Talaromyces stipitatus ATCC 10500]
  misc_feature (66)..(573): NCBI GI: 159123470 Blast Desc: Ankyrin repeat protein [Aspergillus fumigatus A1163]
  misc_feature (97)..(571): NCBI GI: 242816142 Blast Desc: ankyrin repeat-containing protein, [Talaromyces stipitatus ATCC 10500] gi|218715051|gb|EED14474.1| ankyrin repeat-containing protein, [Talaromyces stipitatus ATCC 10500]
  misc_feature (204)..(547): NCBI GI: 242761152 Blast Desc: ankyrin 2,3/unc44, [Talaromyces stipitatus ATCC 10500] gi|218723321|gb|EED22738.1| ankyrin 2,3/unc44, [Talaromyces stipitatus ATCC 10500]
  misc_feature (109)..(414): SWISSPROT Homolog: EC 2.7.11.1 Non-specific serine/threonine protein kinase
MAWLLATKLKARPDSETGLAAQVWERARSISSWKERKIGPARQYDYDYINAACNLLVATKGLAWACRQLQDPSDCLLHSILRMETPSLDDLIQMGCLQLASWCGDGLLVETLLKHGIDPNISHVDFGRSLFAAAYNGKTEIARLLINNGASLDGEKWSSRYKPNDEYRYWPTAVARRRGHVQTERYLLERCLKSESSVHSNWALLYASQWGVTWAVQLALGRLDIDVNTATRRQGLTPLMLVTINNNEEIVVLLLGRNDIHINAQESKYLRTAFHIASASDEDRHQIAGHLLSRQNLDPNTHDCNNHNPLLYAVKKGFYDITRLILQRSDIRLDTPCYDDYSWLRWAVRHRNARIVSLFLERNDLNPNYDPFRPPLHEALSNKDTEIIQLLLARPDINPNVTDERDWTPLSAAVVIGCKANVQLLFNHPKTDLNAVPKGFMTPLMYATVLLDKEDIFQLLLTSLDVDPNVKDDELGDAPLLWSVYHGKETNVRLLLEHPKTDPNLSTKEGLTALAMAVRYEYRAIVEMLLEHPKIDRDLVSEIDGRTGMTPLAIAREEEFYDIVALLEKKDKD

SEQ ID NO: 14951 - DNA, 153 bp, Muscodor strobelii
  misc_feature: SGI EST ID NO. CUFF.35672.0
  misc_feature: Variant of the nucleotide sequence at SEQ ID NO 14949
cggatccaaatctttctaccaaagagggcttgacggcgttggctatggcagtacgctatgaatacagagcgattgtcgaaatgcttctagagcatcctaagatcgacagagatctggtttctgagatcgatggcaggacgggtatgacaccgc

SEQ ID NO: 14952 - DNA, 1053 bp, Muscodor strobelii
  misc_feature: SGI cDNA ID NO. 564941
  misc_feature: Elevated expression when VOC is produced
  misc_feature: Encodes the peptide sequence at SEQ ID NO 14953
atggcttcctcgtcctccaacgttgtcggtgtccactaccgggtcggcaagaagattggcgagggttcttttggtgtcatcttcgagggcaccaatctgttgaacaaccagcaggtggccatcaaatttgaaccacgcaagagtgatgcaccccagcttcgagatgaataccgcacatacaagatccttgtcggctgccccggcatccctaatgtctactactttggtcaagagggcctgcataacatcctggttatagatctgcttgggccgtccttggaggatctcttcgaccactgcaaccgcaggttctccatcaagaccgtcgtcatggtcgccaagcagatgttgtcccgcgtgcaaaccatccacgagaagaacctcatctaccgcgacatcaagcccgacaacttcctcatcggccggccccagaccaaggcggccaacgtcatccacgtcgtcgacttcggcatggccaagcagtaccgagaccccaagaccaagcagcacatcccttaccgcgagcgcaagtccctgtccggcaccgcccgctacatgagcatcaacacccacctgggccgcgagcagtcccgccgcgacgacctcgaggccctcggccacgtcttcatgtacttcctgcgcggcggcctcccctggcagggcctgaaggctgctactaacaagcagaagtacgagaagatcggcgagaagaagcagaccaccgcgattaaggatctctgcgagggcttccccgacgagttcaacaagtacctcacctacgtccgcaacctcggcttcgaggacacccccgactacgactacctgcgcgagctcttcacccaggccctcaagaacacgggcgaggtcgaggacggcgagtacgactggatgaaggccaccaaggaccagaacgccaagggctgggacgccatgcacaagggccacggcgcctaccacaaccccaacgcccgcccgggggccctcggcccatggagatccacgcccagtcccgcgccggcgcgagcacgccgcacctcacacgcgaccgtttaa

SEQ ID NO: 14953 - protein, 350 aa, Muscodor strobelii
  misc_feature: SGI Peptide ID NO. 564941
  misc_feature (13)..(279): Pfam Id: PF00069 Pfam Desc: Protein kinase domain
  misc_feature (13)..(238): Pfam Id: PF00069 Pfam Desc: Protein kinase domain
  misc_feature (13)..(42): Pfam Id: PF07714 Pfam Desc: Protein tyrosine kinase
  misc_feature (1)..(326): NCBI GI: 46137101 Blast Desc: FG10066.1 [Gibberella zeae PH-1]
  misc_feature (1)..(326): NCBI GI: 256732124 Blast Desc: NECHADRAFT_61152 [Nectria haematococca mpVI 77-13-4]
  misc_feature (1)..(323): NCBI GI: 242766638 Blast Desc: casein kinase, [Talaromyces stipitatus ATCC 10500] gi|218724407|gb|EED23824.1| casein kinase, [Talaromyces stipitatus ATCC 10500]
  misc_feature (7)..(327): NCBI GI: 156059612 Blast Desc: SS1G_03818 [Sclerotinia sclerotiorum 1980] gi|154701605|gb|EDO01344.1| SS1G_03818 [Sclerotinia sclerotiorum 1980]
  misc_feature (1)..(323): NCBI GI: 212528372 Blast Desc: casein kinase, [Penicillium marneffei ATCC 18224] gi|210073741|gb|EEA27828.1| casein kinase, [Penicillium marneffei ATCC 18224]
  misc_feature (1)..(327): NCBI GI: 145612111 Blast Desc: conserved [Magnaporthe grisea 70-15] gi|145019342|gb|EDK03570.1| conserved [Magnaporthe grisea 70-15]
  misc_feature (1)..(324): NCBI GI: 121709972 Blast Desc: casein kinase I, [Aspergillus clavatus NRRL 1] gi|119400752|gb|EAW11176.1| casein kinase I, [Aspergillus clavatus NRRL 1]
  misc_feature (2)..(326): NCBI GI: 85086081 Blast Desc: casein kinase I [Neurospora crassa OR74A] gi|28918714|gb|EAA28384.1| casein kinase I [Neurospora crassa OR74A] gi|29150119|emb|CAD79679.1| casein kinase I cki2 crassa]
  misc_feature (1)..(341): NCBI GI: 119187981 Blast Desc: CIMG_04038 [Coccidioides immitis RS]
  misc_feature (1)..(310): NCBI GI: 225683622 Blast Desc: casein kinase I [Paracoccidioides brasiliensis Pb03]
  misc_feature (3)..(339): SWISSPROT Homolog: EC 2.7.11.1 Non-specific serine/threonine protein kinase
  misc_feature: Useful for introducing or modulating the production of volatile compounds
MASSSSNVVGVHYRVGKKIGEGSFGVIFEGTNLLNNQQVAIKFEPRKSDAPQLRDEYRTYKILVGCPGIPNVYYFGQEGLHNILVIDLLGPSLEDLFDHCNRRFSIKTVVMVAKQMLSRVQTIHEKNLIYRDIKPDNFLIGRPQTKAANVIHVVDFGMAKQYRDPKTKQHIPYRERKSLSGTARYMSINTHLGREQSRRDDLEALGHVFMYFLRGGLPWQGLKAATNKQKYEKIGEKKQTTAIKDLCEGFPDEFNKYLTYVRNLGFEDTPDYDYLRELFTQALKNTGEVEDGEYDWMKATKDQNAKGWDAMHKGHGAYHNPNARPGALGPWRSTPSPAPARARRTSHATV

SEQ ID NO: 14954 - DNA, 2893 bp, Muscodor strobelii
  misc_feature: SGI EST ID NO. CUFF.36286.1
  misc_feature: Variant of the nucleotide sequence at SEQ ID NO 14952
cagttttccactgccctgctcgcctgtcgtcccctttgctgcgcagccgggcacaggcactgccagtctgctcatcctctccgtgttcgtgtcgtcgtctcaattcattccatccccattcctcccatccacggccagccaacgcatcgtccgctgctgctccagctcaccaccgccccgtccccccaacactgcccgactcgggccacggctggctctctcttcgttgtcgacgtcgtcgttgctgctgttgttgttcttggtgttgtcgtcgtcggtgttggattcccgtctcatctctcctctcctctctcctctctgcagcctcgttccgtcttccctcggcctccccttttgagagcaatggtcaatcgaagcctctgatcaccacgccgagcgagtgtcctcgatactctatcctcaacgtcctctttcgacgacagcaatacctcccgactaaatatccattgctatctttgaccgcccccattgtccgcagccagctagtccgtcgaccggtcccgattcggccccaactatcgcaatggcttcctcgtcctccaacgttgtcggtgtccactaccgggtcggcaagaagattggcgagggttcttttggtgtcatcttcgagggcaccaatctgttgaacaaccagcaggtggccatcaaatttgaaccacgcaagagtgatgcaccccagcttcgagatgaataccgcacatacaagatccttgtcggctgccgtgagtatagctgcacccgtaaacaagagagagacgagcttgatatgctgatcatcgtcgatccacagccggcatccctaatgtctactactttggtcaagagggcctgcataacatcctggttatagatctgcttgggccgtccttggaggatctcttcgaccactgcaaccgcaggttctccatcaagaccgtcgtcatggtcgccaagcagatgttgtcccgcgtgcaaaccatccacgagaagaacctcatctaccgcgacatcaagcccgacaacttcctcatcggccggccccagaccaaggcggccaacgtcatccacgtcgtcgacttcggcatggccaagcagtaccgagaccccaagaccaagcagcacatcccttaccgcgagcgcaagtccctgtccggcaccgcccgctacatgagcatcaacacccacctgggccgcgagcagtcccgccgcgacgacctcgaggccctcggccacgtcttcatgtacttcctgcgcggcggcctcccctggcagggcctgaaggctgctactaacaagcagaagtacgagaagatcggcgagaagaagcagaccaccgcgattaaggatctctgcgagggcttccccgacgagttcaacaagtacctcacctacgtccgcaacctcggcttcgaggacacccccgactacgactacctgcgcgagctcttcacccaggccctcaagaacacgggcgaggtcgaggacggcgagtacgactggatgaaggccaccaaggaccagaacgccaagggctgggacgccatgcacaagggccacggcgcctaccacaaccccaacgcccgcccgggggccctcggcccatggagatccacgcccagtcccgcgccggcgcgagcacgccgcacctcacacgcgaccgtttaaacgccgcgcagcccccacctccgtctccagccaaggggacggacccgcgccagcgaaacgcgcccgccggtttgaaagcacagcgcggaagcgcggtggggggcctccgggacatggccacgccgacgggttcgacccaggcccaattccagaacagcaaccagaacttgcccccgcgcatggcgccccaggcgagcaacgcccccatggctctgggcgctaacgacgtcgccagcgagccccagcccactggcttccagaagttcatgaaggttctttgctgcggttaaattgacttttcattatggcatgagagcgagctcatatagactaagaggtagttggatgtagaaatccacccttgccttgtatcgattttaataactattggctgtcttgcgagaggcaacccacctgttctctttcccggcatcagtatctgcctcgatcgcgaccgacacgaactacgagcctgctggaacacaaggattgatatactagctctacgctgaaacaagcatcaccctcaactcggcgatgaactatggcatgcgcaacgggctgcggatcatccgatacgcgcgactggtggttgtcaatacactaaacacgatcatcttcctctcgctcaggccaacacaccatcggctcaggtcgtgacgcgggcctctcttctgctttttatcacgactctcctttaacgaaatagagcctcgctgcgagcatttgcgatagcagaaacggcgccggcggggtttgtccaactcgaggttagcattgggaacctggtgttgtctacctgttgtgttctttttccattttctttttgccctttatggctacgtccctcgaacaataacaactgtctataatcgcaacaagcggagcggagcgggggaagagtacgactttgtgagggggatatactactgtagagagaaagatgtagaaataaggggagaagggggaataccatcactcagaacagatgatggaactggggacgtggacgggcacgcccggtgtggcttgagtgtagtgtaggcaagaggcgcggaaaaataaggcccggtgagaatagaggatgacaataggacatgaaaaattcatcttgaagcttttgcttgatatgtgacgtgttggatgcttgaaattgtgtgaggtaagggggaaatggatgtacactgagcaagttgtggccctatgattgaagtggtatgagtttact

SEQ ID NO: 14955 - DNA, 1266 bp, Muscodor strobelii
  misc_feature: SGI cDNA ID NO. 564942
  misc_feature: Reduced expression when VOC is produced
  misc_feature: Encodes the peptide sequence at SEQ ID NO 14956
atggcttcctcgtcctccaacgttgtcggtgtccactaccgggtcggcaagaagattggcgagggttcttttggtgtcatcttcgagggcaccaatctgttgaacaaccagcaggtggccatcaaatttgaaccacgcaagagtgatgcaccccagcttcgagatgaataccgcacatacaagatccttgtcggctgccccggcatccctaatgtctactactttggtcaagagggcctgcataacatcctggttatagatctgcttgggccgtccttggaggatctcttcgaccactgcaaccgcaggttctccatcaagaccgtcgtcatggtcgccaagcagatgttgtcccgcgtgcaaaccatccacgagaagaacctcatctaccgcgacatcaagcccgacaacttcctcatcggccggccccagaccaaggcggccaacgtcatccacgtcgtcgacttcggcatggccaagcagtaccgagaccccaagaccaagcagcacatcccttaccgcgagcgcaagtccctgtccggcaccgcccgctacatgagcatcaacacccacctgggccgcgagcagtcccgccgcgacgacctcgaggccctcggccacgtcttcatgtacttcctgcgcggcggcctcccctggcagggcctgaaggctgctactaacaagcagaagtacgagaagatcggcgagaagaagcagaccaccgcgattaaggatctctgcgagggcttccccgacgagttcaacaagtacctcacctacgtccgcaacctcggcttcgaggacacccccgactacgactacctgcgcgagctcttcacccaggccctcaagaacacgggcgaggtcgaggacggcgagtacgactggatgaaggccaccaaggaccagaacgccaagggctgggacgccatgcacaagggccacggcgcctaccacaaccccaacgcccgcccgggggccctcggcccatggagatccacgcccaccaaggggacggacccgcgccagcgaaacgcgcccgccggtttgaaagcacagcgcggaagcgcggtggggggcctccgggacatggccacgccgacgggttcgacccaggcccaattccagaacagcaaccagaacttgcccccgcgcatggcgccccaggcgagcaacgcccccatggctctgggcgctaacgacgtcgccagcgagccccagcccactggcttccagaagttcatgaaggttctttgctgcggttaa

SEQ ID NO: 14956 - protein, 421 aa, Muscodor strobelii
  misc_feature: SGI Peptide ID NO. 564942
  misc_feature (13)..(279): Pfam Id: PF00069 Pfam Desc: Protein kinase domain
  misc_feature (13)..(238): Pfam Id: PF00069 Pfam Desc: Protein kinase domain
  misc_feature (13)..(42): Pfam Id: PF07714 Pfam Desc: Protein tyrosine kinase
  misc_feature (1)..(421): NCBI GI: 256732124 Blast Desc: NECHADRAFT_61152 [Nectria haematococca mpVI 77-13-4]
  misc_feature (1)..(419): NCBI GI: 46137101 Blast Desc: FG10066.1 [Gibberella zeae PH-1]
  misc_feature (1)..(421): NCBI GI: 145612111 Blast Desc: conserved [Magnaporthe grisea 70-15] gi|145019342|gb|EDK03570.1| conserved [Magnaporthe grisea 70-15]
  misc_feature (7)..(421): NCBI GI: 156059612 Blast Desc: SS1G_03818 [Sclerotinia sclerotiorum 1980] gi|154701605|gb|EDO01344.1| SS1G_03818 [Sclerotinia sclerotiorum 1980]
  misc_feature (1)..(421): NCBI GI: 242766638 Blast Desc: casein kinase, [Talaromyces stipitatus ATCC 10500] gi|218724407|gb|EED23824.1| casein kinase, [Talaromyces stipitatus ATCC 10500]
  misc_feature (1)..(421): NCBI GI: 212528372 Blast Desc: casein kinase, [Penicillium marneffei ATCC 18224] gi|210073741|gb|EEA27828.1| casein kinase, [Penicillium marneffei ATCC 18224]
  misc_feature (1)..(421): NCBI GI: 121709972 Blast Desc: casein kinase I, [Aspergillus clavatus NRRL 1] gi|119400752|gb|EAW11176.1| casein kinase I, [Aspergillus clavatus NRRL 1]
  misc_feature (1)..(421): NCBI GI: 145255705 Blast Desc: An18g06050 [Aspergillus niger] gi|134084650|emb|CAK43328.1| protein product [Aspergillus niger]
  misc_feature (1)..(421): NCBI GI: 225683622 Blast Desc: casein kinase I [Paracoccidioides brasiliensis Pb03]
  misc_feature (1)..(421): NCBI GI: 119467996 Blast Desc: casein kinase I homolog, [Neosartorya fischeri NRRL 181] gi|119405956|gb|EAW15907.1| casein kinase I homolog, [Neosartorya fischeri NRRL 181]
  misc_feature (3)..(320): SWISSPROT Homolog: EC 2.7.11.1 Non-specific serine/threonine protein kinase
  misc_feature: Useful for introducing or modulating the production of volatile compounds
MASSSSNVVGVHYRVGKKIGEGSFGVIFEGTNLLNNQQVAIKFEPRKSDAPQLRDEYRTYKILVGCPGIPNVYYFGQEGLHNILVIDLLGPSLEDLFDHCNRRFSIKTVVMVAKQMLSRVQTIHEKNLIYRDIKPDNFLIGRPQTKAANVIHVVDFGMAKQYRDPKTKQHIPYRERKSLSGTARYMSINTHLGREQSRRDDLEALGHVFMYFLRGGLPWQGLKAATNKQKYEKIGEKKQTTAIKDLCEGFPDEFNKYLTYVRNLGFEDTPDYDYLRELFTQALKNTGEVEDGEYDWMKATKDQNAKGWDAMHKGHGAYHNPNARPGALGPWRSTPTKGTDPRQRNAPAGLKAQRGSAVGGLRDMATPTGSTQAQFQNSNQNLPPRMAPQASNAPMALGANDVASEPQPTGFQKFMKVLCCG

SEQ ID NO: 14957 - DNA, 2893 bp, Muscodor strobelii; identical to SEQ ID NO: 14954
  misc_feature: SGI EST ID NO. CUFF.36286.1
  misc_feature: Variant of the nucleotide sequence at SEQ ID NO 14955

SEQ ID NO: 14958 - DNA, 1014 bp, Muscodor strobelii
  misc_feature: SGI cDNA ID NO. 564943
  misc_feature: Encodes the peptide sequence at SEQ ID NO 14959
atgacctcttcaaatgtgatatcacaacgagagacaatagatgatgaagcatctctagaagagattggcgttggccaatgtggtgtcgtattcagtatccacgagactcgagaagttgtaaagcgtgctacgggcatgccgttcttcactcgtcaaatcaagccagactacgaaaaccacatcagagtttacagatcacaccatggctacgaggaagtacaggttcctaaacctatcgagtttattgaagctgaaagctatgtcgactggcaagataggcgtaacgtcaagtttcaggaacacgaagcgcggtatcgagagcctgcatgtctactcgtgtctgagaggattctgccgctccctaagaccaccagagacacattagtcgacctcttctgtccggaagaacttcgagacgaagcgaagatatcgcggagaaacaagagttgcttggtgcgactgtatctaggagctcgcttggctagggttggggcagcagcaggggacttttcgctgcgaaacttcgagctgacgttggatcgaacctcagaaactggattgaacttggtggccgttgctgagcgtatgggaagctctttagcgagggttcattggggagctaatatctgcggtcgtgatgttgaatacgtccttggctccgtcaggccggatacgatatcatcacctgggcaaggaggtggtaattcgctaagtttcttcggacaggcggtcgatatgtggcttcttgactttaatcaatgtgagcccatcggtgtagatgatgcaggcgtcgagatgtgcgtaagtgcattttgggacaacgatcaatactaccctcggccaggtacggatgaagagctttgggatgcttttaagttagcatacttgagaaggagtgctgagatccttccagaatccacgtttcctcaggaatttattgtgcaggtggaagagaaagccggtacagccctgagtagacctccacctccaccaccacctcttgtcaagacctaa

SEQ ID NO: 14959 - protein, 337 aa, Muscodor strobelii
  misc_feature: SGI Peptide ID NO. 564943
  misc_feature (21)..(306): NCBI GI: 85115824 Blast Desc: NCU00787 [Neurospora crassa OR74A] gi|28926741|gb|EAA35707.1| [Neurospora crassa OR74A] gi|38636394|emb|CAE81931.1| conserved [Neurospora crassa]
  misc_feature (11)..(313): NCBI GI: 256721808 Blast Desc: NECHADRAFT_53311 [Nectria haematococca mpVI 77-13-4]
  misc_feature (19)..(299): NCBI GI: 255933580 Blast Desc: Pc12g13620 [Penicillium chrysogenum Wisconsin 54-1255] gi|211582788|emb|CAP80989.1| Pc12g13620 [Penicillium chrysogenum Wisconsin 54-1255]
  misc_feature (19)..(329): NCBI GI: 258576863 Blast Desc: [Uncinocarpus reesii 1704] gi|237902879|gb|EEP77280.1| [Uncinocarpus reesii 1704]
  misc_feature (9)..(309): NCBI GI: 169624919 Blast Desc: SNOG_15726 [Phaeosphaeria nodorum SN15] gi|111055701|gb|EAT76821.1| SNOG_15726 [Phaeosphaeria nodorum SN15]
  misc_feature (2)..(313): NCBI GI: 255945641 Blast Desc: Pc20g10990 [Penicillium chrysogenum Wisconsin 54-1255] gi|211588323|emb|CAP86428.1| Pc20g10990 [Penicillium chrysogenum Wisconsin 54-1255]
  misc_feature (19)..(281): NCBI GI: 256731351 Blast Desc: NECHADRAFT_49569 [Nectria haematococca mpVI 77-13-4]
  misc_feature (14)..(302): NCBI GI: 238504462 Blast Desc: conserved [Aspergillus flavus NRRL3357] gi|220690933|gb|EED47282.1| conserved [Aspergillus flavus NRRL3357]
  misc_feature (2)..(305): NCBI GI: 256729454 Blast Desc: NECHADRAFT_84043 [Nectria haematococca mpVI 77-13-4]
  misc_feature (22)..(320): NCBI GI: 169609865 Blast Desc: SNOG_08024 [Phaeosphaeria nodorum SN15] gi|160701933|gb|EAT84300.2| SNOG_08024 [Phaeosphaeria nodorum SN15]
MTSSNVISQRETIDDEASLEEIGVGQCGVVFSIHETREVVKRATGMPFFTRQIKPDYENHIRVYRSHHGYEEVQVPKPIEFIEAESYVDWQDRRNVKFQEHEARYREPACLLVSERILPLPKTTRDTLVDLFCPEELRDEAKISRRNKSCLVRLYLGARLARVGAAAGDFSLRNFELTLDRTSETGLNLVAVAERMGSSLARVHWGANICGRDVEYVLGSVRPDTISSPGQGGGNSLSFFGQAVDMWLLDFNQCEPIGVDDAGVEMCVSAFWDNDQYYPRPGTDEELWDAFKLAYLRRSAEILPESTFPQEFIVQVEEKAGTALSRPPPPPPPLVKT

SEQ ID NO: 14960 - DNA, 417 bp, Muscodor strobelii
  misc_feature: SGI EST ID NO. CUFF.35693.0
  misc_feature: Variant of the nucleotide sequence at SEQ ID NO 14958
gactttaatcaatgtgagcccatcggtgtagatgatgcaggcgtcgagatgtgcgtaagtgcattttgggacaacgatcaatactaccctcggccaggtacggatgaagagctttgggatgcttttaagttagcatacttgagaaggagtgctgagatccttccagaatccacgtttcctcaggaatttattgtgcaggtggaagagaaagccggtacagccctgagtagacctccacctccaccaccacctcttgtcaagacctaacaaatggcgggatcatgctccaaatgcctaacagactttaaaacgtcggtagaactaaatggcactgctgctataagaaggagccatttcacgatcaccgtcaagtcatattatcaactcgggccgtgtcaatcgccaaacgattagaaa

SEQ ID NO: 14961 - DNA, 705 bp, Muscodor strobelii
  misc_feature: SGI cDNA ID NO. 564944
  misc_feature: Elevated expression when VOC is produced
  misc_feature: Encodes the peptide sequence at SEQ ID NO 14962
atgaagctgacgatctctttggcactcttcggagttgcgtccgcccattataccttcccaggccttatttacaacggcgtgaccgccgctgattggtcatatgttcgccagacaacgaactatcaaagtcacggcccagtccaagatgtgaccagctcacaaattcgatgctacgagatgacccctggcacaggtgcagcaaagacccaaacagtcgccgctggtcaaaaagtcggtttccgcgtcgaccccgatattcagcaccctggacctcttcagttctatttagccaaggtcccttctggccagacagcagcttcctgggccggagatggtaacgtttggttcaagatttatcaagatggcccaggcttcacgtcctcgggcttgacttggcctacgcaaggcactacccagagcaacgggccaaccactgttaatgtgacgatcccctcgtgtatcgccccaggagattaccttcttcgagtcgagcacatcgctcttcattctgcaggacagaccggcggtgctcagttctatctgtcttgcggtcaattgactgttactggtagcggtaccaagacgttccccggtgtcgctttccctggtgcttacaaggcaaccgatcccggtattcttatcaatatttactacccggttcccaccagctacaccaacccagggcctgccgtcgtgtcttgctag

SEQ ID NO: 14962 - protein, 234 aa, Muscodor strobelii
  misc_feature: SGI Peptide ID NO. 564944
  misc_feature (1)..(226): Pfam Id: PF03443 Pfam Desc: Glycosyl hydrolase family 61
  misc_feature (67)..(217): Pfam Id: PF03443 Pfam Desc: Glycosyl hydrolase family 61
  misc_feature (1)..(233): NCBI GI: 189202962 Blast Desc: fungal cellulose binding domain containing protein [Pyrenophora tritici-repentis Pt-1C-BFP] gi|187984916|gb|EDU50404.1| fungal cellulose binding domain
  misc_feature (16)..(234): NCBI GI: 116203843 Blast Desc: CHGG_09805 [Chaetomium globosum CBS 148.51] gi|88175933|gb|EAQ83401.1| CHGG_09805 [Chaetomium globosum CBS 148.51]
  misc_feature (16)..(234): NCBI GI: 85092580 Blast Desc: NCU02344 [Neurospora crassa OR74A] gi|28920895|gb|EAA30230.1| conserved [Neurospora crassa OR74A] gi|40804596|emb|CAF05857.1| related to cellulose binding protein
  misc_feature (18)..(234): NCBI GI: 171680024 Blast Desc: protein product [Podospora anserina] gi|170939638|emb|CAP64865.1| protein product [Podospora anserina]
  misc_feature (16)..(234): NCBI GI: 171681359 Blast Desc: protein product [Podospora anserina] gi|170940638|emb|CAP65866.1| protein product [Podospora anserina]
  misc_feature (16)..(231): NCBI GI: 169596128 Blast Desc: SNOG_00815 [Phaeosphaeria nodorum SN15] gi|160701235|gb|EAT92310.2| SNOG_00815 [Phaeosphaeria nodorum SN15]
  misc_feature (4)..(233): NCBI GI: 67540516 Blast Desc: AN6428.2 [Aspergillus nidulans FGSC A4] gi|40739260|gb|EAA58450.1| AN6428.2 [Aspergillus nidulans FGSC A4] gi|259479347|tpe|CBF69492.1| TPA: conserved [Aspergillus FGSC
  misc_feature (3)..(234): NCBI GI: 116200239 Blast Desc: CHGG_08275 [Chaetomium globosum CBS 148.51] gi|88179554|gb|EAQ87022.1| CHGG_08275 [Chaetomium globosum CBS 148.51]
  misc_feature (1)..(234): NCBI GI: 85076191 Blast Desc: NCU03328 [Neurospora crassa OR74A] gi|28881165|emb|CAD70347.1| related to cellulose binding protein CEL1 [Neurospora crassa] gi|28916920|gb|EAA26656.1| conserved
  misc_feature (18)..(234): NCBI GI: 39945892 Blast Desc: MGG_08066 [Magnaporthe grisea 70-15] gi|145019304|gb|EDK03532.1| MGG_08066 [Magnaporthe grisea 70-15]
  misc_feature (54)..(233): SWISSPROT Homolog: EC 3.2.1.4 Cellulase
  misc_feature: Useful for introducing or modulating the production of volatile compounds
MKLTISLALFGVASAHYTFPGLIYNGVTAADWSYVRQTTNYQSHGPVQDVTSSQIRCYEMTPGTGAAKTQTVAAGQKVGFRVDPDIQHPGPLQFYLAKVPSGQTAASWAGDGNVWFKIYQDGPGFTSSGLTWPTQGTTQSNGPTTVNVTIPSCIAPGDYLLRVEHIALHSAGQTGGAQFYLSCGQLTVTGSGTKTFPGVAFPGAYKATDPGILINIYYPVPTSYTNPGPAVVSC

SEQ ID NO: 14963 - DNA, 1035 bp, Muscodor strobelii
  misc_feature: SGI EST ID NO. CUFF.35697.0
  misc_feature: Variant of the nucleotide sequence at SEQ ID NO 14961
tgaatactcaacacacggctagccagtgcatcacaacccaatacattaaccatgaagctgacgatctctttggcactcttcggagttgcgtccgcccattataccttcccaggccttatttacaacggcgtgaccgccgctgattggtcatatgttcgccagacaacgaactatcaaagtcacggcccagtccaagatgtgaccagctcacaaattcgatgctacgagatgacccctggcacaggtgcagcaaagacccaaacagtcgccgctggtcaaaaagtcggtttccgcgtcgaccccgatattcagcaccctggacctcttcagttctatttagccaaggtcccttctggccagacagcagcttcctgggccggagatggtaacgtttggttcaagatttatcaagatggcccaggcttcacgtcctcgggcttgacttggcctacgcaaggcactacccagagcaacgggccaaccactgttaatgtgacgatcccctcgtgtatcgccccaggagattaccttcttcgagtcgagcacatcgctcttcattctgcaggacagaccggcggtgctcagttctatctgtcttgcggtcaattgactgttactggtagcggtaccaagacgttccccggtgtcgctttccctggtgcttacaaggcaaccgatcccggtattcttatcaatatttactacccggttcccaccagctacaccaacccagggcctgccgtcgtgtcttgctagatcatacggtatatcataatctatctatctcgaactccacaacatgtgtattcaagccaaggggaaggagagagttcaactagattaagaaacttatttggtgttggtaccatatatataaactatccaaacacaccaactatcgccctcgggcaaatatacagtcatttcccgtttggttaagtggtcaattgtcagtaaatcagggtcagtttttcttagtgctaacctagttatggtatgataagtcaacacgtaaatgtgcccagcttgatgcgg

SEQ ID NO: 14964 - DNA, 1524 bp, Muscodor strobelii
  misc_feature: SGI cDNA ID NO. 564945
  misc_feature: Elevated expression when VOC is produced
  misc_feature: Encodes the peptide sequence at SEQ ID NO 14965
atgcgaatagagtttaacacacaaggcagtactccctctgagaggaacaccttttcatccttcgacagttccaggctgagacttctacagctcctgctaggaattgctactatcacttctccattgactgcgactatctattttcctttgctcccgctgttgcgagaacacttccgcacttcagcgcaagctgtcaatcttactctcactatatatatcgtattccagggtatatcgccagctctgtttgggccgttgtcagatttctacggccgtcgaccattattcctgctgactttgcttctctattctatcggcaatgttggcttggctctcaatcaacatagctatgctgcgctgttggtattacgggccatacagagtctaggcgcgagcgctgcatatgccataagctttggtgtcgtcgcagatgtatgccctccgagcgagaggggccgcatgctagggccaataagcatggctctcaacttaggcgcatgtattggcccaattgcgggaggtgctgtagcatataggagtggcggttttgaatgggtattttgggctcttgtggtagttggattcatcctgttcacaggcgttggattgtttttgccagagacagcaagaactctggtcggttctggagatgatccatcacgatacaagtggtggcaattgagctggattgggcttgtgcgtcaggatgcaaaacatcgcaaactgcgacagaaggaaaaagaatctcccgatcgaaagtttaactcgcaagaatacatgggaaagggctacagctttgccagttttttagccacctttcgtatcatattccatagagatactatactggttctctggatgcatgggtctttttatgttgtcgactacgccttcgttgcagcgttgcccgatatcttcaaggattaccatttcaatgaactagaaattggtttagcttacctcccacgtggtgtaggcatcatcattggcagctacttcactggaaagttgatggatcacaactatcgtcacatttccagacgaattggttggagcggggacaaggcagcgggacatgatcttgttcgttttccgattgaaatatcacgaactcgattcagctactggatgctggtgatttccacggcaacgatgatcggctatggttggacggtgtactatcgcgctcacttctctattgctctggtgttacagttctcacaaggcttctggggaacttacttctatactacatacagtgctcttctggtcgactcgtttccacagagtcctagtaccgcggctgcgactacgagtatcacgcgaacactaatggcagccgcaggtgtggccatactgcagcccgtcattaatgtagcaggaaggggatggtacttcactgtcctaggcttgtggagcggcatctttggctatgtggctattttcctattgagatggaaaggtatggcatggagaagaatgcgaaacggactagctccatgtgacgacgactcaagtgcataa

SEQ ID NO: 14965 - protein, 507 aa, Muscodor strobelii
  misc_feature: SGI Peptide ID NO. 564945
  misc_feature (33)..(450): Pfam Id: PF07690 Pfam Desc: Major Facilitator Superfamily
  misc_feature (33)..(498): Pfam Id: PF00083 Pfam Desc: Sugar (and other) transporter
  misc_feature (42)..(210): Pfam Id: PF00083 Pfam Desc: Sugar (and other) transporter
  misc_feature (18)..(485): NCBI GI: 67900580 Blast Desc: AN7277.2 [Aspergillus nidulans FGSC A4] gi|40741958|gb|EAA61148.1| AN7277.2 [Aspergillus nidulans FGSC A4]
  misc_feature (10)..(485): NCBI GI: 259483376 Blast Desc: TPA: conserved [Aspergillus nidulans FGSC A4]
  misc_feature (8)..(499): NCBI GI: 39944636 Blast Desc: MGG_04329 [Magnaporthe grisea 70-15] gi|145015068|gb|EDJ99636.1| MGG_04329 [Magnaporthe grisea 70-15]
  misc_feature (6)..(349): NCBI GI: 145228561 Blast Desc: An01g01480 [Aspergillus niger] gi|134054680|emb|CAK43521.1| protein product [Aspergillus niger]
  misc_feature (15)..(495): NCBI GI: 121707893 Blast Desc: MFS transporter, [Aspergillus clavatus NRRL 1] gi|119400118|gb|EAW10544.1| MFS transporter, [Aspergillus clavatus NRRL 1]
  misc_feature (18)..(495): NCBI GI: 156031347 Blast Desc: SS1G_14095 [Sclerotinia sclerotiorum 1980] gi|154699497|gb|EDN99235.1| SS1G_14095 [Sclerotinia sclerotiorum 1980]
  misc_feature (36)..(493): NCBI GI: 242769557 Blast Desc: MFS transporter, [Talaromyces stipitatus ATCC 10500] gi|218724985|gb|EED24402.1| MFS transporter, [Talaromyces stipitatus ATCC 10500]
  misc_feature (19)..(466): NCBI GI: 70993750 Blast Desc: MFS transporter [Aspergillus fumigatus Af293] gi|66849356|gb|EAL89684.1| MFS transporter, [Aspergillus fumigatus Af293] gi|159125356|gb|EDP50473.1| MFS transporter,
  misc_feature (8)..(495): NCBI GI: 119500304 Blast Desc: MFS transporter, [Neosartorya fischeri NRRL 181] gi|119415074|gb|EAW25012.1| MFS transporter, [Neosartorya fischeri NRRL 181]
  misc_feature (18)..(495): NCBI GI: 171676988 Blast Desc: protein product [Podospora anserina] gi|170936561|emb|CAP61221.1| protein product [Podospora anserina]
  misc_feature: Useful for introducing or modulating the production of volatile compounds
MRIEFNTQGSTPSERNTFSSFDSSRLRLLQLLLGIATITSPLTATIYFPLLPLLREHFRTSAQAVNLTLTIYIVFQGISPALFGPLSDFYGRRPLFLLTLLLYSIGNVGLALNQHSYAALLVLRAIQSLGASAAYAISFGVVADVCPPSERGRMLGPISMALNLGACIGPIAGGAVAYRSGGFEWVFWALVVVGFILFTGVGLFLPETARTLVGSGDDPSRYKWWQLSWIGLVRQDAKHRKLRQKEKESPDRKFNSQEYMGKGYSFASFLATFRIIFHRDTILVLWMHGSFYVVDYAFVAALPDIFKDYHFNELEIGLAYLPRGVGIIIGSYFTGKLMDHNYRHISRRIGWSGDKAAGHDLVRFPIEISRTRFSYWMLVISTATMIGYGWTVYYRAHFSIALVLQFSQGFWGTYFYTTYSALLVDSFPQSPSTAAATTSITRTLMAAAGVAILQPVINVAGRGWYFTVLGLWSGIFGYVAIFLLRWKGMAWRRMRNGLAPCDDDSSA

SEQ ID NO: 14966 - DNA, 3326 bp, Muscodor strobelii
  misc_feature: SGI EST ID NO. CUFF.35700.0
  misc_feature: Variant of the nucleotide sequence at SEQ ID NO 14964
ctggcgtctagttgtgtttcgccaacgtgcaaaaacatgagtttagaacttcagtctctcatcgattgttcccatgcggtgaatctccccttccctggagatttccgcgtcgatgacagtgtgctggcattgttcccagaggggactgaaatactgtccgccaatcgattcgggacttcagcgtggaccgtgacggcccgtatccacttcagacttcctaatggatctgagcagcgattttttctgaaatcagcaccgggaagtcatggccatacgttgatgaaaggtgaattcaacgctatgtctgagctctataagtgggctcccgatctagtaccgaaaccacattcattcggcaagtatcacatcagagagccagaagcgtattttttcctctctgaatatgtcgacatgagtgaaaggatgcccgacccagctcaacttggagctaagattgctcgtcttcatcgtgcaagccaatcaccgaacggccagttcggcttccatgttactacatgtcaaggacgtgtaccgcaggatgtgtcatgggaacaaagttggccgaaatttttcgcgaaactcttacagcatgttatcaaactggatttcgagctcaatggatactgggagcagcttgatatagttgagaaacgtcttatctccgacgtcattccacggttgctgggcgctcttgaagctaatggccgaagtatcaaaccgagcctcatacatgcagatctttgggaaggtaacacgggcacgtctttcgaaaatgggaacatatacatcttcgattctgcagccttttacggccacaatgaaatggaagtgggtgactggcgttgtcattacaacaagatccacaataaggtgtatacaaaggcttacctccgcaactttgcgcccagcgaaccgaaagatgagtgggatgaccgaaatcgactctactgcatatatttcaacatcatatactccgttaatcacctctcccaaggaacagctgtgcggcagaatgcctacaacgacatctactatcttatagacaaattcgctccatttccaggggacagtggcccagagaaactgaagccgtccgatatggccacactttcctctgagcgcgaccacaccatgtgacgtgttccaatctgtgctagccgcgggcacgtatttgacttaagctcgtcgatagagataaacaatatgcagtttagcttaagtcttgagatcgttgctatgaaatcgtgtgacataggctgaacatttcccgtataactatttgttgtattccaactcggcgattgctacacaatgggactcacacttcctcatagactgataaccagttagtcgcaatctacagtacagctggtcaatgacatcatatcaagcattctttttatccgccacgtcagcgtagccgccgaaccatgagccctgtgtacactgtgcaaggcaattatcccatgccgatccagtacgtacggctccctgttggtgactgcgcaacacccttgctgcatcattctccccgcatttcagcataaacctgccactttgaatcagatgcattgatttgaggggaactatctctttctcaattccgatgttcacttgaacatatgatcctagctatagaggcagtggatggccctatgcataccatgagatactacacgcataacgggctgatgtgattgttaagtagcagaagatgtttgagccaaaaaagccagattcggtcttaacgacagagcagcagagcatcgctcgcgatatgcgaatagagtttaacacacaaggcagtactccctctgagaggaacaccttttcatccttcgacagttccaggctgagacttctacagctcctgctaggaattgctactatcacttctccattgactgcgactatctattttcctttgctcccgctgttgcgagaacacttccgcacttcagcgcaagctgtcaatcttactctcactatatatatcgtattccagggtatatcgccagctctgtttgggccgttgtcagatttctacggccgtcgaccattattcctgctgactttgcttctctattctatcggcaatgttggcttggctctcaatcaacatagctatgctgcgctgttggtattacgggccatacagagtctaggcgcgagcgctgcatatgccataagctttggtgtcgtcgcagatgtatgccctccgagcgagaggggccgcatgctagggccaataagcatggctctcaacttaggcgcatgtattggcccaattgcgggaggtgctgtagcatataggagtggcggttttgaatgggtattttgggctcttgtggtagttggattcatcctgttcacaggcgttggattgtttttgccagagacagcaagaactctggtcggttctggagatgatccatcacgatacaagtggtggcaattgagctggattgggcttgtgcgtcaggatgcaaaacatcgcaaactgcgacagaaggaaaaagaatctcccgatcgaaagtttaactcgcaagaatacatgggaaagggctacagctttgccagttttttagccacctttcgtatcatattccatagagatactatactggttctctggatgcatgggtctttttatgttgtcgactacgccttcgttgcagcgttgcccgatatcttcaaggattaccatttcaatgaactagaaattggtttagcttacctcccacgtggtgtaggcatcatcattggcagctacttcactggaaagttgatggatcacaactatcgtcacatttccagacgaattggttggagcggggacaaggcagcgggacatgatcttgttcgttttccgattgaaatatcacgaactcgattcagctactggatgctggtgatttccacggcaacgatgatcggctatggttggacggtgtactatcgcgctcacttctctattgctctggtgttacagttctcacaaggcttctggggaacttacttctatactacatacagtgctcttctggtcgactcgtttccacagagtcctagtaccgcggctgcgactacgagtatcacgcgaacactaatggcagccgcaggtgtggccatactgcagcccgtcattaatgtagcaggaaggggatggtacttcactgtcctaggcttgtggagcggcatctttggctatgtggctattttcctattgagatggaaaggtatggcatggagaagaatgcgaaacggactagctccatgtgacgacgactcaagtgcataatcacaaactcgaaatataatgcaga

SEQ ID NO: 14967 - DNA, 1101 bp, Muscodor strobelii
  misc_feature: SGI cDNA ID NO. 564946
  misc_feature: Elevated expression when VOC is produced
  misc_feature: Encodes the peptide sequence at SEQ ID NO 14968
atgagtttagaacttcagtctctcatcgattgttcccatgcggtgaatctccccttccctggagatttccgcgtcgatgacagtgtgctggcattgttcccagaggggactgaaatactgtccgccaatcgattcgggacttcagcgtggaccgtgacggcccgtatccacttcagacttcctaatggatctgagcagcgattttttctgaaatcagcaccgggaagtcatggccatacgttgatgaaaggtgaattcaacgctatgtctgagctctataagtgggctcccgatctagtaccgaaaccacattcattcggcaagtatcacatcagagagccagaagcgtattttttcctctctgaatatgtcgacatgagtgaaaggatgcccgacccagctcaacttggagctaagattgctcgtcttcatcgtgcaagccaatcaccgaacggccagttcggcttccatgttactacatgtcaaggacgtgtaccgcaggatgtgtcatgggaacaaagttggccgaaatttttcgcgaaactcttacagcatgttatcaaactggatttcgagctcaatggatactgggagcagcttgatatagttgagaaacgtcttatctccgacgtcattccacggttgctgggcgctcttgaagctaatggccgaagtatcaaaccgagcctcatacatgcagatctttgggaaggtaacacgggcacgtctttcgaaaatgggaacatatacatcttcgattctgcagccttttacggccacaatgaaatggaagtgggtgactggcgttgtcattacaacaagatccacaataaggtgtatacaaaggcttacctccgcaactttgcgcccagcgaaccgaaagatgagtgggatgaccgaaatcgactctactgcatatatttcaacatcatatactccgttaatcacctctcccaaggaacagctgtgcggcagaatgcctacaacgacatctactatcttatagacaaattcgctccatttccaggggacagtggcccagagaaactgaagccgtccgatatggccacactttcctctgagcgcgaccacaccatgtga

SEQ ID NO: 14968 - protein, 366 aa, Muscodor strobelii
  misc_feature: SGI Peptide ID NO. 564946
  misc_feature (42)..(337): Pfam Id: PF03881 Pfam Desc: Fructosamine kinase
  misc_feature (21)..(365): NCBI GI: 145228563 Blast Desc: An01g01490 [Aspergillus niger] gi|134054681|emb|CAK43522.1| protein product [Aspergillus niger]
  misc_feature (24)..(338): NCBI GI: 116206070 Blast Desc: CHGG_02328 [Chaetomium globosum CBS 148.51] gi|88182925|gb|EAQ90393.1| CHGG_02328 [Chaetomium globosum CBS 148.51]
  misc_feature (19)..(343): NCBI GI: 116214451 Blast Desc: CHGG_11066 [Chaetomium globosum CBS 148.51] gi|88175421|gb|EAQ82890.1| CHGG_11066 [Chaetomium globosum CBS 148.51]
  misc_feature (10)..(340): NCBI GI: 240110347 Blast Desc: CPC735_063790 [Coccidioides posadasii C735 delta SOWgp]
  misc_feature (21)..(325): NCBI GI: 258563734 Blast Desc: [Uncinocarpus reesii 1704] gi|237908119|gb|EEP82520.1| [Uncinocarpus reesii 1704]
  misc_feature (10)..(340): NCBI GI: 119180471 Blast Desc: CIMG_08864 [Coccidioides immitis RS]
  misc_feature (21)..(347): NCBI GI: 261356147 Blast Desc: conserved [Verticillium albo-atrum VaMs.102]
  misc_feature (23)..(340): NCBI GI: 145603980 Blast Desc: MGG_10482 [Magnaporthe grisea 70-15] gi|145012092|gb|EDJ96748.1| MGG_10482 [Magnaporthe grisea 70-15]
  misc_feature (19)..(335): NCBI GI: 169765035 Blast Desc: [Aspergillus oryzae RIB40] gi|83764843|dbj|BAE54987.1| protein product [Aspergillus oryzae]
  misc_feature (36)..(357): NCBI GI: 171678070 Blast Desc: protein product [Podospora anserina] gi|170937104|emb|CAP61762.1| protein product [Podospora anserina]
  misc_feature: Useful for introducing or modulating the production of volatile compounds
MSLELQSLIDCSHAVNLPFPGDFRVDDSVLALFPEGTEILSANRFGTSAWTVTARIHFRLPNGSEQRFFLKSAPGSHGHTLMKGEFNAMSELYKWAPDLVPKPHSFGKYHIREPEAYFFLSEYVDMSERMPDPAQLGAKIARLHRASQSPNGQFGFHVTTCQGRVPQDVSWEQSWPKFFAKLLQHVIKLDFELNGYWEQLDIVEKRLISDVIPRLLGALEANGRSIKPSLIHADLWEGNTGTSFENGNIYIFDSAAFYGHNEMEVGDWRCHYNKIHNKVYTKAYLRNFAPSEPKDEWDDRNRLYCIYFNIIYSVNHLSQGTAVRQNAYNDIYYLIDKFAPFPGDSGPEKLKPSDMATLSSERDHTM

SEQ ID NO: 14969 - DNA, 3326 bp, Muscodor strobelii; identical to SEQ ID NO: 14966
  misc_feature: SGI EST ID NO. CUFF.35700.0
  misc_feature: Variant of the nucleotide sequence at SEQ ID NO 14967

SEQ ID NO: 14970 - DNA, 2997 bp, Muscodor strobelii
  misc_feature: SGI cDNA ID NO. 564947
  misc_feature: Encodes the peptide sequence at SEQ ID NO 14971
atgacacagctctaccagcgtatggagaacaatctagctcgttcctcgcgaaagtctgacaagttattgacacggacaataatcgaatggtctatctgttctcaaaggccgctgagtattaaggaactatcgcaggctctcagtccaaccttttcaggcttcctttctctcaagcgcaccatccaggacacgtgtgggcagttcgtacaaatcgacgaggctgaaaatgtgaacatactccatcacacagcccgcgagtacttcatacattcctcacaaagtgatttccaggtcaatttgaaggcgacgcatgagaagctgttcatacgaacgctccatgtattcgaagatggcaatctgcgatggagactcctggagaaccaacacacactccaatcaagcgagccattcactttctattctgcgatcagctggccatttcatcttggtcagagcagctcattgtcgtccgctacattcgatattcttgtaagattctttcggagctctggtgttctagcatgggctcataccctagcattacttcgccgactggaagtgcttgtcaaagcatctaaggttttatcaaactttgtcaaaaatacgaggagacgcaatgcatcgcagaacccgatgcttcatcgtctttcggatcttgagcttctcagtgattgggcggtagatcttttgagactggtgggcagattcgctagcaacatgatcgcgaagccagaagtactgtacgatgtgattcccgctgtgtgccccccgaaatcaatactcttcaaacagtttcataatattgcaaacataaaagccaccggcgtcgcagatagcggctggaacgacaatctgtgccgcctggtccttccagacgaggtacaggcatggaacatgtcatgtggcggtaaatacctctcggttttggggtccaacgggataatctacacctgggactcctcgaactttaccgaagtttctaccattagtcatggagagcctataacagcatttgcattgagtggaaatggtggtaaactttgcactttcggcttgaagaacacaaagatgtggtccacgatttctggtcaacttgtgtcggcaactcctagccctatcaataccaaagcattatctatagcttttgctgaaaacgatggcaaggtagtatttggcggagatgacaatatcatctggcacatgaagactgataccatggagcaagggtggcaggttttgaatcctgcgattctgaaagatacagcacaaattgatggtgctgtcattaattcgcccatgtatttttcgttcaatggcgacaagagccaggttggcgtctcataccgaggtgcaccactttcagtgtggagtctccgtgacgggcgctgcatcaaccgctgtagacgagccgccgacttgaggatagaccagagaaggccgtcggctaattggtttgcagtggaccgtttcacttggaactttgcaactggtcatatactcggcgtctaccgggatggttgcatcttcaaatggcagcctttaaccgaggagaatgttgaggtgaattgggcagctgacgagatcgcggcgagtcccaatggaagagttttcgcgaccagcagtagcgatggaacggttcgcgtatgggacttcgcttctttcagcgtgatctatcaactctcatctgagagtttggtaacagagttagctttcagtactgatagccgtcgtttctacgacctccgtgatggatcggtcaacgcctgggaacctaacagcctaactcgatttcttgaaggaagccattacatcagcgattcttctagcgagtaccagtcatctacggcaatgtcaaagtattctgaagaatgggttgaggaattcgtagccggtaccgccttcgcccttgcacctaataatgagtggtattgcgttggctatgaggacggaactatcaattggtttcaaaaaggcaactcgaacggagtggcatttccacagttctacaatggtctgtccgtatctagcatatcttggagtcttgacagccgagtcgtggccctagttgaccttgctggcgacatacaaattctcaggattgatcgatgtctgaagagtgaaggggcgaaactcgcggcgcctgaaatactacctcaaccgaaaatcaagcgcaatgaccgcatcatccaggaagttgtattcagtgtcgatggtgaattggtactgatttctacagcagaaaccgcatttgtctgcactaccgcgaacgggaacctccttatttctcgagatcttaatttaaaagaagatactaggtggttgtatcatgcttccttgccgaatctggtactatgttgtggtccttggagagttgatgcgtacagctggaacacgatggaaatgaattggtctgtggatatttgtgctgttgctcgtttcaccaattttgagacgacgagcatcccaaacatcgacgcggagacgaacagattatccgcaatggcagtttcggatgggcggacgacttcttccaaaaccaaaaggatatctttcacccatgatgcttctgatattttgatctcgacaaatttcatgagtggcgcagaacgaatttccaatcatctcagtattgtgccgatgacggcactatcagaagaacagcgtggatctaagaagaatgagcatggagcggcattatgcatcccagatgctgtcttttcacatgtactcctaccccttggcatactagcaggatcgaggttggtattcatcgaccatgagtactggctgtgttcattccagatgggaaggcaatatcaaacgaccgttacagagctataccatcgtttctacttcatcccaagaagttggctcacaaaggacagtctagagcactgcgtattagcagatgatggaacgctttattggccgaaggacgaccgcgttatcttgatagagtgtagcctagacgaaacgagacttacgtctgtgttttaa

SEQ ID NO: 14971 - protein, 998 aa, Muscodor strobelii
  misc_feature: SGI Peptide ID NO. 564947
  misc_feature (528)..(550): Pfam Id: PF00400 Pfam Desc: WD domain, G-beta repeat
  misc_feature (1)..(992): NCBI GI: 259483375 Blast Desc: TPA: NACHT and WD domain protein (AFU_orthologue; AFUA_3G07460) [Aspergillus nidulans FGSC A4]
  misc_feature (1)..(971): NCBI GI: 67900580 Blast Desc: AN7277.2 [Aspergillus nidulans FGSC A4] gi|40741958|gb|EAA61148.1| AN7277.2 [Aspergillus nidulans FGSC A4]
  misc_feature (1)..(986): NCBI GI: 258565149 Blast Desc: [Uncinocarpus reesii 1704] gi|237907020|gb|EEP81421.1| [Uncinocarpus reesii 1704]
  misc_feature (1)..(985): NCBI GI: 171679052 Blast Desc: protein product [Podospora anserina] gi|170937597|emb|CAP62256.1| protein product [Podospora anserina]
  misc_feature (1)..(929): NCBI GI: 116202953 Blast Desc: CHGG_09361 [Chaetomium globosum CBS 148.51] gi|88177879|gb|EAQ85347.1| CHGG_09361 [Chaetomium globosum CBS 148.51]
  misc_feature (1)..(985): NCBI GI: 119180469 Blast Desc: CIMG_08863 [Coccidioides immitis RS]
  misc_feature (1)..(985): NCBI GI: 240110346 Blast Desc: WD domain, G-beta repeat containing protein [Coccidioides posadasii C735 delta SOWgp]
  misc_feature (1)..(932): NCBI GI: 116206072 Blast Desc: CHGG_02329 [Chaetomium globosum CBS 148.51] gi|88182926|gb|EAQ90394.1| CHGG_02329 [Chaetomium globosum CBS 148.51]
  misc_feature (1)..(969): NCBI GI: 46135873 Blast Desc: FG09452.1 [Gibberella zeae PH-1]
  misc_feature (1)..(968): NCBI GI: 256733681 Blast Desc: NECHADRAFT_36093 [Nectria haematococca mpVI 77-13-4]
MTQLYQRMENNLARSSRKSDKLLTRTIIEWSICSQRPLSIKELSQALSPTFSGFLSLKRTIQDTCGQFVQIDEAENVNILHHTAREYFIHSSQSDFQVNLKATHEKLFIRTLHVFEDGNLRWRLLENQHTLQSSEPFTFYSAISWPFHLGQSSSLSSATFDILVRFFRSSGVLAWAHTLALLRRLEVLVKASKVLSNFVKNTRRRNASQNPMLHRLSDLELLSDWAVDLLRLVGRFASNMIAKPEVLYDVIPAVCPPKSILFKQFHNIANIKATGVADSGWNDNLCRLVLPDEVQAWNMSCGGKYLSVLGSNGIIYTWDSSNFTEVSTISHGEPITAFALSGNGGKLCTFGLKNTKMWSTISGQLVSATPSPINTKALSIAFAENDGKVVFGGDDNIIWHMKTDTMEQGWQVLNPAILKDTAQIDGAVINSPMYFSFNGDKSQVGVSYRGAPLSVWSLRDGRCINRCRRAADLRIDQRRPSANWFAVDRFTWNFATGHILGVYRDGCIFKWQPLTEENVEVNWAADEIAASPNGRVFATSSSDGTVRVWDFASFSVIYQLSSESLVTELAFSTDSRRFYDLRDGSVNAWEPNSLTRFLEGSHYISDSSSEYQSSTAMSKYSEEWVEEFVAGTAFALAPNNEWYCVGYEDGTINWFQKGNSNGVAFPQFYNGLSVSSISWSLDSRVVALVDLAGDIQILRIDRCLKSEGAKLAAPEILPQPKIKRNDRIIQEVVFSVDGELVLISTAETAFVCTTANGNLLISRDLNLKEDTRWLYHASLPNLVLCCGPWRVDAYSWNTMEMNWSVDICAVARFTNFETTSIPNIDAETNRLSAMAVSDGRTTSSKTKRISFTHDASDILISTNFMSGAERISNHLSIVPMTALSEEQRGSKKNEHGAALCIPDAVFSHVLLPLGILAGSRLVFIDHEYWLCSFQMGRQYQTTVTELYHRFYFIPRSWLTKDSLEHCVLADDGTLYWPKDDRVILIECSLDETRLTSVF

SEQ ID NO: 14972 - DNA, 5107 bp, Muscodor strobelii
  misc_feature: SGI EST ID NO. CUFF.35708.0
  misc_feature: Variant of the nucleotide sequence at SEQ ID NO 14970
tcgcaatgcttgttcgaggcgagagaggctaaacacgctggagatcgatgagtaaacgactgaaatgagatagtcgcattcgcacacagtccgtcgtcgcttacaggaacatttcctcctagagaaacataattggaatgtcacaatgttcaaacgctttcgccataagaaggcagggcaagacgatggggcagcccgacacgtttctgaaaacactgatcaagatcctgtccgcggacgaccatctggacttcttagtctaccatcgacgcaaagttcaattacgggtgcgcgaagtcgcagtccttctccctcgattactggattgggacttcatgttatttaccagccggattatgcggctctcgatatcatcttcgttcatgggctcggaggacatagccagaaaacttggtcgaaagaccatgacacgtcctttttctggccagaactttggcttccgttcgagcctgatatcagcagcgctcgtatcctgacattcggttacaactcaacatggcgtggcgcgacgaaatccgtctcaggaatcactgactttgccaaagaactgttgttcgagatgcggttcggccgagatgattcgggacaactcttggagcttggaacgaaacctatcatcttcgtggttcatagcatggggggtctggtagtcaaaaaggcatatcttcttggcttgcacgacgaaaactactcgaacatcatccatggtgtatcttctatcatgtttctctcgaccccgcaccgcggaactaacctcgcggagactctcaacaaggtccttgtggcatcattccagtctagcaaaaatttcatatcggacctaaacaaaagctcgccagcaatcgaagaactaaacgagcaatttcgccatttggctcctaggctatctatttggtctttttatgaaacattggcaacccccattggaccgcggaaagtcatggtactagagaaagatacgtcagtgcttggatatccggcggagatttccagacccctccaagccgatcatcatactgtctgcaaattttcgagcccatcagaccctagttatataacagtaaaaaatgccatcaaatccttagtcactggtttccaaaaggaaagggccgaagaaccacgtcaggattacgacgtaacgatctcatcaggcgagtctttagacattcacgccatgtttcacaactgtccaaatccagagatagacttcatctcgctcagacgattatggatttcaggaacatgtgaatggtttctcgaagaacaggaagtgaagttgtggctcaatatagccggaactgaaccggctgtgctttggtacactgctccgcctgcaaacgggaaatcggtcttagcagcatatacaatcaatcaccttcgatcacttggtctatgttgccaatttttcattttcaagtattcccataatgcaaaacggcttgttgcgaactgcatcaaatctttggcgttccagctagcgaaaaactctcctcatttcagaaaactcttggcgacagcaacaagagagagtttgggcttagattcaatagattccgcatcaatatggcgaaacgttgttgaaggtattctattacaaatcaaattagagagacccatatactggatcatcgatgctttggacgaatgcgattctcccaagatgctccttgagtgcttcagatcgtttggggacggcggggtcccagtgagaatactagtccttagccggaaagaagaagcaataactatgaatttcgaaagactctctcgctcattacccgtgtctcgaattgaaaagtcaatgaaagggcacacacagaaagatatacactttttagttgagagagagctcgatcatatgcgcggaagtgtcaaaatccgagaacaacttcaacaaagtatattatcgcgctctgaaggaaatttcctttgggcaaaactagtacttgatgaaataatgagctgtcatactgaagatagtattcgggaagttcttgaagagcttcccgatgacatgacacagctctaccagcgtatggagaacaatctagctcgttcctcgcgaaagtctgacaagttattgacacggacaataatcgaatggtctatctgttctcaaaggccgctgagtattaaggaactatcgcaggctctcagtccaaccttttcaggcttcctttctctcaagcgcaccatccaggacacgtgtgggcagttcgtacaaatcgacgaggctgaaaatgtgaacatactccatcacacagcccgcgagtacttcatacattcctcacaaagtgatttccaggtcaatttgaaggcgacgcatgagaagctgttcatacgaacgctccatgtattcgaagatggcaatctgcgatggagactcctggagaaccaacacacactccaatcaagcgagccattcactttctattctgcgatcagctggccatttcatcttggtcagagcagctcattgtcgtccgctacattcgatattcttgtaagattctttcggagctctggtgttctagcatgggctcataccctagcattacttcgccgactggaagtgcttgtcaaagcatctaaggttttatcaaactttgtcaaaaatacgaggagacgcaatgcatcgcagaacccgatgcttcatcgtctttcggatcttgagcttctcagtgattgggcggtagatcttttgagactggtgggcagattcgctagcaacatgatcgcgaagccagaagtactgtacgatgtgattcccgctgtgtgccccccgaaatcaatactcttcaaacagtttcataatattgcaaacataaaagccaccggcgtcgcagatagcggctggaacgacaatctgtgccgcctggtccttccagacgaggtacaggcatggaacatgtcatgtggcggtaaatacctctcggttttggggtccaacgggataatctacacctgggactcctcgaactttaccgaagtttctaccattagtcatggagagcctataacagcatttgcattgagtggaaatggtggtaaactttgcactttcggcttgaagaacacaaagatgtggtccacgatttctggtcaacttgtgtcggcaactcctagccctatcaataccaaagcattatctatagcttttgctgaaaacgatggcaaggtagtatttggcggagatgacaatatcatctggcacatgaagactgataccatggagcaagggtggcaggttttgaatcctgcgattctgaaagatacagcacaaattgatggtgctgtcattaattcgcccatgtatttttcgttcaatggcgacaagagccaggttggcgtctcataccgaggtgcaccactttcagtgtggagtctccgtgacgggcgctgcatcaaccgctgtagacgagccgccgacttgaggatagaccagagaaggccgtcggctaattggtttgcagtggaccgtttcacttggaactttgcaactggtcatatactcggcgtctaccgggatggttgcatcttcaaatggcagcctttaaccgaggagaatgttgaggtgaattgggcagctgacgagatcgcggcgagtcccaatggaagagttttcgcgaccagcagtagcgatggaacggttcgcgtatgggacttcgcttctttcagcgtgatctatcaactctcatctgagagtttggtaacagagttagctttcagtactgatagccgtcgtttctacgacctccgtgatggatcggtcaacgcctgggaacctaacagcctaactcgatttcttgaaggaagccattacatcagcgattcttctagcgagtaccagtcatctacggcaatgtcaaagtattctgaagaatgggttgaggaattcgtagccggtaccgccttcgcccttgcacctaataatgagtggtattgcgttggctatgaggacggaactatcaattggtttcaaaaaggcaactcgaacggagtggcatttccacagttctacaatggtctgtccgtatctagcatatcttggagtcttgacagccgagtcgtggccctagttgaccttgctggcgacatacaaattctcaggattgatcgatgtctgaagagtgaaggggcgaaactcgcggcgcctgaaatactacctcaaccgaaaatcaagcgcaatgaccgcatcatccaggaagttgtattcagtgtcgatggtgaattggtactgatttctacagcagaaaccgcatttgtctgcactaccgcgaacgggaacctccttatttctcgagatcttaatttaaaagaagatactaggtggttgtatcatgcttccttgccgaatctggtactatgttgtggtccttggagagttgatgcgtacagctggaacacgatggaaatgaattggtctgtggatatttgtgctgttgctcgtttcaccaattttgagacgacgagcatcccaaacatcgacgcggagacgaacagattatccgcaatggcagtttcggatgggcggacgacttcttccaaaaccaaaaggatatctttcacccatgatgcttctgatattttgatctcgacaaatttcatgagtggcgcagaacgaatttccaatcatctcagtattgtgccgatgacggcactatcagaagaacagcgtggatctaagaagaatgagcatggagcggcattatgcatcccagatgctgtcttttcacatgtactcctaccccttggcatactagcaggatcgaggttggtattcatcgaccatgagtactggctgtgttcattccagatgggaaggcaatatcaaacgaccgttacagagctataccatcgtttctacttcatcccaagaagttggctcacaaaggacagtctagagcactgcgtattagcagatgatggaacgctttattggccgaaggacgaccgcgttatcttgatagagtgtagcctagacgaaacgagacttacgtctgtgttttaaggtagcaaccgaagatatcacagttgattgttgcccatctttcgtatcataggcgacatgcttgttttctatccg

SEQ ID NO: 14973 - DNA, 1047 bp, Muscodor strobelii
  misc_feature: SGI cDNA ID NO. 564948
  misc_feature: Encodes the peptide sequence at SEQ ID NO 14974
atgccgtcgccgggtacgatacctatcgtggacatcggagcatggacgggcggatcggctacagataggaaacgcattgcttcagaactcactgatgcctgtcgccgcgtcggcttcgtttacgtggtgaaccatggtctgccagctacattggtcgaagaagctttttcctattctaaaaggctatttgacttgccccttgagcaaaagatgcttgcaccccatccacctgggccgaacgtgcatagggggtattcgtggccaggtcttgagaaagtgtcgcagactatatacggggatggagaagagggaaaacaggctgagagccgtaagatcgctgacgtcaaggaaagctatgaaattggtagtgaagagctcgatcggcagccgaatgtctggctaccagaggatctactgcccggcttccgagagtttatgatctcgttctattggcattgtttcgatgtagccaaggagttacttcaagcactcgctctcggaattgggttagatgatgaggatttctttcttcaatttcacagcggcgtaaataatcagctgcgactgctgcattatccacccgttggcatccagagtcttgctcgcaatgaggtcgctcgaatgccggcacattcggactggggcagtatcacactgcttttccaggatagaagtggtggtctgcaagtcgaggatccgcataagtctggacttttcgttgatgcgaaacccgttgaagacacgctcatcatgaatgttggggacttgcttatgagatggaccaataacaatctcaaatcgactctgcatcgcgtcacacttccacccgtcgatatcagccattcgattggaaacgaagacagaaacgttccgagcacgacggtgacccattcacgctattccataccatactttgtgacgacagatccgacagctgtgatcgaatgcttgtctgtatgtacaaacgctgaaaacccgcctcagtatccgcctataacgcaggaagactatcgacgcatgagagcgcgagggcaatactccgaataa

SEQ ID NO: 14974 - protein, 348 aa, Muscodor strobelii
  misc_feature: SGI Peptide ID NO. 564948
  misc_feature (183)..(308): Pfam Id: PF03171 Pfam Desc: 2OG-Fe(II) oxygenase superfamily
  misc_feature (7)..(346): NCBI GI: 261205846 Blast Desc: thymine dioxygenase [Ajellomyces dermatitidis SLH14081] gi|239592719|gb|EEQ75300.1| thymine dioxygenase [Ajellomyces dermatitidis SLH14081]
  misc_feature (7)..(346): NCBI GI: 239611124 Blast Desc: thymine dioxygenase [Ajellomyces dermatitidis ER-3]
  misc_feature (7)..(346): NCBI GI: 240281834 Blast Desc: conserved [Ajellomyces capsulatus H143]
  misc_feature (3)..(346): NCBI GI: 240109896 Blast Desc: isopenicillin N synthetase, [Coccidioides posadasii C735 delta SOWgp]
  misc_feature (3)..(346): NCBI GI: 119184540 Blast Desc: CIMG_07058 [Coccidioides immitis RS]
  misc_feature (25)..(346): NCBI GI: 225558914 Blast Desc: thymine dioxygenase [Ajellomyces capsulatus G186AR]
  misc_feature (6)..(346): NCBI GI: 169764869 Blast Desc: [Aspergillus oryzae RIB40] gi|238503862|ref|XP_002383163.1| gibberellin 20-oxidase, [Aspergillus flavus NRRL3357] gi|83764760|dbj|BAE54904.1| protein
  misc_feature (5)..(346): NCBI GI: 39959754 Blast Desc: MGG_09410 [Magnaporthe grisea 70-15] gi|145014374|gb|EDJ98942.1| MGG_09410 [Magnaporthe grisea 70-15]
  misc_feature (7)..(346): NCBI GI: 226285967 Blast Desc: conserved [Paracoccidioides brasiliensis Pb01]
  misc_feature (6)..(346): NCBI GI: 255947630 Blast Desc: Pc22g05480 [Penicillium chrysogenum Wisconsin 54-1255] gi|211591599|emb|CAP97836.1| Pc22g05480 [Penicillium chrysogenum Wisconsin 54-1255]
  misc_feature (7)..(337): SWISSPROT Homolog: EC 1.14.11.23 Flavonol synthase
  misc_feature (7)..(337): SWISSPROT Homolog: EC 1.14.11.9 Flavanone 3-dioxygenase
MPSPGTIPIVDIGAWTGGSATDRKRIASELTDACRRVGFVYVVNHGLPATLVEEAFSYSKRLFDLPLEQKMLAPHPPGPNVHRGYSWPGLEKVSQTIYGDGEEGKQAESRKIADVKESYEIGSEELDRQPNVWLPEDLLPGFREFMISFYWHCFDVAKELLQALALGIGLDDEDFFLQFHSGVNNQLRLLHYPPVGIQSLARNEVARMPAHSDWGSITLLFQDRSGGLQVEDPHKSGLFVDAKPVEDTLIMNVGDLLMRWTNNNLKSTLHRVTLPPVDISHSIGNEDRNVPSTTVTHSRYSIPYFVTTDPTAVIECLSVCTNAENPPQYPPITQEDYRRMRARGQYSE

SEQ ID NO: 14975 - DNA, 555 bp, Muscodor strobelii
  misc_feature: SGI EST ID NO. CUFF.35706.0
  misc_feature: Variant of the nucleotide sequence at SEQ ID NO 14973
tcggaattgggttagatgatgaggatttctttcttcaatttcacagcggcgtaaataatcagctgcgactgctgcattatccacccgttggcatccagagtcttgctcgcaatgaggtcgctcgaatgccggcacattcggactggggcagtatcacactgcttttccaggatagaagtggtggtctgcaagtcgaggatccgcataagtctggacttttcgttgatgcgaaacccgttgaagacacgctcatcatgaatgttggggacttgcttatgagatggaccaataacaatctcaaatcgactctgcatcgcgtcacacttccacccgtcgatatcagccattcgattggaaacgaagacagaaacgttccgagcacgacggtgacccattcacgctattccataccatactttgtgacgacagatccgacagctgtgatcgaatgcttgtctgtatgtacaaacgctgaaaacccgcctcagtatccgcctataacgcaggaagactatcgacgcatgagagcgcgagggcaatactccgaataatctt

SEQ ID NO: 14976 - DNA, 1302 bp, Muscodor strobelii
  misc_feature: SGI cDNA ID NO. 564949
  misc_feature: Encodes the peptide sequence at SEQ ID NO 14977
atggagactgatgatgtgaaaacaccaacaggcgcgccacagcaaagaagctacccaccgccgccaacctcaccaccagcaaatcagaccaagttctaccctccgccgccaggaaccccgggctttgcgcctcctggaacaccaagcttcccacctccaggagcagctcagcagcaacaaagatatgcgacaccgccgcagcaaaactacccaccaccacagcagagctatcctgccccgccgcagcaaagtacatcgcccccgtcaaagacaggaactccgatgtcatatccggcgcctcctggccagcagcagcaacagcaacaacagcaataccaatctcctccgccacagcagcagcagattcactcgccacctccccaacaacagcagcacatgaaccttccaatccgtaacaatggtgccggaacgcctcctgggcccgcagcaccggcgtactccgaagcggcgcctaatgctccaacaggctaccctcaagagaagtctggagcgctgcaacattcaccatcatcatccgcggggccggcggctcccgcggccaacatgggagctggtgcgccatctcctggtcattttgtaggcgcaggcgcgagtgctacagtagacgacgtagggacgtttaacggtggctcataccggatcagtcaccgtgactgcaataccattgtgacagttcaacttgcaatgggttgccccttgagcgctaaagcgggagtcttgatcgcaatgagcccgaccattacgctcaaaggcgagtacaaattcagcatgaagaaactggtgacatccggcgagttcggccattcgacattcatcggtcccggagagcttctgctcgcgcctggtcagctgggcgacatcacgaccattaggctgtccggcagtgagtcatggagcgtcggaaaggacgcctacgtggcgagcacgcagggcgtcaaccgtgattacaaacgtcaaggactcggtaaggccatgttttcaggcgagggtctttgggtgcacaagatcaatggtgttggcttactctggatcacgagcttcggtgctatcattcgcaaggacctggtggagggcgagaagtacattgttgacaacggccatctcgtagcctggaatgtaaaatatgtgatggaacgtgttgcgagtggtggcctgatcggaggctttgctagcggcgaaggtcttgtgtgcaagttcaccggtccgggaaccgtcttcttgcaaacgaggaatccgcgaggtttcagcgcctacatgtccggaaatgcggcgccaccatga

SEQ ID NO: 14977 - protein, 433 aa, Muscodor strobelii
  misc_feature: SGI Peptide ID NO. 564949
  misc_feature (217)..(430): Pfam Id: PF01987 Pfam Desc: Domain of function DUF124
  misc_feature (15)..(428): NCBI GI: 145610949 Blast Desc: MGG_11494 [Magnaporthe grisea 70-15] gi|145018281|gb|EDK02560.1| MGG_11494 [Magnaporthe grisea 70-15]
  misc_feature (15)..(428): NCBI GI: 46137297 Blast Desc: FG10164.1 [Gibberella zeae PH-1]
  misc_feature (191)..(428): NCBI GI: 256731767 Blast Desc: NECHADRAFT_61207 [Nectria haematococca mpVI 77-13-4]
  misc_feature (17)..(431): NCBI GI: 164425315 Blast Desc: NCU04645 [Neurospora crassa OR74A] gi|157070879|gb|EAA29952.2| [Neurospora crassa OR74A]
  misc_feature (192)..(431): NCBI GI: 116179870 Blast Desc: CHGG_00563 [Chaetomium globosum CBS 148.51] gi|88184860|gb|EAQ92328.1| CHGG_00563 [Chaetomium globosum CBS 148.51]
  misc_feature (192)..(431): NCBI GI: 238843627 Blast Desc: DUF124 domain-containing protein [Microsporum canis CBS 113480]
  misc_feature (192)..(429): NCBI GI: 154279368 Blast Desc: [Ajellomyces capsulatus NAm1] gi|150412440|gb|EDN07827.1| [Ajellomyces capsulatus NAm1]
  misc_feature (108)..(426): NCBI GI: 226283988 Blast Desc: DUF124 domain-containing protein [Paracoccidioides brasiliensis Pb01]
  misc_feature (192)..(430): NCBI GI: 261205112 Blast Desc: DUF124 domain-containing protein [Ajellomyces dermatitidis SLH14081] gi|239592352|gb|EEQ74933.1| DUF124 domain-containing protein [Ajellomyces dermatitidis SLH14081]
  misc_feature (192)..(430): NCBI GI: 239611489 Blast Desc: DUF124 domain-containing protein [Ajellomyces dermatitidis ER-3]
METDDVKTPTGAPQQRSYPPPPTSPPANQTKFYPPPPGTPGFAPPGTPSFPPPGAAQQQQRYATPPQQNYPPPQQSYPAPPQQSTSPPSKTGTPMSYPAPPGQQQQQQQQQYQSPPPQQQQIHSPPPQQQQHMNLPIRNNGAGTPPGPAAPAYSEAAPNAPTGYPQEKSGALQHSPSSSAGPAAPAANMGAGAPSPGHFVGAGASATVDDVGTFNGGSYRISHRDCNTIVTVQLAMGCPLSAKAGVLIAMSPTITLKGEYKFSMKKLVTSGEFGHSTFIGPGELLLAPGQLGDITTIRLSGSESWSVGKDAYVASTQGVNRDYKRQGLGKAMFSGEGLWVHKINGVGLLWITSFGAIIRKDLVEGEKYIVDNGHLVAWNVKYVMERVASGGLIGGFASGEGLVCKFTGPGTVFLQTRNPRGFSAYMSGNAAPP

SEQ ID NO: 14978 - DNA, 5347 bp, Muscodor strobelii
  misc_feature: SGI EST ID NO. CUFF.35849.0
  misc_feature: Variant of the nucleotide sequence at SEQ ID NO 14976
cagacttgctgaaaaaacagattacttctgtattgctttcatattgaaaatagcgcgactctgttgcttttgatcatcacgacttcctagctgctcggctgctctgggtacctgcgaagatattggtggcctcaatacctcgtccctgtcataaatacttgatgggcggccgtctcaaatactcatagagcaccccaaccagacgaatgcttcaattctttgccacaccgcgtgaacactacttccacctaccgcattcgagcatcgaaatgcatacacaggcaaatgcagaattgcggtttccactcacatcctagacccttccctaaagtcttatgcccagccttagggtaaggtttcgaataaccgccaaagacaccctagcgtaccgtctgacgggaaagttcaagccgccgctctttagtaccaccaatcgactgcatccgcagagggcgcaagcttacgaagtgtgcaagacgagtcgatcgttttaccggtcagattgcgacacgcaaatgccaaatggactctctgggcagaggacggaacgacgtatatgtattcgatcaaccgatcggtcaattgccacggcccccaattcgagaccaagacagtaggcggttagaagctgggagctgaaattagcaacaccaatagaaactccttgcagtgagcaccagccaacgagagacgcgccgagcggattggcgcgtggtgcgggcgggtaacggctccaggcccccagcttcgggaagagggacacccaaatgtgtctgagctgtctcctatccttcgactttcttcaacgttatcgccagatctgagctgttctgagagctttgtcgatacgaaagagctgtcaagcaataatccagccaaatcatctaaataacttggattataagcaacattgggcttgatagacgcccattaccagtttttgtataccttggtagattgacaataggtcgtaaaatatcacgcacatcaccttgcagtatagattgtttgccccaaagtcgaacacaaagccatgtcggcccaatactatcccccgcctccaggcgccgggtcatcaggtatgtgatatccacgtttacacggcgtcgtgcgacaattaagagcggggagagagctcgttatgccatttgtgatgcgggttgtctctaagagtcacggtcttcaacctagcgaaggttgcttcatcaacgggaagatatttcttacctgaaggatgagcagttcaatatcacgaagcaacaatggagactgatgatgtgaaaacaccaacaggcgcgccacagcaaagaagctacccaccgccgccaacctcaccaccagcaaatcagaccaagttctaccctccgccgccaggaaccccgggctttgcgcctcctggaacaccaagcttcccacctccaggagcagctcagcagcaacaaagatatgcgacaccgccgcagcaaaactacccaccaccacagcagagctatcctgccccgccgcagcaaagtacatcgcccccgtcaaagacaggaactccgatgtcatatccggcgcctcctggccagcagcagcaacagcaacaacagcaataccaatctcctccgccacagcagcagcagattcactcgccacctccccaacaacagcagcacatgaaccttccaatccgtaacaatggtgccggaacgcctcctgggcccgcagcaccggcgtactccgaagcggcgcctaatgctccaacaggctaccctcaagagaagtctggagcgctgcaacattcaccatcatcatccgcggggccggcggctcccgcggccaacatgggagctggtgcgccatctcctggtcattttgtaggcgcaggcgcgagtgctacagtagacgacgtagggacgtttaacggtggctcataccggatcagtcaccgtgactgcaataccattgtgacagttcaacttgcaatgggttgccccttgagcgctaaagcgggagtcttgatcgcaatgagcccgaccattacgctcaaaggcgagtacaaattcagcatgaagaaactggtgacatccggcgagttcggccattcgacattcatcggtcccggagagcttctgctcgcgcctggtcagctgggcgacatcacgaccattaggctgtccggcagtgagtcatggagcgtcggaaaggacgcctacgtggcgagcacgcagggcgtcaaccgtgattacaaacgtcaaggactcggtaaggccatgttttcaggcgagggtctttgggtgcacaagatcaatggtgttggcttactctggatcacgagcttcggtgctatcattcgcaaggacctggtggagggcgagaagtacattgttgacaacggccatctcgtagcctggaatgtaaaatatgtgatggaacgtgttgcgagtggtggcctgatcggaggctttgctagcggcgaaggtcttgtgtgcaagttcaccggtccgggaaccgtcttcttgcaaacgaggaatccgcgaggtttcagcgcctacatgtccggaaatgcggcgccaccatgatcggatactcctcggcagactcggtagtgttggatctggtagttctcattgccggtgggagagatgtcggatggatggtgcagtgcgctaggagtttgtgggcaaggatcccatttttcatggtgttgatgatgttgatgaaagtgacggactttgttatgcagttggctagcggtaaatgtaacctgcaagtgatattacgatcatgtgagcctgcacgccgttttcgatatatcgttatccagacccaatgaaaaagttttctaagcatgcagtgccttctcacatcagcttcaagcgccagcgactctttctctatacgacgtaagcagacctttgcattaggtcaagagctgtctacatgcaaaggactgcttacaccgtatggccggcagacaagtcctggcactagttcggtgggttatgtaagatcctgataggtagatatcggggttgtgcattagagatactggattctgcatgtgccgaaggggaggatttgttctccgacgttctgtcttcttccctctcgccttttctccatctgtctgcatgtgaaccccgtctcatccacctggagagtcgtatttttggatcaggaggtattgtcgatctccctacctttcagcttaagctctcctgcccacgggctgtgctgatgagtaggctgatgattgattaaatgagggcttgctttcataaaaatgtctcctcatcactcacgcactttgtcttgcctgccgaaacactcacttgcgcccaatgtactactatgttatatgtgtgagtctgaaaccacccacttggtctccatggatgtctcgtgtcttcggcatctgtttctaaattttgttacatgagggtggcattgtggatataccccgcttcacctgagctatcttcatcaacaatcaatatgaacaggcacgtgcgacgaggatcggggatgaaatgaaagtgcctgactccacgtctgatcttgctatcgacggcggtcaagcatgaactcatcgccccagacatcatgcgcagagggaggagcaataggttcaaagcacgagcaggcattgaagtgatcccccgatagtagcagcagctatgtatttgggcaaaaatgctccaccccctgttctgtatgggttcggtgttatcaccaacgagtttgccagcaagtcggtgaaaacggccatgcatctacgtgtacattataccgacgttcccgacgaaagccggtccgttctgaggcatgagcggaccatttgccctgaatcatcatgaagttgcaagcgaaaacggtcgagactgtcttggcggtcattcaaacagctgatatcacggtgtctttattccccatcatacccgttgagggtgcaaatgcgaggtttaatagtctggcgggcgcgtattcatctcgcatcactatgcagtggtcctttaaggcctgtcatttctttggcaataagctgtcaagctatagctcgtttcgatacatgaagccgtgttatgttgtcgcgagttgggcgggaggggaggtaataaggtcgttgggcaactttctcgaaagtcgttacagtaagctggcttaaaagaggatttccgtttatgtgatgggatcgcgtggccatgtcggagtaacgtagtaattgccgtcacccaagtaggcgaaccccgaacccctgtctatgcttgatttattgtccgaatcagacctgattgattcgttctggtctactgctgtcaatccactccaacaaagagcagtgcatggaagctgcagcactattgctgcataatcaggcgagatacgagtggatttaaggaaactaaacaagcttgcaagtatgtgcctactgtattcatgaatcccatgtgtttcgtcacaacgtcccgctgttacagtggcgcaaacatgagtgcataatgtgccacaagactgcaccctttcggtcaagaatcgtttcgaacagtgaacacaggtgtaacctgtctggccctttagtacgcaattacttgcacgtgagtaaagcgtaattagttgtacgttttatgcacaagcataacattgactagcgcgatcgtagctctaaagagttgcttaaaataatttaaagtagaaaatgatggcatcaacagccctttggcctgcgccatccgtcattcgctcatctcgggcatttctttgcacgccttgggctctgcgagatagtcttagctgcgttacaaagtcctgcagacacagactagtaagcccgataagctgggacttcattgcagctggtctgagagtagctaagatgtcctgggaaattccgctaggctaagctttcagaacgccaaactggagacaccatggaatctctctgatgtgatgggaattatatgccgaaaagatggcatttgggatcttgccgaagcctcctagtcacagaagagcgcgtgacaacttgaggcagcaattgccatatcctcttcccaatacttgcggaataccattgcaggtgccgttcttgcagtaccgtagtaacacgactgaactgtcgtccgcgtacgccacagggaccgacgacccgtgatatcctattcgtttgctcgtttgctagatgcacatcaccacggattcctttcatcgtcaaagatagtcacttaccacatacatgatgaaacgtcgaggttcatcgccgatctaaaagacattggtgatagctagaaagtaaacattcatttgcctgccgtgaaagatattctattcatggctgcggtgtgcaattttggaaacggtgaga

SEQ ID NO: 14979 - DNA, 1482 bp, Muscodor strobelii
  misc_feature: SGI cDNA ID NO. 564950
  misc_feature: Encodes the peptide sequence at SEQ ID NO 14980
atgccagcgcccaagcctgagctacgagtgcgtcgctaccatagccgatcgcgaaatggatgcaccacctgcaaaacgaaacacatacgttgtgatgagagacgcccgttatgtacgaactgtctcgtgaaaggcggtgaatgtggatatacggattcaaaggtcaagccgaaatctatagagccatgtgaaacggtcgtggaaaacgacgatcaacaatggcacgctggcaacagcatgctacggacagcagcgccttatcacatgtttgtcggctatccagttgagatgggggacgagtcgagattcttatttgatatattcacgaagtatcggagcatcgttcagaaagatgggcttgtccagcctgaatcctttatcattcgtcgagcattgtcaaatcccgcgtgtttacacgtcgctttgttgatgacggccattaaattcacttgggatacgggttctatggatcgtataaagaaatcattccttcaccacaaacttgaagcaatcaagttcgtcaacgaacaacttcacagcccgggtattgcatcgaacgagtgtacgatagcgagtatttctgcgttagcacttgcggagagcgcccttggatgccgcgacacagcaagagcgcacatgggcggactttggcagcttttagagatgcgagaggacatcaagctcaccgatgggaatatcttccagagcatggtcatcctgacgtcaaggggtacaggcaagcttacgttgcgagaacttctgcaagtgacaaagggcatccaaaacgaagaatgcatgggcatgactacgtttagtaccatccccgagagattccgccttctgctagacagcgacgacttcggtcacttgaccgtaggcgacatatttgaggaggccaccgaaagcgccgtaggaatcaagccgacgaccatgccgacgaatgcagtgagccgagcgcgtttgatgagctgctatctgtgtgttttcgcgatgctaggaacaaatgtggtggacccgttcatgctcaactggcttatcgaatggatgctgtcggatctcactcgtgaggaggaagcgatgcgccaaggcaaatttcccaagcaaatctggttttggggcgttctgatggtgacatgcgcggttgcgacggcgaagcctagcacgaacctggaaaccttccagatcgaggaatggagagagctgtgtcgcgaaaagattcgaatggtcagccacgccctcaacctaacgacatgggaacagacgaaagaagtattcatgtcgtgggtatggagggacaactacgacgaagaacagcaggtgagggagatgtgggaggaggccgtctatggtcgaactattgcagtgacccgcacaacatcccccagctgctacgaccgccatgacttcatgtctgccaaacaccgcgcgaagtccatcatctggacacaacatactcatatgaagagactgatgctgatatga

SEQ ID NO: 14980 - protein, 493 aa, Muscodor strobelii
  misc_feature: SGI Peptide ID NO. 564950
  misc_feature (19)..(57): Pfam Id: PF00172 Pfam Desc: Fungal Zn(2)-Cys(6) binuclear cluster domain
  misc_feature (6)..(448): NCBI GI: 261358485 Blast Desc: conserved [Verticillium albo-atrum VaMs.102]
  misc_feature (6)..(462): NCBI GI: 256733276 Blast Desc: [Nectria haematococca mpVI 77-13-4]
  misc_feature (1)..(216): NCBI GI: 46124645 Blast Desc: FG06700.1 [Gibberella zeae PH-1]
  misc_feature (1)..(161): NCBI GI: 212530838 Blast Desc: C6 transcription factor, [Penicillium marneffei ATCC 18224] gi|210074974|gb|EEA29061.1| C6 transcription factor, [Penicillium marneffei ATCC 18224]
  misc_feature (12)..(222): NCBI GI: 46111945 Blast Desc: FG02854.1 [Gibberella zeae PH-1]
  misc_feature (317)..(462): NCBI GI: 46124645 Blast Desc: FG06700.1 [Gibberella zeae PH-1]
  misc_feature (12)..(170): NCBI GI: 46114392 Blast Desc: FG03038.1 [Gibberella zeae PH-1]
  misc_feature (9)..(239): NCBI GI: 256728323 Blast Desc: NECHADRAFT_87630 [Nectria haematococca mpVI 77-13-4]
  misc_feature (8)..(161): NCBI GI: 242817393 Blast Desc: C6 transcription factor, [Talaromyces stipitatus ATCC 10500] gi|218713412|gb|EED12836.1| C6 transcription factor, [Talaromyces stipitatus ATCC 10500]
  misc_feature (8)..(61): NCBI GI: 256729968 Blast Desc: NECHADRAFT_45340 [Nectria haematococca mpVI 77-13-4]
MPAPKPELRVRRYHSRSRNGCTTCKTKHIRCDERRPLCTNCLVKGGECGYTDSKVKPKSIEPCETVVENDDQQWHAGNSMLRTAAPYHMFVGYPVEMGDESRFLFDIFTKYRSIVQKDGLVQPESFIIRRALSNPACLHVALLMTAIKFTWDTGSMDRIKKSFLHHKLEAIKFVNEQLHSPGIASNECTIASISALALAESALGCRDTARAHMGGLWQLLEMREDIKLTDGNIFQSMVILTSRGTGKLTLRELLQVTKGIQNEECMGMTTFSTIPERFRLLLDSDDFGHLTVGDIFEEATESAVGIKPTTMPTNAVSRARLMSCYLCVFAMLGTNVVDPFMLNWLIEWMLSDLTREEEAMRQGKFPKQIWFWGVLMVTCAVATAKPSTNLETFQIEEWRELCREKIRMVSHALNLTTWEQTKEVFMSWVWRDNYDEEQQVREMWEEAVYGRTIAVTRTTSPSCYDRHDFMSAKHRAKSIIWTQHTHMKRLMLI

SEQ ID NO: 14981 - DNA, 2145 bp, Muscodor strobelii
  misc_feature: SGI EST ID NO. CUFF.35717.0
  misc_feature: Variant of the nucleotide sequence at SEQ ID NO 14979
ctttgttagacgagtcttgcaggattaaatccttgctgtctgagctcaccaatgagcctcagtccgcgcggatccgaaggaacagtgcagggggtgtatcgacagtgggcgatcactcagctgtagcgagacgaggcggccgtttcattggcactttcaatataaggtttcgattgcatgcgcccgcgcatcctccgagaatgtcatcgttgttgacatcggtactctgctctaaaactacattagtcgtgccacgccgccttctagattgcattctctacttaagcagagttaataaggctgacgaacccccccgattttatctaacaagggcgacggaactggccgtttcgaatctggcgacaggaactggaatgcatcgtaaggaatccgtgaatattaggagatttcagaatgccagcgcccaagcctgagctacgagtgcgtcgctaccatagccgatcgcgaaatggatgcaccacctgcaaaacgaaacacatacgttgtgatgagagacgcccgttatgtacgaactgtctcgtgaaaggcggtgaatgtggatatacggattcaaaggtcaagccgaaatctatagagccatgtgaaacggtcgtggaaaacgacgatcaacaatggcacgctggcaacagcatgctacggacagcagcgccttatcacatgtttgtcggctatccagttgagatgggggacgagtcgagattcttatttgatatattcacgaagtatcggagcatcgttcagaaagatgggcttgtccagcctgaatcctttatcattcgtcgagcattgtcaaatcccgcgtgtttacacgtcgctttgttgatgacggccattaaattcacttgggatacgggttctatggatcgtataaagaaatcattccttcaccacaaacttgaagcaatcaagttcgtcaacgaacaacttcacagcccgggtattgcatcgaacgagtgtacgatagcgagtatttctgcgttagcacttgcggagagcgcccttggatgccgcgacacagcaagagcgcacatgggcggactttggcagcttttagagatgcgagaggacatcaagctcaccgatgggaatatcttccagagcatggtcatcctgacgtcaaggggtacaggcaagcttacgttgcgagaacttctgcaagtgacaaagggcatccaaaacgaagaatgcatgggcatgactacgtttagtaccatccccgagagattccgccttctgctagacagcgacgacttcggtcacttgaccgtaggcgacatatttgaggaggccaccgaaagcgccgtaggaatcaagccgacgaccatgccgacgaatgcagtgagccgagcgcgtttgatgagctgctatctgtgtgttttcgcgatgctaggaacaaatgtggtggacccgttcatgctcaactggcttatcgaatggatgctgtcggatctcactcgtgaggaggaagcgatgcgccaaggcaaatttcccaagcaaatctggttttggggcgttctgatggtgacatgcgcggttgcgacggcgaagcctagcacgaacctggaaaccttccagatcgaggaatggagagagctgtgtcgcgaaaagattcgaatggtcagccacgccctcaacctaacgacatgggaacagacgaaagaagtattcatgtcgtgggtatggagggacaactacgacgaagaacagcaggtgagggagatgtgggaggaggccgtctatggtcgaactattgcagtgacccgcacaacatcccccagctgctacgaccgccatgacttcatgtctgccaaacaccgcgcgaagtccatcatctggacacaacatactcatatgaagagactgatgctgatatgatgacgtacctcacacttgtctttttctgttttgcatagcattgccgcggcgttatttgggcatgggggagcgaggaaagctagacacagcattttgaaatcggatatacccccggcctacctaccttatgttttcaatcattattattcttcctgtacatattacctgagcttcctgttacatattgcaaatattatcgagaacttctagtaagatatcgagaaagagaatcaccacgccataccaacg

SEQ ID NO: 14982 - DNA, 2298 bp, Muscodor strobelii
  misc_feature: SGI cDNA ID NO. 564951
  misc_feature: Encodes the peptide sequence at SEQ ID NO 14983
atgttgtcaaggctgagaggcaaggccaatatgtctcagacggaaggcaaggccaacatgcgagccaaggctcttggtctcacgctcaataccaatattggaccaaattcgtctgcggacagctcccctaagcattcgcccaagcagttgagtgcgctcctcagcaccaactggcgaagcgaccgccgaagtcagggtgactcgagtgagaattggtcacccttcgaacgggaatggccagctgagagtggccctcttcccacctcggtgccccatactaagctgaagttcagcgccgacgagatcaagattcgacctcaacgtggctctcccgaatacaacgaagctggagcgcgacttcgctatcgcgatagagaggagactagtggcgagttcatctcgtcagcgcctgcgaccaaaaccgagttctctgagcaggaacgctccgactattcctatgttaacctgaagaccatggcccgcgaaaaggcggctctcgcagcgttccgggagcttgcaaacggagatggcgacatgacggccaaatgcgacgagtatatgcgtcgccaattcttcctctgccaagcttcgcccgtagaattcgccgacggccagaagcagcccctggtgtatcccttggcgaaggtgcttcctgctcgcgacgtcattgcctcggcacccgcgaccaaaaccacattctttgacgacaatgatgacgaagaggacaacaagtacgacaatcctccgctcactgccggcctctgtggcttcaaggatgtgatgggtacccaagtggatgacatgatatcgcctcagtcggagaccttcgacaaagaggacatggaataccccctgtcaggcaacagctccagtagccagtccctcctccctatggaagagaaggagcggatcagagctcgctacccagtcgagagcgtcgccaagtttgatcgtatgctcaacaagcttcacggtactagtcgccaaccactgcgggatatcaagcataagtttactttgcgaaagatcaaaaggaccgcagattcccccaagcatccactttctccgattgtcgagacagatgtgaccacaggtgctaccgctacacccgaccgatcagccgcaaatgagaccgagatcactagcaagaaggagcgtagcggctcaactgactcagggatcagtggttgtatctcgggcaagcatgagaagaagttgtcggagtcgggcttgaacccccaggctatagagtttcacctagagaatcaggtcttgatcaagtcgcctgtcgtggttacctcggaggctgcgaagacaatctctaccgtcgcctcgacaactactccggcccctattgaacctgacggcgctgctttcgccaaccagacattcattcccttcaatcccattgatactctggctggagctaagaccttcgctcacaaccagttcaactctcctaagagactgaacttgagcgccaccgtcaatggccctggtctggcctttggtggtttcaatcatcagcatgagttgcgacgcgagacgcgcaagattggcgtcgagaatggtggatcatcctcggccgagcgtgcgcagatggagtacctcactgcaaagattctccagctcgagatgaagatggcccagcaggacgccatccacgcagcggagaagcgagtcggagcacatggaggccccccgaatcctgtccacggttggaataactctcgaccacctatgcagccggctggccctcccaagatgatggtcccgatgcattctggtggcaatcgcgccatgaaccatcccatgccgcccgttggtccccccagcatgatgcaccctcccatgggcccattccctccagctggaattcctctccccaacaacatggctcccatgaatccgatgggcccgcccggatttggccaggacggtgatatgatcaccggtaacaatatgcccaccggtttcggtggtatgccgccccctggacctccgcccatgaacgctggaggcttctacaacggagcaccacctgttggaatgccgatgcctggtcagaacgcatgggtgaaggacacgttcggaccgaagcctgtgcagaagccaaagggaccattccgtccgggtgacgtcatccaggcgaacaagcagcaggcctacgaggagtacctcgagtaccagcgtcagtccaaccccgagtacgcactcaagtgccgacagcggcaggcgcgccgagcggagcgccaatttcgatccagcgccaacaccgccccttcgggaccttactaa

SEQ ID NO: 14983 - protein, 765 aa, Muscodor strobelii
  misc_feature: SGI Peptide ID NO. 564951
  misc_feature (627)..(760): NCBI GI: 171691719 Blast Desc: protein product [Podospora anserina] gi|170945808|emb|CAP72608.1| protein product [Podospora anserina]
  misc_feature (600)..(757): NCBI GI: 85092008 Blast Desc: NCU04638 [Neurospora crassa OR74A] gi|21622305|emb|CAD37008.1| [Neurospora crassa] gi|28920583|gb|EAA29945.1| [Neurospora crassa OR74A]
MLSRLRGKANMSQTEGKANMRAKALGLTLNTNIGPNSSADSSPKHSPKQLSALLSTNWRSDRRSQGDSSENWSPFEREWPAESGPLPTSVPHTKLKFSADEIKIRPQRGSPEYNEAGARLRYRDREETSGEFISSAPATKTEFSEQERSDYSYVNLKTMAREKAALAAFRELANGDGDMTAKCDEYMRRQFFLCQASPVEFADGQKQPLVYPLAKVLPARDVIASAPATKTTFFDDNDDEEDNKYDNPPLTAGLCGFKDVMGTQVDDMISPQSETFDKEDMEYPLSGNSSSSQSLLPMEEKERIRARYPVESVAKFDRMLNKLHGTSRQPLRDIKHKFTLRKIKRTADSPKHPLSPIVETDVTTGATATPDRSAANETEITSKKERSGSTDSGISGCISGKHEKKLSESGLNPQAIEFHLENQVLIKSPVVVTSEAAKTISTVASTTTPAPIEPDGAAFANQTFIPFNPIDTLAGAKTFAHNQFNSPKRLNLSATVNGPGLAFGGFNHQHELRRETRKIGVENGGSSSAERAQMEYLTAKILQLEMKMAQQDAIHAAEKRVGAHGGPPNPVHGWNNSRPPMQPAGPPKMMVPMHSGGNRAMNHPMPPVGPPSMMHPPMGPFPPAGIPLPNNMAPMNPMGPPGFGQDGDMITGNNMPTGFGGMPPPGPPPMNAGGFYNGAPPVGMPMPGQNAWVKDTFGPKPVQKPKGPFRPGDVIQANKQQAYEEYLEYQRQSNPEYALKCRQRQARRAERQFRSSANTAPSGPY

SEQ ID NO: 14984 - DNA, 633 bp, Muscodor strobelii
  misc_feature: SGI EST ID NO. CUFF.35732.0
  misc_feature: Variant of the nucleotide sequence at SEQ ID NO 14982
aagcagttgagtgcgctcctcagcaccaactggcgaagcgaccgccgaagtcagggtgactcgagtgagaattggtcacccttcgaacgggaatggccagctgagagtggccctcttcccacctcggtgccccatactaagctgaagttcagcgccgacgagatcaagattcgacctcaacgtggctctcccgaatacaacgaagctggagcgcgacttcgctatcgcgatagagaggagactagtggcgagttcatctcgtcagcgcctgcgaccaaaaccgagttctctgagcaggaacgctccgactattcctatgttaacctgaagaccatggcccgcgaaaaggcggctctcgcagcgttccgggagcttgcaaacggagatggcgacatgacggccaaatgcgacgagtatatgcgtcgccaattcttcctctgccaagcttcgcccgtagaattcgccgacggccagaagcagcccctggtgtatcccttggcgaaggtgcttcctgctcgcgacgtcattgcctcggcacccgcgaccaaaaccacattctttgacgacaatgatgacgaagaggacaacaagtacgacaatcctccgctcactgccggcctctgtggcttcaag

SEQ ID NO: 14985 - DNA, 1935 bp, Muscodor strobelii
  misc_feature: SGI cDNA ID NO. 564952
  misc_feature: Encodes the peptide sequence at SEQ ID NO 14986
atgtcaacgccgatgcgacacgcgccctcgcagcagggccgcacaccacagcagccgcctgctgctccgacaccccaggcatcgacacctttctcaaactcgcaggccgccgcggccttctctccgcacggccctagaacgtcgccgcagcagctcaagaagtccccggccaacaacatggccggcaatatgggacagcctggcgccgcgccactgaacttcgatagcccctctgcggcagccgctctcggtgggttggggcttaatgatctcaacctcgataacatcagcatgggtggcttgctggctggtacgggacgctcagacgaggacgagcgcaagaagcgcttagataacgtcattgctgctctctgggctctcgacacagcgcgggtcagtaacgatgggctccagaggctggtcgagcatcttggtcttgaatgcatttgggaaaccaatgccgagaacgacaagacgcttatcataggtggtcgcaccatggctatcgaggtcggcatcaggaatcacgccgtctaccacgtgtcctttgccttcaacgaaccatctcctaacctggagaaacacgtcgagaaggcttctgccatactcctcaaggatctcgccctggcgcccgacgagagtgtactgaccaagaagctttccaagtttagagtcaacctcgaacgtcttgctactttggacagactcagcatgccacctgctttcaactgccacgaagccattgcaggcgtctgggagagcctagatagaatacataggtgggacattgagcaacttcgaaaagactccataccgggccctgacgcggcggcaactgaggatgcgcttcgtttctctgctctctgcctcggatgcggggcgccgactatgcatgcccgggggcgtattggtctcagcctcgattactggaaatctggtcgcatgttcacaatggtgtcatcggaatctgacgtaactgcaacgtggagtatccttatcgaatgcgctgctatgagccacattggatatcgtccgctacgcgtctctgataaatgggtcgggccagacgtccgcaatcagagtggacatctcgattggattgagcccgccgatacactcgttccggcatctgatgaacataagaatgcagcagctttagatcccgcttcggctgcgctctctggtccaacccctcctgatgttgcgttcattgcgacctttgatccgcccatcgttgtgccccatggtgttgcaatggaaatatataagctagccgccgcaaacgctccaccgtccagcagtacatttgatgcgcttctcttcccgatcagcgatggcgttgcatatgacccgagcgaaccgcgcgaaatgtctttcacccaaccctttccaattctcacaaggggtccaggaggtgttctgcaggactttacgaaacataacaacacgctgttcatcgataagcctgtatacggccaagttatgagtcatcttcccttctcacacccacgggacctaatctcgatgttgccactcctgcgacagtatgcattcttgtaccatctactggctcggatgttcaaacaacgcagagacatgtcagatgaaacgagaaaggatatagaggctagagtggccgcgaagggcatcgagggcttaaaagtggatgtcgtactttccgttcatccccttccccgcttactgctcctcttcccattcaaaggtgacatcgcgaggatcaacattgagattcaactcaacggaaaagtagttatcatatcggagaacatattcaacccgctttcgaacgaggaggctgtttctggtggctacgacaaggagcatacttacgatgctgggaagtgggcacacttgctaaagaactgcgagaacatcaatacctgggttgaatacatcaaaaggactttggagtaa

SEQ ID NO: 14986 - protein, 644 aa, Muscodor strobelii
  misc_feature: SGI Peptide ID NO. 564952
  misc_feature (1)..(643): NCBI GI: 256731775 Blast Desc: NECHADRAFT_69473 [Nectria haematococca mpVI 77-13-4]
  misc_feature (1)..(643): NCBI GI: 46137265 Blast Desc: FG10148.1 [Gibberella zeae PH-1]
  misc_feature (3)..(640): NCBI GI: 116197735 Blast Desc: CHGG_07023 [Chaetomium globosum CBS 148.51] gi|88178302|gb|EAQ85770.1| CHGG_07023 [Chaetomium globosum CBS 148.51]
  misc_feature (17)..(643): NCBI GI: 156044650 Blast Desc: SS1G_10429 [Sclerotinia sclerotiorum 1980] gi|154694817|gb|EDN94555.1| SS1G_10429 [Sclerotinia sclerotiorum 1980]
  misc_feature (17)..(643): NCBI GI: 154298086 Blast Desc: BC1G_12008 [Botryotinia fuckeliana B05.10] gi|150858194|gb|EDN33386.1| BC1G_12008 [Botryotinia fuckeliana B05.10]
  misc_feature (3)..(529): NCBI GI: 85100470 Blast Desc: NCU04325 [Neurospora crassa OR74A] gi|28922505|gb|EAA31735.1| NCU04325 [Neurospora crassa OR74A] gi|28950185|emb|CAD71053.1| [Neurospora crassa]
  misc_feature (3)..(552): NCBI GI: 145613193 Blast Desc: MGG_01817 [Magnaporthe grisea 70-15] gi|145020324|gb|EDK04453.1| MGG_01817 [Magnaporthe grisea 70-15]
  misc_feature (11)..(495): NCBI GI: 261351828 Blast Desc: conserved [Verticillium albo-atrum VaMs.102]
  misc_feature (3)..(626): NCBI GI: 171694315 Blast Desc: protein product [Podospora anserina] gi|170947106|emb|CAP73911.1| protein product [Podospora anserina]
  misc_feature (1)..(353): NCBI GI: 146746045 Blast Desc: [Glomerella cingulata]
MSTPMRHAPSQQGRTPQQPPAAPTPQASTPFSNSQAAAAFSPHGPRTSPQQLKKSPANNMAGNMGQPGAAPLNFDSPSAAAALGGLGLNDLNLDNISMGGLLAGTGRSDEDERKKRLDNVIAALWALDTARVSNDGLQRLVEHLGLECIWETNAENDKTLIIGGRTMAIEVGIRNHAVYHVSFAFNEPSPNLEKHVEKASAILLKDLALAPDESVLTKKLSKFRVNLERLATLDRLSMPPAFNCHEAIAGVWESLDRIHRWDIEQLRKDSIPGPDAAATEDALRFSALCLGCGAPTMHARGRIGLSLDYWKSGRMFTMVSSESDVTATWSILIECAAMSHIGYRPLRVSDKWVGPDVRNQSGHLDWIEPADTLVPASDEHKNAAALDPASAALSGPTPPDVAFIATFDPPIVVPHGVAMEIYKLAAANAPPSSSTFDALLFPISDGVAYDPSEPREMSFTQPFPILTRGPGGVLQDFTKHNNTLFIDKPVYGQVMSHLPFSHPRDLISMLPLLRQYAFLYHLLARMFKQRRDMSDETRKDIEARVAAKGIEGLKVDVVLSVHPLPRLLLLFPFKGDIARINIEIQLNGKVVIISENIFNPLSNEEAVSGGYDKEHTYDAGKWAHLLKNCENINTWVEYIKRTLE

SEQ ID NO: 14987 - DNA, 2579 bp, Muscodor strobelii
  misc_feature: SGI EST ID NO. CUFF.35749.0
  misc_feature: Variant of the nucleotide sequence at SEQ ID NO 14985
tcgaaatattagtcgaacgtttatccgaggtcttgcggtaccatctatttcctgcatagcctgacattctggttcgctgcccgctgtttcaatctgattattgttcaacacctgaggtgctccctccttccaacttgaatatccaaacaccattgcgccttctggcccattgcgcgagtctgcctcgcccttgacactcgacatctatccccatatcgtcactgctctttcgcgtctacacagcgcccgctgcccgtcatgtcaacgccgatgcgacacgcgccctcgcagcagggccgcacaccacagcagccgcctgctgctccgacaccccaggcatcgacacctttctcaaactcgcaggccgccgcggccttctctccgcacggccctagaacgtcgccgcagcagctcaagaagtccccggccaacaacatggccggcaatatgggacagcctggcgccgcgccactgaacttcgatagcccctctgcggcagccgctctcggtgggttggggcttaatgatctcaacctcgataacatcagcatgggtggcttgctggctggtacgggacgctcagacgaggacgagcgcaagaagcgcttagataacgtcattgctgctctctgggctctcgacacagcgcgggtcagtaacgatgggctccagaggctggtcgagcatcttggtcttgaatgcatttgggaaaccaatgccgagaacgacaagacgcttatcataggtggtcgcaccatggctatcgaggtcggcatcaggaatcacgccgtctaccacgtgtcctttgccttcaacgaaccatctcctaacctggagaaacacgtcgagaaggcttctgccatactcctcaaggatctcgccctggcgcccgacgagagtgtactgaccaagaagctttccaagtttagagtcaacctcgaacgtcttgctactttggacagactcagcatgccacctgctttcaactgccacgaagccattgcaggcgtctgggagagcctagatagaatacataggtgggacattgagcaacttcgaaaagactccataccgggccctgacgcggcggcaactgaggatgcgcttcgtttctctgctctctgcctcggatgcggggcgccgactatgcatgcccgggggcgtattggtctcagcctcgattactggaaatctggtcgcatgttcacaatggtgtcatcggaatctgacgtaactgcaacgtggagtatccttatcgaatgcgctgctatgagccacattggatatcgtccgctacgcgtctctgataaatgggtcgggccagacgtccgcaatcagagtggacatctcgattggattgagcccgccgatacactcgttccggcatctgatgaacataagaatgcagcagctttagatcccgcttcggctgcgctctctggtccaacccctcctgatgttgcgttcattgcgacctttgatccgcccatcgttgtgccccatggtgttgcaatggaaatatataagctagccgccgcaaacgctccaccgtccagcagtacatttgatgcgcttctcttcccgatcagcgatggcgttgcatatgacccgagcgaaccgcgcgaaatgtctttcacccaaccctttccaattctcacaaggggtccaggaggtgttctgcaggactttacgaaacataacaacacgctgttcatcgataagcctgtatacggccaagttatgagtcatcttcccttctcacacccacgggacctaatctcgatgttgccactcctgcgacagtatgcattcttgtaccatctactggctcggatgttcaaacaacgcagagacatgtcagatgaaacgagaaaggatatagaggctagagtggccgcgaagggcatcgagggcttaaaagtggatgtcgtactttccgttcatccccttccccgcttactgctcctcttcccattcaaaggtgacatcgcgaggatcaacattgagattcaactcaacggaaaagtagttatcatatcggagaacatattcaacccgctttcgaacgaggaggctgtttctggtggctacgacaaggagcatacttacgatgctgggaagtgggcacacttgctaaagaactgcgagaacatcaatacctgggttgaatacatcaaaaggactttggagtaagagtgcaactgtctatgactaggctgcgtgcggatgacctctaccagacaaaaggagatatgcatattggggcaggttaggtaggtacctaaagcatggcgttcgggaaagaaatcgttagggagttgtattggtttgataccccgttattatagtatggcgctctcagggatttattctcacggaggtgagataggtgatcgtggaagctcgagcgcgacgcatgtccatgtgcacatcacctcacaaacatgaagccaagttgattccaatgatcacacattgctatatgctaactccttgccagatgctgatttggcgagtgctccaatgactgcccaaattgcatcacagcttggaatacataataaatacaaggactgttc

SEQ ID NO: 14988 - DNA, 1224 bp, Muscodor strobelii
  misc_feature: SGI cDNA ID NO. 564953
  misc_feature: Encodes the peptide sequence at SEQ ID NO 14989
atgccacctgctttcaactgccacgaagccattgcaggcgtctgggagagcctagatagaatacataggtgggacattgagcaacttcgaaaagactccataccgggccctgacgcggcggcaactgaggatgcgcttcgtttctctgctctctgcctcggatgcggggcgccgactatgcatgcccgggggcgtattggtctcagcctcgattactggaaatctggtcgcatgttcacaatggtgtcatcggaatctgacgtaactgcaacgtggagtatccttatcgaatgcgctgctatgagccacattggatatcgtccgctacgcgtctctgataaatgggtcgggccagacgtccgcaatcagagtggacatctcgattggattgagcccgccgatacactcgttccggcatctgatgaacataagaatgcagcagctttagatcccgcttcggctgcgctctctggtccaacccctcctgatgttgcgttcattgcgacctttgatccgcccatcgttgtgccccatggtgttgcaatggaaatatataagctagccgccgcaaacgctccaccgtccagcagtacatttgatgcgcttctcttcccgatcagcgatggcgttgcatatgacccgagcgaaccgcgcgaaatgtctttcacccaaccctttccaattctcacaaggggtccaggaggtgttctgcaggactttacgaaacataacaacacgctgttcatcgataagcctgtatacggccaagttatgagtcatcttcccttctcacacccacgggacctaatctcgatgttgccactcctgcgacagtatgcattcttgtaccatctactggctcggatgttcaaacaacgcagagacatgtcagatgaaacgagaaaggatatagaggctagagtggccgcgaagggcatcgagggcttaaaagtggatgtcgtactttccgttcatccccttccccgcttactgctcctcttcccattcaaaggtgacatcgcgaggatcaacattgagattcaactcaacggaaaagtagttatcatatcggagaacatattcaacccgctttcgaacgaggaggctgtttctggtggctacgacaaggagcatacttacgatgctgggaagtgggcacacttgctaaagaactgcgagaacatcaatacctgggttgaatacatcaaaaggactttggagtaa

SEQ ID NO: 14989 - protein, 407 aa, Muscodor strobelii
  misc_feature: SGI Peptide ID NO. 564953
  misc_feature (3)..(406): NCBI GI: 256731775 Blast Desc: NECHADRAFT_69473 [Nectria haematococca mpVI 77-13-4]
  misc_feature (3)..(406): NCBI GI: 156044650 Blast Desc: SS1G_10429 [Sclerotinia sclerotiorum 1980] gi|154694817|gb|EDN94555.1| SS1G_10429 [Sclerotinia sclerotiorum 1980]
  misc_feature (3)..(406): NCBI GI: 154298086 Blast Desc: BC1G_12008 [Botryotinia fuckeliana B05.10] gi|150858194|gb|EDN33386.1| BC1G_12008 [Botryotinia fuckeliana B05.10]
  misc_feature (3)..(406): NCBI GI: 46137265 Blast Desc: FG10148.1 [Gibberella zeae PH-1]
  misc_feature (3)..(403): NCBI GI: 116197735 Blast Desc: CHGG_07023 [Chaetomium globosum CBS 148.51] gi|88178302|gb|EAQ85770.1| CHGG_07023 [Chaetomium globosum CBS 148.51]
  misc_feature (5)..(292): NCBI GI: 85100470 Blast Desc: NCU04325 [Neurospora crassa OR74A] gi|28922505|gb|EAA31735.1| NCU04325 [Neurospora crassa OR74A] gi|28950185|emb|CAD71053.1| [Neurospora crassa]
  misc_feature (3)..(389): NCBI GI: 171694315 Blast Desc: protein product [Podospora anserina] gi|170947106|emb|CAP73911.1| protein product [Podospora anserina]
  misc_feature (3)..(315): NCBI GI: 145613193 Blast Desc: MGG_01817 [Magnaporthe grisea 70-15] gi|145020324|gb|EDK04453.1| MGG_01817 [Magnaporthe grisea 70-15]
  misc_feature (3)..(258): NCBI GI: 261351828 Blast Desc: conserved [Verticillium albo-atrum VaMs.102]
  misc_feature (5)..(316): NCBI GI: 240106746 Blast Desc: CPC735_015310 [Coccidioides posadasii C735 delta SOWgp]
MPPAFNCHEAIAGVWESLDRIHRWDIEQLRKDSIPGPDAAATEDALRFSALCLGCGAPTMHARGRIGLSLDYWKSGRMFTMVSSESDVTATWSILIECAAMSHIGYRPLRVSDKWVGPDVRNQSGHLDWIEPADTLVPASDEHKNAAALDPASAALSGPTPPDVAFIATFDPPIVVPHGVAMEIYKLAAANAPPSSSTFDALLFPISDGVAYDPSEPREMSFTQPFPILTRGPGGVLQDFTKHNNTLFIDKPVYGQVMSHLPFSHPRDLISMLPLLRQYAFLYHLLARMFKQRRDMSDETRKDIEARVAAKGIEGLKVDVVLSVHPLPRLLLLFPFKGDIARINIEIQLNGKVVIISENIFNPLSNEEAVSGGYDKEHTYDAGKWAHLLKNCENINTWVEYIKRTLE

SEQ ID NO: 14990 - DNA, 2579 bp, Muscodor strobelii; identical to SEQ ID NO: 14987
  misc_feature: SGI EST ID NO. CUFF.35749.0
  misc_feature: Variant of the nucleotide sequence at SEQ ID NO 14988

SEQ ID NO: 14991 - DNA, 3423 bp, Muscodor strobelii
  misc_feature: SGI cDNA ID NO. 564954
  misc_feature: Encodes the peptide sequence at SEQ ID NO 14992
ccagactcacaggagcaagggcaagggcaggagcgcgggcaggagcaggagcgcctgcttccagacggcgtccgacagacacggagcctggaccaagtcatcccggactcgcaagagccatccacagggctctcaactcacctctcaactcacgacagctatcctcttgcttcccagcagacacacggccagctctcgccggtgcacgcaacccaagacattccttctcatcagcgggatctcttcactaccaccggccccgacccgcctgctgacgagcttgctgttgtctctcactctcacccctcgtccaccggctcttttacacaggcagcgtctaactgggacaccatacatgctacttttccggcacctgcaacacgtaatagcgttgtccttgactctcagcgcaccatcgtgtcgcaaactttaacttcgacctcgcagcttaccgacagtcagcactcgcatcaaactgatagaccctcctctccaagctattcccaagcagcccagatcgtgcaacccctgactggtcagatccacggcgctgtctcccagggtctatctgacttctccgtatatgacgaggacataaccgttcccgagacttcatcacagcgaaaagaggcgcactcgagccaggccctgagtgaagtcgatgggaactccaagacctctgttgtcacctacgaagcgcctgcagctgctccaggctctccacaggatacagtacacaactgggccttgactccgagcgcacctgcacccagcacgccgacaaaaatggatcagcccgacccgactgaaccggtcttgtcgaccagagagaaactaaggcggctgagagagcggaacttccgctccccttcttctgtgcccgcaaccgagtcatcagctgcatctttcgctggcacccgattttcgactccacagcaaaaagctgtaggtgatggcgaaggtgttgccaacaaggcgccgagtgtcatcccgtctgtcctagacacgccctcgaaccttccgtggcagaccgttggatcaatagaaacggcgggggcagcgtccaccctcgagagtctccaagaccctaccgtcagcgctggcatggacggtcagagctcacatcgagtctcggaggccggtactcttccgggattcaacgagaattccacggagcactcagcgactcttgatccgtcagctctgacattgtctattgaagactctgttgaaaatgacattgaagccagtccctctgttttgacagaagatggttctgcgaccggcctgcctgatggcggtcagcctacacatatctccggcgaggatgagaatctgggagatttcccgacaaatttgataccgcatattcctacgggtcctagcgaatacgtagttactctgccgtttcaggctagtagcagaccgcagtataatgacattctgcgcgagaacgagacgttaatcaatgaatacaactcgtcatttcaggtgctcccgcacgaaacaccacgacaaagcactatccagagactcgatggcatgttctctcgtctttttgatatttgcgactttcctccttttcttgatacaatcagagccatgccgtcagagcagattgcaaaacacgtgattgacaccaaccccaaatttgctttcatcgccgagttactcgatatcctccaacagtatttttcggacaagacgattcttatccttgctcggcccggggagctgatagatctactcggtcatttgatcaagagtcgaggccaacgctgcattcgagctgatggacaaattaccgatgcgattgatgacgaccatactctaaatattgccatctttcctactagcgtggctcccgcaactctacctagaaactgcgacgtcgttattgccttcgattatacatatcgcccagagctgatcgcagacatcgaggatcatcatcttgtgaccttggcccttgtcaacatcacatccatacagcatatcaatatgagcatcaccgacgatttgcagccattagaacgcaagaatgtccttatgatggcacttgtgaaagcaatgggctacatcgaggacccggaaacgagttcattcgtctcgcttggtttgattgctaacaagttcgcaaagcgcattcagatgccagaagatgacgaggatgagttctactggaacccggacaatctaccgcctgacctattcaacgatcttcatgtcgtgacctcccagtttgaatccagcgccggccagattcccagcagtggcaaacgaccctatatcgaggacggtgaacacagtttgcccaagcggccgaagcttcaccagccccctgtcgtgacgcatattagccatgctagtgacaaggtgaaggtcatgcttgaccatgacgctgaaagtccagaccacgctacggccctagtatctattaagaagctagaagatcttcaagctcaggtacgcctctttgctctctacgaaggacggttgctagcatggacgtatattaacacgctgcagaatactgcactcgaaactaaattgcatgagagcctagtacgtgagaagcaactcaaaaagctcagcaatagagtccaaaccgaagtcaataaccacgtagctacggaaaacacaattcagagacgttacatggaggctctggaggaacgtggcaacttcgaggccgcttgcaagattgctcaaaaggaagcaacgcatttcagtgctagtcttgattctgctcgggatgagattgtcttactgaaagaaacacgagcagagcttaaaaagcaacttgctgaggcaaatgccactcttctcgcttcgtcaaatccagatatagccagcaaggcggaattggagagagacctggctgctgccaaagcccagatatcgactctcgagaagaaggtgactatcgcggaggtcgagcgggatcaaatcaggaccacatataaccaagcgacacagcgggcaatggagacgtcggctgagaatagggcctatgaccagcaagttaagaatctggagcgtaaagccgacgaaactatcaccgaggcgaacactattcaatctgcagacaatagccgagagttgcagcggctgttagaggaaaaggactttttgctgcatcagcgagaccttgagaattttcgactcaaggaagagcttaaattagcgaggaacggacgcagagagaccagacagtctagtgtaccgcgtagtcctagaatgaccgcgctgggcatgagtccgaggaatggaagaggcccaagtgccatgggtggcccgagtagcagtcgaggcacgagtcctacaggccccgacaacgtcaactttagcaatgggcagagcggtctattcaatcagacgcctagcgccgctaatcgatttgctcatttgcgggacccgtga

SEQ ID NO: 14992 - protein, 1140 aa, Muscodor strobelii
  misc_feature: SGI Peptide ID NO. 564954
  misc_feature (253)..(1140): NCBI GI: 116199207 Blast Desc: CHGG_07759 [Chaetomium globosum CBS 148.51] gi|88179038|gb|EAQ86506.1| CHGG_07759 [Chaetomium globosum CBS 148.51]
  misc_feature (464)..(1108): NCBI GI: 85100685 Blast Desc: NCU06696 [Neurospora crassa OR74A] gi|28922547|gb|EAA31775.1| [Neurospora crassa OR74A] gi|28949934|emb|CAD70920.1| conserved [Neurospora crassa]
  misc_feature (462)..(1109): NCBI GI: 145612655 Blast Desc: MGG_07282 [Magnaporthe grisea 70-15] gi|145019786|gb|EDK04014.1| MGG_07282 [Magnaporthe grisea 70-15]
  misc_feature (463)..(1106): NCBI GI: 171694103 Blast Desc: protein product [Podospora anserina] gi|170947000|emb|CAP73804.1| protein product [Podospora anserina]
  misc_feature (460)..(1111): NCBI GI: 46125937 Blast Desc: FG07346.1 [Gibberella zeae PH-1]
  misc_feature (462)..(1139): NCBI GI: 256730988 Blast Desc: NECHADRAFT_49362 [Nectria haematococca mpVI 77-13-4]
  misc_feature (439)..(1018): NCBI GI: 261355632 Blast Desc: conserved [Verticillium albo-atrum VaMs.102]
  misc_feature (824)..(1109): NCBI GI: 154304956 Blast Desc: BC1G_08568 [Botryotinia fuckeliana B05.10] gi|150853731|gb|EDN28923.1| BC1G_08568 [Botryotinia fuckeliana B05.10]
  misc_feature (859)..(1108): NCBI GI: 156062554 Blast Desc: SS1G_01393 [Sclerotinia sclerotiorum 1980] gi|154696729|gb|EDN96467.1| SS1G_01393 [Sclerotinia sclerotiorum 1980]
  misc_feature (460)..(1083): NCBI GI: 255955715 Blast Desc: Pc21g16020 [Penicillium chrysogenum Wisconsin 54-1255] gi|211590321|emb|CAP96499.1| Pc21g16020 [Penicillium chrysogenum Wisconsin 54-1255]
PDSQEQGQGQERGQEQERLLPDGVRQTRSLDQVIPDSQEPSTGLSTHLSTHDSYPLASQQTHGQLSPVHATQDIPSHQRDLFTTTGPDPPADELAVVSHSHPSSTGSFTQAASNWDTIHATFPAPATRNSVVLDSQRTIVSQTLTSTSQLTDSQHSHQTDRPSSPSYSQAAQIVQPLTGQIHGAVSQGLSDFSVYDEDITVPETSSQRKEAHSSQALSEVDGNSKTSVVTYEAPAAAPGSPQDTVHNWALTPSAPAPSTPTKMDQPDPTEPVLSTREKLRRLRERNFRSPSSVPATESSAASFAGTRFSTPQQKAVGDGEGVANKAPSVIPSVLDTPSNLPWQTVGSIETAGAASTLESLQDPTVSAGMDGQSSHRVSEAGTLPGFNENSTEHSATLDPSALTLSIEDSVENDIEASPSVLTEDGSATGLPDGGQPTHISGEDENLGDFPTNLIPHIPTGPSEYVVTLPFQASSRPQYNDILRENETLINEYNSSFQVLPHETPRQSTIQRLDGMFSRLFDICDFPPFLDTIRAMPSEQIAKHVIDTNPKFAFIAELLDILQQYFSDKTILILARPGELIDLLGHLIKSRGQRCIRADGQITDAIDDDHTLNIAIFPTSVAPATLPRNCDVVIAFDYTYRPELIADIEDHHLVTLALVNITSIQHINMSITDDLQPLERKNVLMMALVKAMGYIEDPETSSFVSLGLIANKFAKRIQMPEDDEDEFYWNPDNLPPDLFNDLHVVTSQFESSAGQIPSSGKRPYIEDGEHSLPKRPKLHQPPVVTHISHASDKVKVMLDHDAESPDHATALVSIKKLEDLQAQVRLFALYEGRLLAWTYINTLQNTALETKLHESLVREKQLKKLSNRVQTEVNNHVATENTIQRRYMEALEERGNFEAACKIAQKEATHFSASLDSARDEIVLLKETRAELKKQLAEANATLLASSNPDIASKAELERDLAAAKAQISTLEKKVTIAEVERDQIRTTYNQATQRAMETSAENRAYDQQVKNLERKADETITEANTIQSADNSRELQRLLEEKDFLLHQRDLENFRLKEELKLARNGRRETRQSSVPRSPRMTALGMSPRNGRGPSAMGGPSSSRGTSPTGPDNVNFSNGQSGLFNQTPSAANRFAHLRDP

SEQ ID NO: 14993 - DNA, 3703 bp, Muscodor strobelii
  misc_feature: SGI EST ID NO. CUFF.35742.0
  misc_feature: Variant of the nucleotide sequence at SEQ ID NO 14991
cgccgatcttcacgctcaagcgtacggtcgagctcacagccagactcacaggagcaagggcaagggcaggagcgcgggcaggagcaggagcgcctgcttccagacggcgtccgacagacacggagcctggaccaagtcatcccggactcgcaagagccatccacagggctctcaactcacctctcaactcacgacagctatcctcttgcttcccagcagacacacggccagctctcgccggtgcacgcaacccaagacattccttctcatcagcgggatctcttcactaccaccggccccgacccgcctgctgacgagcttgctgttgtctctcactctcacccctcgtccaccggctcttttacacaggcagcgtctaactgggacaccatacatgctacttttccggcacctgcaacacgtaatagcgttgtccttgactctcagcgcaccatcgtgtcgcaaactttaacttcgacctcgcagcttaccgacagtcagcactcgcatcaaactgatagaccctcctctccaagctattcccaagcagcccagatcgtgcaacccctgactggtcagatccacggcgctgtctcccagggtctatctgacttctccgtatatgacgaggacataaccgttcccgagacttcatcacagcgaaaagaggcgcactcgagccaggccctgagtgaagtcgatgggaactccaagacctctgttgtcacctacgaagcgcctgcagctgctccaggctctccacaggatacagtacacaactgggccttgactccgagcgcacctgcacccagcacgccgacaaaaatggatcagcccgacccgactgaaccggtcttgtcgaccagagagaaactaaggcggctgagagagcggaacttccgctccccttcttctgtgcccgcaaccgagtcatcagctgcatctttcgctggcacccgattttcgactccacagcaaaaagctgtaggtgatggcgaaggtgttgccaacaaggcgccgagtgtcatcccgtctgtcctagacacgccctcgaaccttccgtggcagaccgttggatcaatagaaacggcgggggcagcgtccaccctcgagagtctccaagaccctaccgtcagcgctggcatggacggtcagagctcacatcgagtctcggaggccggtactcttccgggattcaacgagaattccacggagcactcagcgactcttgatccgtcagctctgacattgtctattgaagactctgttgaaaatgacattgaagccagtccctctgttttgacagaagatggttctgcgaccggcctgcctgatggcggtcagcctacacatatctccggcgaggatgagaatctgggagatttcccgacaaatttgataccgcatattcctacgggtcctagcgaatacgtagttactctgccgtttcaggctagtagcagaccgcagtataatgacattctgcgcgagaacgagacgttaatcaatgaatacaactcgtcatttcaggtgctcccgcacgaaacaccacgacaaagcactatccagagactcgatggcatgttctctcgtctttttgatatttgcgactttcctccttttcttgatacaatcagagccatgccgtcagagcagattgcaaaacacgtgattgacaccaaccccaaatttgctttcatcgccgagttactcgatatcctccaacagtatttttcggacaagacgattcttatccttgctcggcccggggagctgatagatctactcggtcatttgatcaagagtcgaggccaacgctgcattcgagctgatggacaaattaccgatgcgattgatgacgaccatactctaaatattgccatctttcctactagcgtggctcccgcaactctacctagaaactgcgacgtcgttattgccttcgattatacatatcgcccagagctgatcgcagacatcgaggatcatcatcttgtgaccttggcccttgtcaacatcacatccatacagcatatcaatatgagcatcaccgacgatttgcagccattagaacgcaagaatgtccttatgatggcacttgtgaaagcaatgggctacatcgaggacccggaaacgagttcattcgtctcgcttggtttgattgctaacaagttcgcaaagcgcattcagatgccagaagatgacgaggatgagttctactggaacccggacaatctaccgcctgacctattcaacgatcttcatgtcgtgacctcccagtttgaatccagcgccggccagattcccagcagtggcaaacgaccctatatcgaggacggtgaacacagtttgcccaagcggccgaagcttcaccagccccctgtcgtgacgcatattagccatgctagtgacaaggtgaaggtcatgcttgaccatgacgctgaaagtccagaccacgctacggccctagtatctattaagaagctagaagatcttcaagctcagaatactgcactcgaaactaaattgcatgagagcctagtacgtgagaagcaactcaaaaagctcagcaatagagtccaaaccgaagtcaataaccacgtagctacggaaaacacaattcagagacgttacatggaggctctggaggaacgtggcaacttcgaggccgcttgcaagattgctcaaaaggaagcaacgcatttcagtgctagtcttgattctgctcgggatgagattgtcttactgaaagaaacacgagcagagcttaaaaagcaacttgctgaggcaaatgccactcttctcgcttcgtcaaatccagatatagccagcaaggcggaattggagagagacctggctgctgccaaagcccagatatcgactctcgagaagaaggtgactatcgcggaggtcgagcgggatcaaatcaggaccacatataaccaagcgacacagcgggcaatggagacgtcggctgagaatagggcctatgaccagcaagttaagaatctggagcgtaaagccgacgaaactatcaccgaggcgaacactattcaatctgcagacaatagccgagagttgcagcggctgttagaggaaaaggactttttgctgcatcagcgagaccttgagaattttcgactcaaggaagagcttaaattagcgaggaacggacgcagagagaccagacagtctagtgtaccgcgtagtcctagaatgaccgcgctgggcatgagtccgaggaatggaagaggcccaagtgccatgggtggcccgagtagcagtcgaggcacgagtcctacaggccccgacaacgtcaactttagcaatgggcagagcggtctattcaatcagacgcctagcgccgctaatcgatttgctcatttgcgggacccgtgatcttacatagatcatcgtgtgtaactttagatgggatattccagccaatttgctatggcttggggcggttgacgatgggctgtacctagacacagagaaccgggtttcccgctttgcatagctttgcagcatggcgctctggctggcgttcggatcaggaatatggttagtggttaacagtagacagaaagaaacaatatcaaggaacttcatgatcaatctgagcttacgtgaaatgaaatgaaatgaaatgggctatggctgtcgagcataatgttgcttaaattccagtatctgaaatgtg

SEQ ID NO: 14994 - DNA, 1134 bp, Muscodor strobelii
  misc_feature: SGI cDNA ID NO. 564955
  misc_feature: Encodes the peptide sequence at SEQ ID NO 14995
atgactgtcaaatctatgatccgagcgtcactcgtcagcaccctgctcactctgaccaccgcgacgcctacgccttgttcttacaactgcacaatcagcaccggcactgagaacccatcacagaagctttctgatccgaattacgggcctaagccgggcgagtctgatgtatacagcttcgacgacaaggtctcgccgccgttcccggcatatctgaaggacgccattctaccaaccaagtgtggcgctccaggtcttgacgataccatctggcagaaccttctgtctgcagaatggatcatcttctcattttaccaacaagcggttgaagccttcaacgtatccacgttcgtagaggctggataccctaataatacctatgaccgcgtcctcgagatccgcaataatgaggccgggcacctgcgcatattccagaatcagatctccgcaacatcggttaagcccggagcttgcgagtaccagttccctttctatgatgccgactcctttttggcgctcacgactgtcctcgagatctcttctatggctttcctcaccggcttggtccaacaagccaagatcccctcgtctcagggcgcattcctcgccatcgccgagacggaaacccgccacgaagtctggactctgctcgaaatctggaaagagaatcccttcggtggtccagcagacaccgtctacccatacccggatcaaattctagactcaaccaatgcgtacattgtgccaggctcatgccccaaggagaaccccatttatcccacgcctcgccagggtctccccgccatcggcgccgctgaaggcacgaagtcgctgacgcccggctctgagatcgtgctctccttccccgaccctaccaaccagcctgagttcaaggccggtactcagtactacgccgtgttcttccactctgttgccaacatcagtgtgccgctcgacactgccaattacccctcagagaacatcaccgtcaccattcccgctgccttcgagaccaagggcgttattgtcgcctgtcttgcggatgccaagggtgctcctactaaggagtctgtcgtcgctggccctgctgtcattctcgagcagcctgcttacttggcgcctcttctcatctag

SEQ ID NO: 14995 - protein, 377 aa, Muscodor strobelii
  misc_feature: SGI Peptide ID NO. 564955
  misc_feature (1)..(377): NCBI GI: 171688032 Blast Desc: protein product [Podospora anserina] gi|170943978|emb|CAP70088.1| protein product [Podospora anserina]
  misc_feature (40)..(377): NCBI GI: 116197086 Blast Desc: CHGG_05141 [Chaetomium globosum CBS 148.51] gi|88181054|gb|EAQ88522.1| CHGG_05141 [Chaetomium globosum CBS 148.51]
  misc_feature (42)..(373): NCBI GI: 156052341 Blast Desc: SS1G_06336 [Sclerotinia sclerotiorum 1980] gi|154704116|gb|EDO03855.1| SS1G_06336 [Sclerotinia sclerotiorum 1980]
  misc_feature (45)..(375): NCBI GI: 145245219 Blast Desc: An11g09190 [Aspergillus niger] gi|134079573|emb|CAK97049.1| protein product [Aspergillus niger]
  misc_feature (40)..(373): NCBI GI: 154298821 Blast Desc: BC1G_11302 [Botryotinia fuckeliana B05.10] gi|150857698|gb|EDN32890.1| BC1G_11302 [Botryotinia fuckeliana B05.10]
  misc_feature (87)..(366): NCBI GI: 170093357 Blast Desc: [Laccaria bicolor S238N-H82] gi|164647759|gb|EDR12003.1| [Laccaria bicolor S238N-H82]
  misc_feature (103)..(365): NCBI GI: 58263160 Blast Desc: [Cryptococcus neoformans var. neoformans JEC21] gi|134107778|ref|XP_777500.1| CNBB0740 [Cryptococcus neoformans var. neoformans B-3501A] gi|50260192|gb|EAL22853.1| CNBB0740 var.
  misc_feature (78)..(365): NCBI GI: 169613212 Blast Desc: SNOG_09736 [Phaeosphaeria nodorum SN15] gi|111061881|gb|EAT83001.1| SNOG_09736 [Phaeosphaeria nodorum SN15]
  misc_feature (83)..(365): NCBI GI: 225563144 Blast Desc: conserved [Ajellomyces capsulatus G186AR] gi|240275728|gb|EER39241.1| HCDG_06346 [Ajellomyces capsulatus H143]
  misc_feature (83)..(365): NCBI GI: 154281543 Blast Desc: [Ajellomyces capsulatus NAm1] gi|150411763|gb|EDN07151.1| [Ajellomyces capsulatus NAm1]
MTVKSMIRASLVSTLLTLTTATPTPCSYNCTISTGTENPSQKLSDPNYGPKPGESDVYSFDDKVSPPFPAYLKDAILPTKCGAPGLDDTIWQNLLSAEWIIFSFYQQAVEAFNVSTFVEAGYPNNTYDRVLEIRNNEAGHLRIFQNQISATSVKPGACEYQFPFYDADSFLALTTVLEISSMAFLTGLVQQAKIPSSQGAFLAIAETETRHEVWTLLEIWKENPFGGPADTVYPYPDQILDSTNAYIVPGSCPKENPIYPTPRQGLPAIGAAEGTKSLTPGSEIVLSFPDPTNQPEFKAGTQYYAVFFHSVANISVPLDTANYPSENITVTIPAAFETKGVIVACLADAKGAPTKESVVAGPAVILEQPAYLAPLLI

SEQ ID NO: 14996 - DNA, 2368 bp, Muscodor strobelii
  misc_feature: SGI EST ID NO. CUFF.35745.0
  misc_feature: Variant of the nucleotide sequence at SEQ ID NO 14994
cgcccgtctgcctttgcatcacagaattttctcatgctcctcaagtccttagttccgtttctagtcacagcacttactgaacgtttagcccaattgggtacagttcctatccagctctcacggagagctgttcctaacacggtaaaaggcatcgaggatcgcgatctattaggagaattctgccgtgagctgagctcttgcgcatagctccgcagtggaacgcaatctctcagctctgcgcgacgtccgcccgacgtctgctttcgtcttttcccatccttcgtgccagagggccaagcagaggccaagaacggggagataagcggtacatgtccatgccgctcggaagagcaggagccgttctaagtacttcaagcttctgcagacgagcatcgaaggcaaagtgttccatcattagaaaagctccaaacaggaaaatattccactgcttcttataaaattcccataatacaatctgctcggatgggctaagaaaagctcattatgggccagttgccgcgatcaggagcagatagagagcacactttcaacgcaaagcgacttgggggctgagggactacaaataccattcaacctatgtgccgattacatgccagatctccccgtcgtgcccgtccgtctcggcgacccgccgtcgagtagcctgcagtagcgcgggtgaagcgctgcgccgagtctgtcgatccgaatgcttcacagggagctagccagggcaatgagcctcaacattggttgactactgagctcactatcacaaatactagatccggctcataagctgtacgacagcggccagctcattctgcagtagctctgatatcatgagatcattgcaaggttctcgccttcgcgaagagcccccacgaaaggtcgtctgcacagaatgggattcattagtgccgtggcaactggacaggcgtgatgactgtgctggcagtcttggtaaatgagatcgaatcgtctcctataagataccctatcgtacctgacggccttgtcgagtttgttttcaaccccctttggctagtaaaccatctccattggacaaccacctccagacatcgcgcaagatgactgtcaaatctatgatccgagcgtcactcgtcagcaccctgctcactctgaccaccgcgacgcctacgccttgttcttacaactgcacaatcagcaccggcactgagaacccatcacagaagctttctgatccgaattacgggcctaagccgggcgagtctgatgtatacagcttcgacgacaaggtctcgccgccgttcccggcatatctgaaggacgccattctaccaaccaagtgtggcgctccaggtcttgacgataccatctggcagaaccttctgtctgcagaatggatcatcttctcattttaccaacaagcggttgaagccttcaacgtatccacgttcgtagaggctggataccctaataatacctatgaccgcgtcctcgagatccgcaataatgaggccgggcacctgcgcatattccagaatcagatctccgcaacatcggttaagcccggagcttgcgagtaccagttccctttctatgatgccgactcctttttggcgctcacgactgtcctcgagatctcttctatggctttcctcaccggcttggtccaacaagccaagatcccctcgtctcagggcgcattcctcgccatcgccgagacggaaacccgccacgaagtctggactctgctcgaaatctggaaagagaatcccttcggtggtccagcagacaccgtctacccatacccggatcaaattctagactcaaccaatgcgtacattgtgccaggctcatgccccaaggagaaccccatttatcccacgcctcgccagggtctccccgccatcggcgccgctgaaggcacgaagtcgctgacgcccggctctgagatcgtgctctccttccccgaccctaccaaccagcctgagttcaaggccggtactcagtactacgccgtgttcttccactctgttgccaacatcagtgtgccgctcgacactgccaattacccctcagagaacatcaccgtcaccattcccgctgccttcgagaccaagggcgttattgtcgcctgtcttgcggatgccaagggtgctcctactaaggagtctgtcgtcgctggccctgctgtcattctcgagcagcctgcttacttggcgcctcttctcatctaggacttgggtcactatattagggatcaccggagataagatgcaggagcgcaaggatacataacataattgtcatatagaaatatatacgcggtagcttttaatatttagtacatattaagtaatacaatatcaagacatcttca

SEQ ID NO: 14997 - DNA, 1020 bp, Muscodor strobelii
  misc_feature: SGI cDNA ID NO. 564956
  misc_feature: Reduced expression when VOC is produced
  misc_feature: Encodes the peptide sequence at SEQ ID NO 14998
atgtcctcctctcccgctgcattgtgggagtctatccccgtgccgaccctcgatcgcccgttcggcgtccatctctggcccatattcaacaaggccttcgaggttgttgtcgggtaccctgccgatgacttcagatttgttgccggcaagactcccttgtcgacactcaaggagtccttgattttcagcgtggtgtactacagcgtcatctttggcggccgtgaattgatgcgcaaccgggaaccattcaagctcaagacgctgttcttgatccacaacttcatcctcacctccatcagcgctatcctgctggtcctcttcatcgagcaactgctgcctaccgttgtccgcaagggcatcttctttgccatttgcgatgctgatggaggctggacccagcctttggttgtgctgtactatttgaactacctgaccaagtacctggaattcattgacaccgtctttttgttcctgaagaagaagcccctgaccttcctccactgctaccaccatggtgcgactgcgttcctctgctacacccagctcatcggatcgacctcggtctcctgggttgtgatcagcctgaacctgactgttcatgtcgttatgtactggtactacttccaaagtgcccgaggcatcaagatctggtggaaggaatggatcacccgcctccagatcgtccagttcgtcattgatctcggcttcgtctatttcgcatcctacacctacttcacctccagctacttccagtggatgccaaatgcgggaaaatgcgctggagaggagtttgccgcctttgctggaattggcacgattacctcttacctcgtccttttcatttccttctacttcgccacatatagtaaggataagaaggcacccaacacgcgcaagactcttcgccgtatgtctcaggctcctctccccgacccgcacgttgttgccaccaacccctcggccaaggcgactggcgccagaaaggccaatggcgtcactacccgttctcgcaaggcataa

SEQ ID NO: 14998 - protein, 339 aa, Muscodor strobelii
  misc_feature: SGI Peptide ID NO. 564956
  misc_feature (3)..(298): Pfam Id: PF01151 Pfam Desc: GNS1/SUR4 family
  misc_feature (14)..(298): Pfam Id: PF01151 Pfam Desc: GNS1/SUR4 family
  misc_feature (2)..(339): NCBI GI: 85100677 Blast Desc: elongation of fatty acids protein 3 [Neurospora crassa OR74A] gi|28922545|gb|EAA31773.1| elongation of fatty acids protein 3 [Neurospora crassa OR74A] gi|28949932|emb|CAD70918.1|
  misc_feature (1)..(339): NCBI GI: 256730989 Blast Desc: [Nectria haematococca mpVI 77-13-4]
  misc_feature (1)..(339): NCBI GI: 46125939 Blast Desc: FG07347.1 [Gibberella zeae PH-1]
  misc_feature (2)..(339): NCBI GI: 116199203 Blast Desc: CHGG_07757 [Chaetomium globosum CBS 148.51] gi|88179036|gb|EAQ86504.1| CHGG_07757 [Chaetomium globosum CBS 148.51]
  misc_feature (6)..(339): NCBI GI: 171694083 Blast Desc: protein product [Podospora anserina] gi|170946990|emb|CAP73794.1| protein product [Podospora anserina]
  misc_feature (6)..(339): NCBI GI: 39971929 Blast Desc: MGG_07280 [Magnaporthe grisea 70-15] gi|145019784|gb|EDK04012.1| MGG_07280 [Magnaporthe grisea 70-15]
  misc_feature (10)..(338): NCBI GI: 238487042 Blast Desc: elongation of fatty acids protein, [Aspergillus flavus NRRL3357] gi|220699638|gb|EED55977.1| elongation of fatty acids protein, [Aspergillus flavus NRRL3357]
  misc_feature (10)..(338): NCBI GI: 169770539 Blast Desc: [Aspergillus oryzae RIB40] gi|83767598|dbj|BAE57737.1| protein product [Aspergillus oryzae]
  misc_feature (8)..(339): NCBI GI: 121718989 Blast Desc: fatty acid elongase (Gns1), [Aspergillus clavatus NRRL 1] gi|119404453|gb|EAW14829.1| fatty acid elongase (Gns1), [Aspergillus clavatus NRRL 1]
  misc_feature (10)..(339): NCBI GI: 70985120 Blast Desc: fatty acid elongase (Gns1) [Aspergillus fumigatus Af293] gi|66845694|gb|EAL86028.1| fatty acid elongase (Gns1), [Aspergillus fumigatus Af293] gi|159126011|gb|EDP51127.1| fatty
  misc_feature: Useful for introducing or modulating the production of volatile compounds
MSSSPAALWESIPVPTLDRPFGVHLWPIFNKAFEVVVGYPADDFRFVAGKTPLSTLKESLIFSVVYYSVIFGGRELMRNREPFKLKTLFLIHNFILTSISAILLVLFIEQLLPTVVRKGIFFAICDADGGWTQPLVVLYYLNYLTKYLEFIDTVFLFLKKKPLTFLHCYHHGATAFLCYTQLIGSTSVSWVVISLNLTVHVVMYWYYFQSARGIKIWWKEWITRLQIVQFVIDLGFVYFASYTYFTSSYFQWMPNAGKCAGEEFAAFAGIGTITSYLVLFISFYFATYSKDKKAPNTRKTLRRMSQAPLPDPHVVATNPSAKATGARKANGVTTRSRKA

SEQ ID NO: 14999 - DNA, 1800 bp, Muscodor strobelii
  misc_feature: SGI EST ID NO. CUFF.35758.0
  misc_feature: Variant of the nucleotide sequence at SEQ ID NO 14997
aaaaaacatccccttttgaggagtttaatgatcctccttcctcctcctgctgcacgcgcaacctgtcgtctcatctcacggctcgcgtgattcagtcagccttcagtcttcttccctttcttcttcgtcgagtagagagagtgcttgctgcatgtacgagtccgtgtcgtagatccatcaccgtacctttttctgtttcttcttgtcactccttcaacgacctcttttgccgctgcttcagcgacgtactgccaactgcctggcctattacttatagaacctccactaccactatttcgacctttctgcgcttatcgtgtgcaaacttcgcttccgcgcccttccgcccgccatgtcctcctctcccgctgcattgtgggagtctatccccgtgccgaccctcgatcgcccgttcggcgtccatctctggcccatattcaacaaggccttcgaggttgttgtcgggtaccctgccgatgacttcagatttgttgccggcaagactcccttgtcgacactcaaggagtccttgattttcagcgtggtgtactacagcgtcatctttggcggccgtgaattgatgcgcaaccgggaaccattcaagctcaagacgctgttcttgatccacaacttcatcctcacctccatcagcgctatcctgctggtcctcttcatcgagcaactgctgcctaccgttgtccgcaagggcatcttctttgccatttgcgatgctgatggaggctggacccagcctttggttgtgctgtactatttgaactacctgaccaagtacctggaattcattgacaccgtctttttgttcctgaagaagaagcccctgaccttcctccactgctaccaccatggtgcgactgcgttcctctgctacacccagctcatcggatcgacctcggtctcctgggttgtgatcagcctgaacctgactgttcatgtcgttatgtactggtactacttccaaagtgcccgaggcatcaagatctggtggaaggaatggatcacccgcctccagatcgtccagttcgtcattgatctcggcttcgtctatttcgcatcctacacctacttcacctccagctacttccagtggatgccaaatgcgggaaaatgcgctggagaggagtttgccgcctttgctggaattggcacgattacctcttacctcgtccttttcatttccttctacttcgccacatatagtaaggataagaaggcacccaacacgcgcaagactcttcgccgtatgtctcaggctcctctccccgacccgcacgttgttgccaccaacccctcggccaaggcgactggcgccagaaaggccaatggcgtcactacccgttctcgcaaggcataattggcgaaagccatcgtgctgtggcaacccctttgtctggaatgctcctagtcttttctgacggcaggggaatgtttcctgtcaatgcaagagagagcaagtagctgctgttgcgtttgtggcatagtcattgttgatgccataatccattaatgatggtaggcggcgcgttattgggactggcgaaatccggctttgcatttgcggacgatgcgagaaattgcacaggctggagtttggatgactggatgatggtcaaatgcgtcaaaacagggtgagattttcacctcagcgtgttacaatatctgtacaatgcaagaacgtgtagagtttatgtgtcgtgcttgaacaagacatagaggaaaatgtagatgatactaataactgaatgacataataataaaacatgagcaataagtcaatatgct

SEQ ID NO: 15000 - DNA, 480 bp, Muscodor strobelii
  misc_feature: SGI cDNA ID NO. 564957
  misc_feature: Reduced expression when VOC is produced
  misc_feature: Encodes the peptide sequence at SEQ ID NO 15001
atgtcttcgtctctccttcgcgtcgccgcccgcggcccaacgcagactttcttccgcgcctaccgtcccgtcgctccctcccacgccagcgccgccgtcgtcccgggcttcatcgccgcctccggcctcaacttcagcactaccgtctctcgccgcagcgaccacgaggagacctttgaggagtttaccgcccgatacgagaaggaattcgacggtgtgcaggatgtcttcgagctccagcgcaacctgaacaacgccttcgcctacgatctcgtcccctcgccctccgttctccaggccgccctcaaggctgccaggagggtcaacgacttccccaccgccgtccgcatcttcgagggcgtcaaggccaaggtcgagaacaaaggccagtatcagcagtatctcgatgagctcaagcccctgcgggaggagctcggcgtcgtcctcaaggaggacctatatcccgaagtcgccaagtag

SEQ ID NO: 15001 - protein, 159 aa, Muscodor strobelii
  misc_feature: SGI Peptide ID NO. 564957
  misc_feature (54)..(157): Pfam Id: PF02284 Pfam Desc: Cytochrome c oxidase subunit Va
  misc_feature (55)..(157): Pfam Id: PF02284 Pfam Desc: Cytochrome c oxidase subunit Va
  misc_feature (1)..(159): NCBI GI: 116199205 Blast Desc: CHGG_07758 [Chaetomium globosum CBS 148.51] gi|88179037|gb|EAQ86505.1| CHGG_07758 [Chaetomium globosum CBS 148.51]
  misc_feature (1)..(156): NCBI GI: 261355631 Blast Desc: cytochrome c oxidase polypeptide VI [Verticillium albo-atrum VaMs.102]
  misc_feature (3)..(155): NCBI GI: 119182971 Blast Desc: CIMG_06473 [Coccidioides immitis RS]
  misc_feature (17)..(156): NCBI GI: 256731380 Blast Desc: NECHADRAFT_101622 [Nectria haematococca mpVI 77-13-4]
  misc_feature (2)..(159): NCBI GI: 225684940 Blast Desc: cytochrome-c oxidase chain VI [Paracoccidioides brasiliensis Pb03]
  misc_feature (5)..(156): NCBI GI: 156062560 Blast Desc: SS1G_01396 [Sclerotinia sclerotiorum 1980] gi|154696732|gb|EDN96470.1| SS1G_01396 [Sclerotinia sclerotiorum 1980]
  misc_feature (2)..(159): NCBI GI: 226294251 Blast Desc: conserved [Paracoccidioides brasiliensis Pb18]
  misc_feature (1)..(156): NCBI GI: 39971931 Blast Desc: MGG_07281 [Magnaporthe grisea 70-15] gi|145019785|gb|EDK04013.1| MGG_07281 [Magnaporthe grisea 70-15]
  misc_feature (2)..(159): NCBI GI: 226281262 Blast Desc: conserved [Paracoccidioides brasiliensis Pb01]
  misc_feature (2)..(159): NCBI GI: 50428882 Blast Desc: cytochrome c oxidase subunit VIa [Paracoccidioides brasiliensis]
  misc_feature: Useful for introducing or modulating the production of volatile compounds
MSSSLLRVAARGPTQTFFRAYRPVAPSHASAAVVPGFIAASGLNFSTTVSRRSDHEETFEEFTARYEKEFDGVQDVFELQRNLNNAFAYDLVPSPSVLQAALKAARRVNDFPTAVRIFEGVKAKVENKGQYQQYLDELKPLREELGVVLKEDLYPEVAK

SEQ ID NO: 15002 - DNA, 1130 bp, Muscodor strobelii
  misc_feature: SGI EST ID NO. CUFF.35754.0
  misc_feature: Variant of the nucleotide sequence at SEQ ID NO 15000
tcgcagaacatcgttcgatgacagaattcaccactgtacaagcgacttgaaaaccgcgaggccagacacaccaacaccagcaccgccgcccgtcgacccgacagcctgcctctcgccgctacaccctctccgctctttcttccgcgcacagccacaggccatgtcttcgtctctccttcgcgtcgccgcccgcggcccaacgcagactttcttccgcgcctaccgtcccgtcgctccctcccacgccagcgccgccgtcgtcccgggcttcatcgccgcctccggcctcaacttcagcactaccgtctctcgccgcagcgaccacgaggagacctttgaggagtttaccgcccgatacgagaaggaattcgacggtgtgcaggatgtcttcgagctccagcgcaacctgaacaacgccttcgcctacgatctcgtcccctcgccctccgttctccaggccgccctcaaggctgccaggagggtcaacgacttccccaccgccgtccgcatcttcgagggcgtcaaggccaaggtcgagaacaaaggccagtatcagcagtatctcgatgagctcaagcccctgcgggaggagctcggcgtcgtcctcaaggaggacctatatcccgaagtcgccaagtagacgcctcgcctttcccacacggcttggcatacccacgttccatatagatggctccagttctggtctcttgatgggaaggaatggaataaatcggagggacttagggcagcttggcgatgacgaggaatgagatctatggggaaccggctggcttcccacaccaggcatgccgaccacagccccatgtgtatatgtctaatactattactgcaacccctttcaccaatcacatttagatgtcctagttgttcctcatcgggattggcaaacgggaaatagaggtggccgtcgacgggccagcatgagaagatagagaggcgaggccgctagtcatttttgttttgtcgcccgttcatacgtgtaaagcatctttgttcaaccaacgttctcctgtgcacaacgattctgcgtgacattcagctctacttctcagataagtccacggccgccttcgtagtccccggagttatgataagcttctcggtttacg

SEQ ID NO: 15003 - DNA, 1662 bp, Muscodor strobelii
  misc_feature: SGI cDNA ID NO. 564958
  misc_feature: Reduced expression when VOC is produced
  misc_feature: Encodes the peptide sequence at SEQ ID NO 15004
atggcgaccgaagttgaggaagctgttgctactgctggtagcgctatttcgaatgaagagatacacccttataggatacatgtctcatctcgatatctcagcctcaccaagcaaaagcttgagctcacaagattgcctcatgagcaacctgagccgaagtctcggcattggtggcagccaaaatcttatgttgaaccactgatcgacttttggctagaacaatactcatggcgagaacaagaagaacttatgaacgacgatctaccacagtttcgtacagcattcagcataccaaatatcgagtcacccgtcagaatacatttcatacacgttcgctcgtcacacgccaatgctatcccactttgtttaattccacctttccccttctccaacctgagcttggggcatctggtcaagctattcactgatccagaagatgcctcgaatgaccaaccatttcacctagtaatcccgtcactacccggtcttggttttagcgatgcgcttcccaccgatactgcaatgatctcaactgtagcggagctactcgactcattaatgaagcgtcttgagtatgccttctatcttacaacaaatgcggcggcgggagtcgcttcgcctgcaggaatagatcataagattgccgagtaccttgcagtgcactatacagactcgtgtgtcggaactcatcttatttcgccaccattagcacagccacaaatccaggaagcaccactagaatgggcgaaatggtctattgcgagtttcttcgaagcctcgatactgggatatcgcgaggaggacttttccgccctgagatataatggcggaatgaccacgtcaaagaaacacacaactccagcagaatttggactcaaccggctcgggctcaccgaacctaacacgctggcctatgcgctctgtgactcaccaacaggccttctcgtgttcgtcatgaagggacttcgcattctggcaccccagagaaagtttacatcgacggaaattatcaatttcacacaactcgcttggttgcctgggcccgagtccgccttgcgattctgggcacactgtttgcagaattcggagaaagcccagagaaaagcgaccccaaagccgaaagttgctattacagtattcctcggcgatagggcaaggcagttgtctggtggagatagcgaagacatggagacaacgattcccatgctccccgaggtcgcgaagaagacatactcgtgccccagctgggctaagacaaagtataacgtcctccacgccaatcgagccattggtgagcctggccttctggcatgggagcgtccagagcttatcgcggcgggcgttaggggactagctgccgcagtcttgaaagtagaccaacgaataaggcccgctgaggtccctgagattgctccattagagcaagtagtagctgtcccagctgatgatccagcacagagacagccagagcctggaactccagcacaacatgaccaggaactgctggcgccgccatcaatcgcagagaggttacatccgtctagggaagtaagtgatgataccaaggttgctagcgatgaggatctttctatggcgaagacgccgtcaccactacctaccccgagccctgtttacttgccaccaccaacaaccactggctaa

SEQ ID NO: 15004 - protein, 553 aa, Muscodor strobelii
  misc_feature: SGI Peptide ID NO. 564958
  misc_feature (17)..(468): NCBI GI: 46125245 Blast Desc: FG07000.1 [Gibberella zeae PH-1]
  misc_feature (17)..(486): NCBI GI: 256731026 Blast Desc: NECHADRAFT_84852 [Nectria haematococca mpVI 77-13-4]
  misc_feature (18)..(537): NCBI GI: 164424744 Blast Desc: NCU06675 [Neurospora crassa OR74A] gi|157070642|gb|EAA31686.2| conserved [Neurospora crassa OR74A]
  misc_feature (18)..(466): NCBI GI: 28950123 Blast Desc: related to epoxide hydrolase [Neurospora crassa]
  misc_feature (18)..(477): NCBI GI: 39972049 Blast Desc: MGG_07340 [Magnaporthe grisea 70-15] gi|145019853|gb|EDK04081.1| MGG_07340 [Magnaporthe grisea 70-15]
  misc_feature (19)..(538): NCBI GI: 171694059 Blast Desc: protein product [Podospora anserina] gi|170946978|emb|CAP73782.1| protein product [Podospora anserina]
  misc_feature (14)..(464): NCBI GI: 116199167 Blast Desc: CHGG_07739 [Chaetomium globosum CBS 148.51] gi|88179018|gb|EAQ86486.1| CHGG_07739 [Chaetomium globosum CBS 148.51]
  misc_feature (61)..(463): NCBI GI: 154317936 Blast Desc: BC1G_02951 [Botryotinia fuckeliana B05.10] gi|150843609|gb|EDN18802.1| BC1G_02951 [Botryotinia fuckeliana B05.10]
  misc_feature (3)..(463): NCBI GI: 156050119 Blast Desc: SS1G_07646 [Sclerotinia sclerotiorum 1980] gi|154692047|gb|EDN91785.1| SS1G_07646 [Sclerotinia sclerotiorum 1980]
  misc_feature (19)..(273): NCBI GI: 169616101 Blast Desc: SNOG_11223 [Phaeosphaeria nodorum SN15] gi|160703113|gb|EAT81722.2| SNOG_11223 [Phaeosphaeria nodorum SN15]
  misc_feature (14)..(444): SWISSPROT Homolog: EC 3.3.2.9 Microsomal epoxide hydrolase
  misc_feature: Useful for introducing or modulating the production of volatile compounds
MATEVEEAVATAGSAISNEEIHPYRIHVSSRYLSLTKQKLELTRLPHEQPEPKSRHWWQPKSYVEPLIDFWLEQYSWREQEELMNDDLPQFRTAFSIPNIESPVRIHFIHVRSSHANAIPLCLIPPFPFSNLSLGHLVKLFTDPEDASNDQPFHLVIPSLPGLGFSDALPTDTAMISTVAELLDSLMKRLEYAFYLTTNAAAGVASPAGIDHKIAEYLAVHYTDSCVGTHLISPPLAQPQIQEAPLEWAKWSIASFFEASILGYREEDFSALRYNGGMTTSKKHTTPAEFGLNRLGLTEPNTLAYALCDSPTGLLVFVMKGLRILAPQRKFTSTEIINFTQLAWLPGPESALRFWAHCLQNSEKAQRKATPKPKVAITVFLGDRARQLSGGDSEDMETTIPMLPEVAKKTYSCPSWAKTKYNVLHANRAIGEPGLLAWERPELIAAGVRGLAAAVLKVDQRIRPAEVPEIAPLEQVVAVPADDPAQRQPEPGTPAQHDQELLAPPSIAERLHPSREVSDDTKVASDEDLSMAKTPSPLPTPSPVYLPPPTTTG

SEQ ID NO: 15005 - DNA, 2254 bp, Muscodor strobelii
  misc_feature: SGI EST ID NO. CUFF.35768.0
  misc_feature: Variant of the nucleotide sequence at SEQ ID NO 15003
cgttgataaacgaccggctatctgtttttagcatgtggtttgattatttctctctctggttgcgttttgtgcttcttacactcgtttctttgagtatatgtttctatatcttggatcgcaaatatattagtggcgtatatcgtctaagtataggtacctttgttttctgaaagcgaaatacacagtacgcgaggcgacggagcacgtcgacttgcttacctgatggcgaccgaagttgaggaagctgttgctactgctggtagcgctatttcgaatgaagagatacacccttataggatacatgtctcatctcgatatctcagcctcaccaagcaaaagcttgagctcacaagattgcctcatgagcaacctgagccgaagtctcggcattggtggcagccaaaatcttatgttgaaccactgatcgacttttggctagaacaatactcatggcgagaacaagaagaacttatgaacgacgatctaccacagtttcgtacagcattcagcataccaaatatcgagtcacccgtcagaatacatttcatacacgttcgctcgtcacacgccaatgctatcccactttgtttaattccacctttccccttctccaacctgagcttggggcatctggtcaagctattcactgatccagaagatgcctcgaatgaccaaccatttcacctagtaatcccgtcactacccggtcttggttttagcgatgcgcttcccaccgatactgcaatgatctcaactgtagcggagctactcgactcattaatgaagcgtcttgagtatgccttctatcttacaacaaatgcggcggcgggagtcgcttcgcctgcaggaatagatcataagattgccgagtaccttgcagtgcactatacagactcgtgtgtcggaactcatcttatttcgccaccattagcacagccacaaatccaggaagcaccactagaatgggcgaaatggtctattgcgagtttcttcgaagcctcgatactgggatatcgcgaggaggacttttccgccctgagatataatggcggaatgaccacgtcaaagaaacacacaactccagcagaatttggactcaaccggctcgggctcaccgaacctaacacgctggcctatgcgctctgtgactcaccaacaggccttctcgtgttcgtcatgaagggacttcgcattctggcaccccagagaaagtttacatcgacggaaattatcaatttcacacaactcgcttggttgcctgggcccgagtccgccttgcgattctgggcacactgtttgcagaattcggagaaagcccagagaaaagcgaccccaaagccgaaagttgctattacagtattcctcggcgatagggcaaggcagttgtctggtggagatagcgaagacatggagacaacgattcccatgctccccgaggtcgcgaagaagacatactcgtgccccagctgggctaagacaaagtataacgtcctccacgccaatcgagccattggtgagcctggccttctggcatgggagcgtccagagcttatcgcggcgggcgttaggggactagctgccgcagtcttgaaagtagaccaacgaataaggcccgctgaggtccctgagattgctccattagagcaagtagtagctgtcccagctgatgatccagcacagagacagccagagcctggaactccagcacaacatgaccaggaactgctggcgccgccatcaatcgcagagaggttacatccgtctagggaagtaagtgatgataccaaggttgctagcgatgaggatctttctatggcgaagacgccgtcaccactacctaccccgagccctgtttacttgccaccaccaacaaccactggctaataccggttgagtttatcggacagacagcatgacgataatgaacatgacgaacattgagattgaggaggaaaatcatcacaactgtgtcagagtgtgacagaacacttaataagaaggagcataccaacagctaatggcggtggaggaactttggctatcagcaatttcataccaacaagatgtaatgggaagacacatggatgcacagcatacggagtataggaaaggaaagggcctggtgtatttatgaactggacgcaaaacttttagacgacaacgagataccacgcgctccttatttaatatgcatactattttgactcaaaaatcgaaagtcgtgagaaattctaagagattctatagaatgagg

SEQ ID NO: 15006 - DNA, 897 bp, Muscodor strobelii
  misc_feature: SGI cDNA ID NO. 564959
  misc_feature: Encodes the peptide sequence at SEQ ID NO 15007
atgtctgcgcggaggaagacagtcttgattacgggatgtagcaaaggcggtattggcgacgcactcgcgctcgagtatcatcgtcggggattacgagtcctggcatcagcgagaaacttggcaaaggtcgaacatttgaaaaccctaggtatcgaagtcttgaagcttgacgtcgtggacaaggaatcactgaaaaatgctgtcgaagaagtgtcgaaactcacgagcaataccctggacattttggttaataattcgggcagcggctatatgatgccgctactggacgcagatttggacgaagcgcgcaagattttcgaggtcaatgtattgggaacgctggctatgtgtcaggcttttacaccattgcttgtagcgacggtaagggatggctcgccagcgcggatcgttaatattggatctgtaacatcaagaatgcaagtcccttggcaaggtatatacaatgcaagcaaagctgcattgcattcgatgaacgacacactgcgaatagaactggctcccttcggtatcgaagtacttcactttgtcactggcggcattcaaaccaagttcttcgcgaactcgtcaggcgctgtgctacccgaggacagcgcatatgcatcagcgcgagacattattgaagcagacgtggctggcaaggctggtacgaagtcgcaaacgatgtctgccgagaagtacgcagggattgttgctggaaatagcctttcccgatggccgagcaaagagatgtggataggaggtcgtgcaactctgagctggctcggcaatcaattcttaccagccacgataagtgactggatcatctcaaacttcatgggatggtcattcggtggccttaaagacagattgcagacacctaaaaataagccaacatag

SEQ ID NO: 15007 - protein, 298 aa, Muscodor strobelii
  misc_feature: SGI Peptide ID NO. 564959
  misc_feature (6)..(173): Pfam Id: PF00106 Pfam Desc: short chain dehydrogenase
  misc_feature (5)..(279): NCBI GI: 119467458 Blast Desc: short-chain dehydrogenase/reductase, [Neosartorya fischeri NRRL 181] gi|119405687|gb|EAW15638.1| short-chain dehydrogenase/reductase, [Neosartorya fischeri NRRL 181]
  misc_feature (5)..(279): NCBI GI: 146324313 Blast Desc: short-chain dehydrogenase/reductase [Aspergillus fumigatus Af293] gi|129556254|gb|EAL85701.2| short-chain dehydrogenase/reductase, [Aspergillus fumigatus Af293] fumigatus
  misc_feature (5)..(274): NCBI GI: 145254010 Blast Desc: An18g00230 [Aspergillus niger] gi|134084069|emb|CAK43099.1| protein product [Aspergillus niger]
  misc_feature (5)..(296): NCBI GI: 154317593 Blast Desc: BC1G_03148 [Botryotinia fuckeliana B05.10] gi|150844322|gb|EDN19515.1| BC1G_03148 [Botryotinia fuckeliana B05.10]
  misc_feature (6)..(275): NCBI GI: 156049501 Blast Desc: SS1G_08457 [Sclerotinia sclerotiorum 1980] gi|154692856|gb|EDN92594.1| SS1G_08457 [Sclerotinia sclerotiorum 1980]
  misc_feature (5)..(266): NCBI GI: 256727397 Blast Desc: NECHADRAFT_90830 [Nectria haematococca mpVI 77-13-4]
  misc_feature (5)..(280): NCBI GI: 256723333 Blast Desc: NECHADRAFT_72692 [Nectria haematococca mpVI 77-13-4]
  misc_feature (4)..(292): NCBI GI: 212535886 Blast Desc: short chain dehydrogenase/reductase (Ayr1), [Penicillium marneffei ATCC 18224] gi|210070498|gb|EEA24588.1| short chain dehydrogenase/reductase (Ayr1), [Penicillium ATCC
  misc_feature (2)..(292): NCBI GI: 259483699 Blast Desc: TPA: short chain dehydrogenase/reductase (Ayr1), (AFU_orthologue; AFUA_4G04530) [Aspergillus nidulans FGSC A4]
  misc_feature (5)..(280): NCBI GI: 242774205 Blast Desc: short-chain dehydrogenase/reductase, [Talaromyces stipitatus ATCC 10500] gi|218722013|gb|EED21431.1| short-chain dehydrogenase/reductase, [Talaromyces stipitatus ATCC 10500]
  misc_feature (2)..(267): SWISSPROT Homolog: EC 1.1.1.101 Acylglycerone-phosphate reductase
MSARRKTVLITGCSKGGIGDALALEYHRRGLRVLASARNLAKVEHLKTLGIEVLKLDVVDKESLKNAVEEVSKLTSNTLDILVNNSGSGYMMPLLDADLDEARKIFEVNVLGTLAMCQAFTPLLVATVRDGSPARIVNIGSVTSRMQVPWQGIYNASKAALHSMNDTLRIELAPFGIEVLHFVTGGIQTKFFANSSGAVLPEDSAYASARDIIEADVAGKAGTKSQTMSAEKYAGIVAGNSLSRWPSKEMWIGGRATLSWLGNQFLPATISDWIISNFMGWSFGGLKDRLQTPKNKPT

SEQ ID NO: 15008 - DNA, 2010 bp, Muscodor strobelii
  misc_feature: SGI EST ID NO. CUFF.35776.1
  misc_feature: Variant of the nucleotide sequence at SEQ ID NO 15006
ctagagtggctcacgcgccgccatggtggtgagattggcatgttcctcatcggattttcaaatatgagtgtaactgcacacacatcgcgaattgacaatcttgcatcgagtgagactcaagcctcatatcgttgtgtaagtgaagcatattgttatgattcggcacagtggggccttacggttagagcggccgagctaacatagcttcgattctcaaacagccgtctcacccctatcgaatacactattaccagatgggttgagattcattgtctatattagttgtcttggttgaatttgtctcgtctgttcttcctctgcagggagaacgacacgtagtgtcagggctcgggctcggctcgggaggatcttttttggggaaatttcatcatgcgcgacgcgctaagaccccagtcgtaattcgacttttatacagtatcatagatacgtcaatgcaatggccggccgaccacagtttgatggttcgccgaaagtcacgagaccctctccgacttcattccaactcgaactctattgttttaagccaataacagtttaaaacgttgtcttcgcggacgttgtcatcgtttcgattactagactaatccgtagtcgataaggatcatccagtagtgcgggggagtgaacaccagcagtgtaacgatagcctcggcaatacccgcgatgaataaacatacaattcctacctattgcgccgtcaagcatagtacgaggacatgtctgcgcggaggaagacagtcttgattacgggatgtagcaaaggcggtattggcgacgcactcgcgctcgagtatcatcgtcggggattacgagtcctggcatcagcgagaaacttggcaaaggtcgaacatttgaaaaccctaggtatcgaagtcttgaagcttgacgtcgtggacaaggaatcactgaaaaatgctgtcgaagaagtgtcgaaactcacgagcaataccctggacattttggttaataattcgggcagcggctatatgatgccgctactggacgcagatttggacgaagcgcgcaagattttcgaggtcaatgtattgggaacgctggctatgtgtcaggcttttacaccattgcttgtagcgacggtaagggatggctcgccagcgcggatcgttaatattggatctgtaacatcaagaatgcaagtcccttggcaaggtatatacaatgcaagcaaagctgcattgcattcgatgaacgacacactgcgaatagaactggctcccttcggtatcgaagtacttcactttgtcactggcggcattcaaaccaagttcttcgcgaactcgtcaggcgctgtgctacccgaggacagcgcatatgcatcagcgcgagacattattgaagcagacgtggctggcaaggctggtacgaagtcgcaaacgatgtctgccgagaagtacgcagggattgttgctggaaatagcctttcccgatggccgagcaaagagatgtggataggaggtcgtgcaactctgagctggctcggcaatcaattcttaccagccacgataagtgactggatcatctcaaacttcatgggatggtcattcggtggccttaaagacagattgcagacacctaaaaataagccaacatagaagtgacatctgcaaacgaaatgttgccaaatagcgacaggaaaggtttacgccgtggcgtacaatgtaatataatggcggacgccaaaggggaacagatattctttcttaagatatgcagcagtgattacaattgctacgtttcctgttgacaagcaatgcttagtcttgtctcgttaggagacgttctatgtatcgacctaaagggacgtaatagagcatcgcaaattgccgctggtagactccatacatagcgtgtcatacatcgccagaacacagagaactcgagtgatgacattgatatcctatgaatcttgctctgtaagaattggtgtgttgctcaggtggtaggagatgaacgtccctatatctaaag

SEQ ID NO: 15009 - DNA, 1521 bp, Muscodor strobelii
  misc_feature: SGI cDNA ID NO. 564960
  misc_feature: Encodes the peptide sequence at SEQ ID NO 15010
atggagtctttgtcacatgccatcactcagttgcaagtcgcagggacaattcttgcgatctatttcaccagtcttgccatttatcgtctattcctcagtccaatatcgcacattcccggccccaaacttgcggcggtttcgcgctggtacgaggcatactacgatgtaatccagggtggaaaatacaccttcaagattagggagttgcatgaaaaatatggaccggttgtacggatcagcccatatgagatccatgtcagcgatccgtccttctttgagcaattgtatcgccaggatggccactgggataagcatcgctgggcgacggatgccttcgcagcatacggcgcaacgctcttcacggcagatcatgctatccacaaggcgcgtcgacagcctctagctccgtacttctcgaaagcaacgatcatggcacatcaagacatgattagaggctacctgggcaagctcacctcacgactatcatcgttcgccagatccggcgcgacagtgaacctcggccctgccgtcatggcatttacccgcgacgtggcgaatgatttcattctaggcaagagctatggcagtcttgagaaggaagatttcgagatcggactcaagagcgttggagaaaacggtggggaggtatggcgtatctccaaacacgtccggttctggatacacatgttcaaagcaatacccgttggcttcgtcatgaaatatggcgatcccgcgctcaagcagttttttggctacctgcaagacaccgagaaggatacagaacgactcatgaacgaggcgatatcgtctacagacgttgctaatagccgcagtatagtgcacgaaatcatgaagtcgaagctaccgccgtctgagaagttgaaatggagagtctttgacgatgtttcgactgtgaccggcgccgggatcgacaccactgcggctgcactgcggttgatacttttcaatgtctacagcaacccggccatcttggaccggctccgagcagagattgcgtctatatgcgcagcgggtgatgagataccggagctgaaagtgcttgaacgactcccgttcctcacagcaactatcaccgaggggttgcgccttagtcctgcgatcggaggacgtatgggacgcgttgcagatagagacctcttctacaatgcctggcgcattcctgcccgaacaccagtcagtatgacactcgttctcatgcataccgatagcaaagtgtacgaagagccattcttgttcaaccccgaccgatggatggatccagaagcgaagagtagaatggaaaaagctttcgcaccgttctcgaggggcacacgggactgtcttggaaggcatcttgcttgggctgaaatgtacctcctgctagcgacattggtgagccgatacgactttcaatatcaaggagcaacggccgaagacttcctgcctgatagcgacgcctttgctatcgggacaaagagtaacggtgatttgaatgccaatgtaggcatccgaaaggcctag

SEQ ID NO: 15010 - protein, 506 aa, Muscodor strobelii
  misc_feature: SGI Peptide ID NO. 564960
  misc_feature (39)..(498): Pfam Id: PF00067 Pfam Desc: Cytochrome P450
  misc_feature (302)..(473): Pfam Id: PF00067 Pfam Desc: Cytochrome P450
  misc_feature (1)..(451): NCBI GI: 116206024 Blast Desc: CHGG_02305 [Chaetomium globosum CBS 148.51] gi|88182902|gb|EAQ90370.1| CHGG_02305 [Chaetomium globosum CBS 148.51]
  misc_feature (21)..(506): NCBI GI: 238841488 Blast Desc: cytochrome P450 [Microsporum canis CBS 113480]
  misc_feature (1)..(505): NCBI GI: 171683471 Blast Desc: protein product [Podospora anserina] gi|170941695|emb|CAP67349.1| protein product [Podospora anserina]
  misc_feature (18)..(506): NCBI GI: 238839890 Blast Desc: cytochrome P450 [Microsporum canis CBS 113480]
  misc_feature (20)..(505): NCBI GI: 171688250 Blast Desc: protein product [Podospora anserina] gi|170944087|emb|CAP70197.1| protein product [Podospora anserina]
  misc_feature (4)..(479): NCBI GI: 119499275 Blast Desc: cytochrome P450, [Neosartorya fischeri NRRL 181] gi|119414559|gb|EAW24498.1| cytochrome P450, [Neosartorya fischeri NRRL 181]
  misc_feature (20)..(487): NCBI GI: 119191412 Blast Desc: CIMG_00083 [Coccidioides immitis RS]
  misc_feature (21)..(487): NCBI GI: 169765436 Blast Desc: [Aspergillus oryzae RIB40] gi|83765044|dbj|BAE55187.1| protein product [Aspergillus oryzae]
  misc_feature (13)..(488): NCBI GI: 242815597 Blast Desc: benzoate 4-monooxygenase cytochrome P450, [Talaromyces stipitatus ATCC 10500] gi|218714939|gb|EED14362.1| benzoate 4-monooxygenase cytochrome P450, [Talaromyces stipitatus ATCC
  misc_feature (20)..(487): NCBI GI: 240106487 Blast Desc: Cytochrome P450 family protein [Coccidioides posadasii C735 delta SOWgp]
  misc_feature (66)..(471): SWISSPROT Homolog: EC 1.14.14.1 Unspecific monooxygenase
MESLSHAITQLQVAGTILAIYFTSLAIYRLFLSPISHIPGPKLAAVSRWYEAYYDVIQGGKYTFKIRELHEKYGPVVRISPYEIHVSDPSFFEQLYRQDGHWDKHRWATDAFAAYGATLFTADHAIHKARRQPLAPYFSKATIMAHQDMIRGYLGKLTSRLSSFARSGATVNLGPAVMAFTRDVANDFILGKSYGSLEKEDFEIGLKSVGENGGEVWRISKHVRFWIHMFKAIPVGFVMKYGDPALKQFFGYLQDTEKDTERLMNEAISSTDVANSRSIVHEIMKSKLPPSEKLKWRVFDDVSTVTGAGIDTTAAALRLILFNVYSNPAILDRLRAEIASICAAGDEIPELKVLERLPFLTATITEGLRLSPAIGGRMGRVADRDLFYNAWRIPARTPVSMTLVLMHTDSKVYEEPFLFNPDRWMDPEAKSRMEKAFAPFSRGTRDCLGRHLAWAEMYLLLATLVSRYDFQYQGATAEDFLPDSDAFAIGTKSNGDLNANVGIRKA

SEQ ID NO: 15011 - DNA, 2053 bp, Muscodor strobelii
  misc_feature: SGI EST ID NO. CUFF.35770.0
  misc_feature: Variant of the nucleotide sequence at SEQ ID NO 15009
tgaatatgtcccatcgcatagcatctcatgatcatggaagccgattaagtctaagtaatctttaagcaacgggagacggcaaataaacgatgataatacacgtaattggccgctgtactgagaagttgccttagcgctggtcccgacggaatagtctagcatgctcgcatggggaccctgaccccttgcatttgcttacacgattacgtttaaagacgacattggtccggactcaacaccaataagcatgtttacatgtcgaaaaattggagcggacatcgcgaattcgaataaatggcgtaacgaatctctgtcgttcgacttccaatgtaccttagttgttgtatcgagtaatccgtgtaagttgaacaacgggttagcaagcatggagtctttgtcacatgccatcactcagttgcaagtcgcagggacaattcttgcgatctatttcaccagtcttgccatttatcgtctattcctcagtccaatatcgcacattcccggccccaaacttgcggcggtttcgcgctggtacgaggcatactacgatgtaatccagggtggaaaatacaccttcaagattagggagttgcatgaaaaatatggaccggttgtacggatcagcccatatgagatccatgtcagcgatccgtccttctttgagcaattgtatcgccaggatggccactgggataagcatcgctgggcgacggatgccttcgcagcatacggcgcaacgctcttcacggcagatcatgctatccacaaggcgcgtcgacagcctctagctccgtacttctcgaaagcaacgatcatggcacatcaagacatgattagaggctacctgggcaagctcacctcacgactatcatcgttcgccagatccggcgcgacagtgaacctcggccctgccgtcatggcatttacccgcgacgtggcgaatgatttcattctaggcaagagctatggcagtcttgagaaggaagatttcgagatcggactcaagagcgttggagaaaacggtggggaggtatggcgtatctccaaacacgtccggttctggatacacatgttcaaagcaatacccgttggcttcgtcatgaaatatggcgatcccgcgctcaagcagttttttggctacctgcaagacaccgagaaggatacagaacgactcatgaacgaggcgatatcgtctacagacgttgctaatagccgcagtatagtgcacgaaatcatgaagtcgaagctaccgccgtctgagaagttgaaatggagagtctttgacgatgtttcgactgtgaccggcgccgggatcgacaccactgcggctgcactgcggttgatacttttcaatgtctacagcaacccggccatcttggaccggctccgagcagagattgcgtctatatgcgcagcgggtgatgagataccggagctgaaagtgcttgaacgactcccgttcctcacagcaactatcaccgaggggttgcgccttagtcctgcgatcggaggacgtatgggacgcgttgcagatagagacctcttctacaatgcctggcgcattcctgcccgaacaccagtcagtatgacactcgttctcatgcataccgatagcaaagtgtacgaagagccattcttgttcaaccccgaccgatggatggatccagaagcgaagagtagaatggaaaaagctttcgcaccgttctcgaggggcacacgggactgtcttggaaggcatcttgcttgggctgaaatgtacctcctgctagcgacattggtgagccgatacgactttcaatatcaaggagcaacggccgaagacttcctgcctgatagcgacgcctttgctatcgggacaaagagtaacggtgatttgaatgccaatgtaggcatccgaaaggcctagaaaacggtgtttcataggagtatgcttacgttagttactgtgttccgcaccgctgctagaatcccaattaagcttgagaatcgattcgtcttttaagcccaatggccacccaggaaatgtatgttgcacgcatgacttaaccatcag

SEQ ID NO: 15012 - DNA, 837 bp, Muscodor strobelii
  misc_feature: SGI cDNA ID NO. 564961
  misc_feature: Elevated expression when VOC is produced
  misc_feature: Encodes the peptide sequence at SEQ ID NO 15013
atgttcaaagcaatacccgttggcttcgtcatgaaatatggcgatcccgcgctcaagcagttttttggctacctgcaagacaccgagaaggatacagaacgactcatgaacgaggcgatatcgtctacagacgttgctaatagccgcagtatagtgcacgaaatcatgaagtcgaagctaccgccgtctgagaagttgaaatggagagtctttgacgatgtttcgactgtgaccggcgccgggatcgacaccactgcggctgcactgcggttgatacttttcaatgtctacagcaacccggccatcttggaccggctccgagcagagattgcgtctatatgcgcagcgggtgatgagataccggagctgaaagtgcttgaacgactcccgttcctcacagcaactatcaccgaggggttgcgccttagtcctgcgatcggaggacgtatgggacgcgttgcagatagagacctcttctacaatgcctggcgcattcctgcccgaacaccagtcagtatgacactcgttctcatgcataccgatagcaaagtgtacgaagagccattcttgttcaaccccgaccgatggatggatccagaagcgaagagtagaatggaaaaagctttcgcaccgttctcgaggggcacacgggactgtcttggaaggcatcttgcttgggctgaaatgtacctcctgctagcgacattggtgagccgatacgactttcaatatcaaggagcaacggccgaagacttcctgcctgatagcgacgcctttgctatcgggacaaagagtaacggtgatttgaatgccaatgtaggcatccgaaaggcctag

SEQ ID NO: 15013 - protein, 278 aa, Muscodor strobelii
  misc_feature: SGI Peptide ID NO. 564961
  misc_feature (74)..(245): Pfam Id: PF00067 Pfam Desc: Cytochrome P450
  misc_feature (3)..(278): NCBI GI: 238839890 Blast Desc: cytochrome P450 [Microsporum canis CBS 113480]
  misc_feature (4)..(277): NCBI GI: 171683471 Blast Desc: protein product [Podospora anserina] gi|170941695|emb|CAP67349.1| protein product [Podospora anserina]
  misc_feature (2)..(223): NCBI GI: 116206024 Blast Desc: CHGG_02305 [Chaetomium globosum CBS 148.51] gi|88182902|gb|EAQ90370.1| CHGG_02305 [Chaetomium globosum CBS 148.51]
  misc_feature (1)..(278): NCBI GI: 238841488 Blast Desc: cytochrome P450 [Microsporum canis CBS 113480]
  misc_feature (1)..(260): NCBI GI: 242815597 Blast Desc: benzoate 4-monooxygenase cytochrome P450, [Talaromyces stipitatus ATCC 10500] gi|218714939|gb|EED14362.1| benzoate 4-monooxygenase cytochrome P450, [Talaromyces stipitatus ATCC
  misc_feature (15)..(259): NCBI GI: 259480381 Blast Desc: TPA: cytochrome P450, (Eurofung) [Aspergillus nidulans FGSC A4]
  misc_feature (50)..(260): NCBI GI: 212527464 Blast Desc: cytochrome P450, [Penicillium marneffei ATCC 18224] gi|210073287|gb|EEA27374.1| cytochrome P450, [Penicillium marneffei ATCC 18224]
  misc_feature (23)..(277): NCBI GI: 171688250 Blast Desc: protein product [Podospora anserina] gi|170944087|emb|CAP70197.1| protein product [Podospora anserina]
  misc_feature (45)..(277): NCBI GI: 242795016 Blast Desc: cytochrome P450, [Talaromyces stipitatus ATCC 10500] gi|218719081|gb|EED18501.1| cytochrome P450, [Talaromyces stipitatus ATCC 10500]
  misc_feature (10)..(259): NCBI GI: 70985400 Blast Desc: cytochrome P450 [Aspergillus fumigatus Af293] gi|66845834|gb|EAL86168.1| cytochrome P450, [Aspergillus fumigatus Af293] gi|159125869|gb|EDP50985.1| cytochrome P450,
  misc_feature (70)..(243): SWISSPROT Homolog: EC 1.14.14.1 Unspecific monooxygenase
  misc_feature: Useful for introducing or modulating the production of volatile compounds
MFKAIPVGFVMKYGDPALKQFFGYLQDTEKDTERLMNEAISSTDVANSRSIVHEIMKSKLPPSEKLKWRVFDDVSTVTGAGIDTTAAALRLILFNVYSNPAILDRLRAEIASICAAGDEIPELKVLERLPFLTATITEGLRLSPAIGGRMGRVADRDLFYNAWRIPARTPVSMTLVLMHTDSKVYEEPFLFNPDRWMDPEAKSRMEKAFAPFSRGTRDCLGRHLAWAEMYLLLATLVSRYDFQYQGATAEDFLPDSDAFAIGTKSNGDLNANVGIRKA

SEQ ID NO: 15014 - DNA, 2053 bp, Muscodor strobelii; identical to SEQ ID NO: 15011
  misc_feature: SGI EST ID NO. CUFF.35770.0
  misc_feature: Variant of the nucleotide sequence at SEQ ID NO 15012

SEQ ID NO: 15015 - DNA, 1008 bp, Muscodor strobelii
  misc_feature: SGI cDNA ID NO. 564962
  misc_feature: Encodes the peptide sequence at SEQ ID NO 15016
atggccagcaaaggcaacgacaagatcgacaagatcatagcccgcctgcagtcacgcatcagcgaaggcgcattctacgaggcccagcagcagacccgcgtcgtcgccgctcgatacacaaaggcctccaactggtctgccgccgtcgacatcctctacaacgtcgcccagtcgctgctccgggccggccagggcggcagcggcggcgacctctgcgtcctgctcgtcgacacctacaagcaggccgagctcaagcctgactcggccaccaagggcaagctgctcacctgcctgcgcctgttcgacagcgacgagcccacacggaagaagtacatcggcgagataatagcatggtcctccaaattcggcgaatacccagcaggcgatcctgagctgcaccacgtcgccggctccctctacgcagaagagcacgagacctacgacgccgaacgccacctcgtcctgggcaccaaggactcggccgaggtcctagcccgcatggagtacgagtggttccaggaggacgaggcccacaccgctgccacctacgccggccgggctgtgctgccttacctgataacggccaatgtgcgcgccgccaacacctcctaccgcgtcttcaccagcgctcttaacgaggacaagtcggcccagctgggcgtgcaggacgtgagcagcaacagcgccgacatccgcgtctaccctagcataccgctcctcaacttcctcggactcctactgctggccatccagagaggcagcgcagacgtgtacagacagctggcggccaagtacgcgagccatctgaaagagctcgagatgtggaacgaggcgctcgacatgatcgccgagatgtacttcggcatccaaaagccccggcagagcaaccccctgatggacatgatgagcgggttcttcggaggtggtggtgcccccgcgggcgggagctccaagaggcctgcggtcaaggggccgacgtcgatgccagcagcggagggtctagactag

SEQ ID NO: 15016 - protein, 335 aa, Muscodor strobelii
  misc_feature: SGI Peptide ID NO. 564962
  misc_feature (40)..(307): Pfam Id: PF04190 Pfam Desc: Domain of function (DUF410)
  misc_feature (1)..(335): NCBI GI: 39945898 Blast Desc: MGG_08069 [Magnaporthe grisea 70-15] gi|145019307|gb|EDK03535.1| MGG_08069 [Magnaporthe grisea 70-15]
  misc_feature (8)..(335): NCBI GI: 46125885 Blast Desc: FG07320.1 [Gibberella zeae PH-1]
  misc_feature (1)..(306): NCBI GI: 261351617 Blast Desc: DUF410 domain-containing protein [Verticillium albo-atrum VaMs.102]
  misc_feature (8)..(335): NCBI GI: 116199123 Blast Desc: CHGG_07717 [Chaetomium globosum CBS 148.51] gi|88178996|gb|EAQ86464.1| CHGG_07717 [Chaetomium globosum CBS 148.51]
  misc_feature (1)..(335): NCBI GI: 85103607 Blast Desc: NCU01190 [Neurospora crassa OR74A] gi|18376278|emb|CAD21391.1| conserved [Neurospora crassa] gi|28923103|gb|EAA32320.1| conserved [Neurospora crassa OR74A]
  misc_feature (6)..(335): NCBI GI: 171693867 Blast Desc: protein product [Podospora anserina] gi|170946882|emb|CAP73686.1| protein product [Podospora anserina]
  misc_feature (8)..(328): NCBI GI: 255931517 Blast Desc: Pc12g04460 [Penicillium chrysogenum Wisconsin 54-1255] gi|211581934|emb|CAP80073.1| Pc12g04460 [Penicillium chrysogenum Wisconsin 54-1255]
  misc_feature (18)..(302): NCBI GI: 169626335 Blast Desc: SNOG_16452 [Phaeosphaeria nodorum SN15] gi|160705815|gb|EAT76150.2| SNOG_16452 [Phaeosphaeria nodorum SN15]
  misc_feature (8)..(328): NCBI GI: 70984104 Blast Desc: DUF410 domain protein [Aspergillus fumigatus Af293] gi|66845199|gb|EAL85534.1| DUF410 domain protein [Aspergillus fumigatus Af293] gi|159122358|gb|EDP47479.1| DUF410 domain A1163]
  misc_feature (8)..(328): NCBI GI: 119467816 Blast Desc: NFIA_051620 [Neosartorya fischeri NRRL 181] gi|119405866|gb|EAW15817.1| conserved [Neosartorya fischeri NRRL 181]
MASKGNDKIDKIIARLQSRISEGAFYEAQQQTRVVAARYTKASNWSAAVDILYNVAQSLLRAGQGGSGGDLCVLLVDTYKQAELKPDSATKGKLLTCLRLFDSDEPTRKKYIGEIIAWSSKFGEYPAGDPELHHVAGSLYAEEHETYDAERHLVLGTKDSAEVLARMEYEWFQEDEAHTAATYAGRAVLPYLITANVRAANTSYRVFTSALNEDKSAQLGVQDVSSNSADIRVYPSIPLLNFLGLLLLAIQRGSADVYRQLAAKYASHLKELEMWNEALDMIAEMYFGIQKPRQSNPLMDMMSGFFGGGGAPAGGSSKRPAVKGPTSMPAAEGLD

SEQ ID NO: 15017 - DNA, 3093 bp, Muscodor strobelii
  misc_feature: SGI EST ID NO. CUFF.35932.0
  misc_feature: Variant of the nucleotide sequence at SEQ ID NO 15015
gcggctttcagcgagctccatgaaagagagtccaggggctttagctggagggggtcgctggtcagtgtctacaaccgacccacaacttggtgatgcggcgcaggcggcgggatgggaagcagcccgcaaactcgcaccgaaccccaccaaccagctctcctaacgatcacaaagtccaacctcacaaacaccagctgcactccaggacgttgcagccaatagacgctgcttttctcaggactgtaaaatacacctcaagagacaacagtagcattcagtatatctagcccacccgacagagccggcaagagagcccgtacactaggtagcaatggccagcaaaggcaacgacaagatcgacaagatcatagcccgcctgcagtcacgcatcagcgaaggcgcattctacgaggcccagcagcagacccgcgtcgtcgccgctcgatacacaaaggcctccaactggtctgccgccgtcgacatcctctacaacgtcgcccagtcgctgctccgggccggccagggcggcagcggcggcgacctctgcgtcctgctcgtcgacacctacaagcaggccgagctcaagcctgactcggccaccaagggcaagctgctcacctgcctgcgcctgttcgacagcgacgagcccacacggaagaagtacatcggcgagataatagcatggtcctccaaattcggcgaatacccagcaggcgatcctgagctgcaccacgtcgccggctccctctacgcagaagagcacgagacctacgacgccgaacgccacctcgtcctgggcaccaaggactcggccgaggtcctagcccgcatggagtacgagtggttccaggaggacgaggcccacaccgctgccacctacgccggccgggctgtgctgccttacctgataacggccaatgtgcgcgccgccaacacctcctaccgcgtcttcaccagcgctcttaacgaggacaagtcggcccagctgggcgtgcaggacgtgagcagcaacagcgccgacatccgcgtctaccctagcataccgctcctcaacttcctcggactcctactgctggccatccagagaggcagcgcagacgtgtacagacagctggcggccaagtacgcgagccatctgaaagagctcgagatgtggaacgaggcgctcgacatgatcgccgagatgtacttcggcatccaaaagccccggcagagcaaccccctgatggacatgatgagcgggttcttcggaggtggtggtgcccccgcgggcgggagctccaagaggcctgcggtcaaggggccgacgtcgatgccagcagcggagggtctagactaggtggcccagtggcccatgacttgtatctctagggcaggtggttcgtagaagcatgcaggatagagactactgtctagtattaagatgagtgttccttggcgaaaacgttcagcggacgggcgcctgctcctccgcctcgtacatccagttgtcgtcggtcaatgcggcaactttggccctcatactggcccgcaaggcctccagtacttcttcttgcatgttagcgtaggttcgtgatacttatccgtctggggacatgtgacgtgaggcgcaaaccttcgggctgtgcgggtatgcgggtgctcatctgatgctggcgcactagctcagctagcttgcgtctctcgcctggacgcacacacgattgtcagtcagagatactagacgtgtatagttgtcagtgggttgcgtccgtacgttcgttctcctggacatcgtcgagcgcggggtcctcatcggcatcgtcgagggggggcgtgggcgggtcgccgacctcgaactcgccgttctggtcgcggatgacgatctccgaagcgtcggacagagcgtgggggtcgaggcagagggtctcggctggaatggatgatcaggatgcggtgcttggaggagtgggagaggatgcgtgcgctgtacctggagcattggcgtccgccgacgacgtggggcgacgcgtgagctgcgatgtgaagaggttccgtcgcacggcgcctgtggtgctcgtcgcggctcgcgtgatgcggctggtcggctgccgcaggttcggtggtggtgctcggccggccatggtgcgttgtgcgttgtatgaagattgggacggagggcagagggcggacgcgctgtcgtgtagggtgggagaccgattgcagacggcaacgctagtgggagggcttcggtgagaggttcgtttgctgcgcgagcagcgtgttcgtcgaaacgcgagatgtcttaatggagtgaggatcgatgttaagaacggccaacctatgctcccggggaaaagcaaaccttgtaataaggtaggtaacattgactcagtgttcccacactacgaggtgcaatacgttggacggcatccaacctgcccctgccgtctgtgcccatccgctgggttcgggttgcaatgctacggctgtcaagggatgtcgactgtctctccatactgtccgtcattttaccaaatgtcatcataccactttccaataggttatatttggctataattcacaagatattttctttcacccatttaatgtgtgcattgagacgccgggccatcatttcggtatgtttaaggctcaatgaaacatttggaacatccccgcgcgctttaaagtcctctttcttgatcgagatgatctgctgcagacatggcgagtacgaaccatagtgccaaaagacgagatgatcccaattttcgccgagatttctcaatatccagacctcagagaattacaagtatctacttactctcgcatttgacacggatagcaaccgccaatgtcggtgtacatggtacctaatgaagccggattttgacgctatcacaccgtgaaactaccttataggttcagaattgtcgactatacatacagactgttcgatgcaaacacatgtaatacctatcacgttacacccctactttgccaagataggcagagacatatggcgaactatttcagaaagcatttgacgaactagacacctttccttgccgttacatcctaatcatcatgatatacctgtcaaggtcctct

SEQ ID NO: 15018 - DNA, 477 bp, Muscodor strobelii
  misc_feature: SGI cDNA ID NO. 564963
  misc_feature: Elevated expression when VOC is produced
  misc_feature: Encodes the peptide sequence at SEQ ID NO 15019
atggccggccgagcaccaccaccgaacctgcggcagccgaccagccgcatcacgcgagccgcgacgagcaccacaggcgccgtgcgacggaacctcttcacatcgcagctcacgcgtcgccccacgtcgtcggcggacgccaatgctccagccgagaccctctgcctcgacccccacgctctgtccgacgcttcggagatcgtcatccgcgaccagaacggcgagttcgaggtcggcgacccgcccacgccccccctcgacgatgccgatgaggaccccgcgctcgacgatgtccaggagaacgaacgcgagagacgcaagctagctgagctagtgcgccagcatcagatgagcacccgcatacccgcacagcccgaagtactggaggccttgcgggccagtatgagggccaaagttgccgcattgaccgacgacaactggatgtacgaggcggaggagcaggcgcccgtccgctga

SEQ ID NO: 15019 - protein, 158 aa, Muscodor strobelii
  misc_feature: SGI Peptide ID NO. 564963
  misc_feature (18)..(102): NCBI GI: 46125887 Blast Desc: FG07321.1 [Gibberella zeae PH-1]
  misc_feature (18)..(126): NCBI GI: 39945900 Blast Desc: MGG_08070 [Magnaporthe grisea 70-15] gi|145019308|gb|EDK03536.1| MGG_08070 [Magnaporthe grisea 70-15]
  misc_feature (14)..(158): NCBI GI: 154288662 Blast Desc: BC1G_16404 [Botryotinia fuckeliana B05.10] gi|150853926|gb|EDN29118.1| [Botryotinia fuckeliana B05.10]
  misc_feature (25)..(152): NCBI GI: 121703560 Blast Desc: conserved [Aspergillus clavatus NRRL 1] gi|119398188|gb|EAW08618.1| conserved [Aspergillus clavatus NRRL 1]
  misc_feature (25)..(152): NCBI GI: 119467814 Blast Desc: NFIA_051610 [Neosartorya fischeri NRRL 181] gi|119405865|gb|EAW15816.1| conserved [Neosartorya fischeri NRRL 181]
  misc_feature (60)..(158): NCBI GI: 156048196 Blast Desc: [Sclerotinia sclerotiorum 1980] gi|154693226|gb|EDN92964.1| [Sclerotinia sclerotiorum 1980]
  misc_feature (25)..(152): NCBI GI: 169776923 Blast Desc: [Aspergillus oryzae RIB40] gi|83771664|dbj|BAE61794.1| protein product [Aspergillus oryzae]
  misc_feature (60)..(153): NCBI GI: 85103611 Blast Desc: NCU01191 [Neurospora crassa OR74A] gi|18376277|emb|CAD21390.1| [Neurospora crassa] gi|28923104|gb|EAA32321.1| [Neurospora crassa OR74A]
  misc_feature (25)..(152): NCBI GI: 145250103 Blast Desc: An15g00260 [Aspergillus niger] gi|134082078|emb|CAK42195.1| [Aspergillus niger]
  misc_feature (30)..(153): NCBI GI: 212546235 Blast Desc: conserved [Penicillium marneffei ATCC 18224] gi|210064791|gb|EEA18886.1| conserved [Penicillium marneffei ATCC 18224]
  misc_feature: Useful for introducing or modulating the production of volatile compounds
MAGRAPPPNLRQPTSRITRAATSTTGAVRRNLFTSQLTRRPTSSADANAPAETLCLDPHALSDASEIVIRDQNGEFEVGDPPTPPLDDADEDPALDDVQENERERRKLAELVRQHQMSTRIPAQPEVLEALRASMRAKVAALTDDNWMYEAEEQAPVR

SEQ ID NO: 15020 - DNA, 2987 bp, Muscodor strobelii
  misc_feature: SGI EST ID NO. CUFF.35933.2
  misc_feature: Variant of the nucleotide sequence at SEQ ID NO 15018
agaggaccttgacaggtatatcatgatgattaggatgtaacggcaaggaaaggtgtctagttcgtcaaatgctttctgaaatagttcgccatatgtctctgcctatcttggcaaagtaggggtgtaacgtgataggtattacatgtgtttgcatcgaacagtctgtatgtatagtcgacaattctgaacctataaggtagtttcacggtgtgatagcgtcaaaatccggcttcattaggtaccatgtacaccgacattggcggttgctatccgtgtcaaatgcgagagtaagtagatacttgtaattctctgaggtctggatattgagaaatctcggcgaaaattgggatcatctcgtcttttggcactatggttcgtactcgccatgtctgcagcagatcatctcgatcaagaaagaggactttaaagcgcgcggggatgttccaaatgtttcattgagccttaaacataccgaaatgatggcccggcgtctcaatgcacacattaaatgggtgaaagaaaatatcttgtgaattatagccaaatataacctattggaaagtggtatgatgacatttggtaaaatgacggacagtatggagagacagtcgacatcccttgacagccgtagcattgcaacccgaacccagcggatgggcacagacggcaggggcaggttggatgccgtccaacgtattgcacctcgtagtgtgggaacactgagtcaatgttacctaccttattacaaggtttgcttttccccgggagcataggttggccgttcttaacatcgatcctcactccattaagacatctcgcgtttcgacgaacacgctgctcgcgcagcaaacgaacctctcaccgaagccctcccactagcgttgccgtctgcaatcggtctcccaccctacacgacagcgcgtccgccctctgccctccgtcccaatcttcatacaacgcacaacgcaccatggccggccgagcaccaccaccgaacctgcggcagccgaccagccgcatcacgcgagccgcgacgagcaccacaggcgccgtgcgacggaacctcttcacatcgcagctcacgcgtcgccccacgtcgtcggcggacgccaatgctccagccgagaccctctgcctcgacccccacgctctgtccgacgcttcggagatcgtcatccgcgaccagaacggcgagttcgaggtcggcgacccgcccacgccccccctcgacgatgccgatgaggaccccgcgctcgacgatgtccaggagaacgaacgcgagagacgcaagctagctgagctagtgcgccagcatcagatgagcacccgcatacccgcacagcccgaagtactggaggccttgcgggccagtatgagggccaaagttgccgcattgaccgacgacaactggatgtacgaggcggaggagcaggcgcccgtccgctgaacgttttcgccaaggaacactcatcttaatactagacagtagtctctatcctgcatgcttctacgaaccacctgccctagagatacaagtcatgggccactgggccacctagtctagaccctccgctgctggcatcgacgtcggccccttgaccgcaggcctcttggagctcccgcccgcgggggcaccaccacctccgaagaacccgctcatcatgtccatcagggggttgctctgccggggcttttggatgccgaagtacatctcggcgatcatgtcgagcgcctcgttccacatctcgagctctttcagatggctcgcgtacttggccgccagctgtctgtacacgtctgcgctgcctctctggatggccagcagtaggagtccgaggaagttgaggagcggtatgctagggtagacgcggatgtcggcgctgttgctgctcacgtcctgcacgcccagctgggccgacttgtcctcgttaagagcgctggtgaagacgcggtaggaggtgttggcggcgcgcacattggccgttatcaggtaaggcagcacagcccggccggcgtaggtggcagcggtgtgggcctcgtcctcctggaaccactcgtactccatgcgggctaggacctcggccgagtccttggtgcccaggacgaggtggcgttcggcgtcgtaggtctcgtgctcttctgcgtagagggagccggcgacgtggtgcagctcaggatcgcctgctgggtattcgccgaatttggaggaccatctgcagggccctgttattagcttccgtacgtgtagtcttgtagttcgcgaggcaattgagcaggcaaaactatgcaacagatgaggcacctacgctattatctcgccgatgtacttcttccgtgtgggctcgtcgctgtcgaacaggcgcaggcaggtgagcagcttgcccttggtggccgagtcaggcttgagctcggcctgcttgtaggtgtcgacgagcaggacgcagaggtcgccgccgctgccgccctggccggcccggagcagcgactgggcgacgttgtagaggatgtcgacggcggcagaccagttggaggcctttgtgtatcgagcggcgacgacgcgggtctgctgctgggcctcgtagaatgcgccttcgctgatgcgtgactgcaggcgggctatgatcttgtcgatcttgtcgttgcctttgctggccattgctacctagtgtacgggctctcttgccggctctgtcgggtgggctagatatactgaatgctactgttgtctcttgaggtgtattttacagtcctgagaaaagcagcgtctattggctgcaacgtcctggagtgcagctggtgtttgtgaggttggactttgtgatcgttaggagagctggttggtggggttcggtgcgagtttgcgggctgcttcccatcccgccgcctgcgccgcatcaccaagttgtgggtcggttgtagacactgaccagcgaccccctccagctaaagcccctggactctctttcatggagctcgctgaaagccgc

SEQ ID NO: 15021 - DNA, 480 bp, Muscodor strobelii
  misc_feature: SGI cDNA ID NO. 564964
  misc_feature: Reduced expression when VOC is produced
  misc_feature: Encodes the peptide sequence at SEQ ID NO 15022
atggccggccgagcaccaccaccgaacctgcggcagccgaccagccgcatcacgcgagccgcgacgagcaccacaggcgccgtgcgacggaacctcttcacatcgcagctcacgcgtcgccccacgtcgtcggcggacgccaatgctccagccgagaccctctgcctcgacccccacgctctgtccgacgcttcggagatcgtcatccgcgaccagaacggcgagttcgaggtcggcgacccgcccacgccccccctcgacgatgccgatgaggaccccgcgctcgacgatgtccaggagaacgaacgcgagagacgcaagctagctgagctagtgcgccagcatcagatgagcacccgcatacccgcacagcccgaagaagtactggaggccttgcgggccagtatgagggccaaagttgccgcattgaccgacgacaactggatgtacgaggcggaggagcaggcgcccgtccgctga

SEQ ID NO: 15022 - protein, 159 aa, Muscodor strobelii
  misc_feature: SGI Peptide ID NO. 564964
  misc_feature (18)..(102): NCBI GI: 46125887 Blast Desc: FG07321.1 [Gibberella zeae PH-1]
  misc_feature (18)..(126): NCBI GI: 39945900 Blast Desc: MGG_08070 [Magnaporthe grisea 70-15] gi|145019308|gb|EDK03536.1| MGG_08070 [Magnaporthe grisea 70-15]
  misc_feature (14)..(159): NCBI GI: 154288662 Blast Desc: BC1G_16404 [Botryotinia fuckeliana B05.10] gi|150853926|gb|EDN29118.1| [Botryotinia fuckeliana B05.10]
  misc_feature (25)..(153): NCBI GI: 121703560 Blast Desc: conserved [Aspergillus clavatus NRRL 1] gi|119398188|gb|EAW08618.1| conserved [Aspergillus clavatus NRRL 1]
  misc_feature (25)..(153): NCBI GI: 119467814 Blast Desc: NFIA_051610 [Neosartorya fischeri NRRL 181] gi|119405865|gb|EAW15816.1| conserved [Neosartorya fischeri NRRL 181]
  misc_feature (60)..(159): NCBI GI: 156048196 Blast Desc: [Sclerotinia sclerotiorum 1980] gi|154693226|gb|EDN92964.1| [Sclerotinia sclerotiorum 1980]
  misc_feature (25)..(153): NCBI GI: 169776923 Blast Desc: [Aspergillus oryzae RIB40] gi|83771664|dbj|BAE61794.1| protein product [Aspergillus oryzae]
  misc_feature (25)..(153): NCBI GI: 145250103 Blast Desc: An15g00260 [Aspergillus niger] gi|134082078|emb|CAK42195.1| [Aspergillus niger]
  misc_feature (60)..(154): NCBI GI: 85103611 Blast Desc: NCU01191 [Neurospora crassa OR74A] gi|18376277|emb|CAD21390.1| [Neurospora crassa] gi|28923104|gb|EAA32321.1| [Neurospora crassa OR74A]
  misc_feature (27)..(156): NCBI GI: 255931515 Blast Desc: Pc12g04450 [Penicillium chrysogenum Wisconsin 54-1255] gi|211581933|emb|CAP80072.1| Pc12g04450 [Penicillium chrysogenum Wisconsin 54-1255]
  misc_feature: Useful for introducing or modulating the production of volatile compounds
MAGRAPPPNLRQPTSRITRAATSTTGAVRRNLFTSQLTRRPTSSADANAPAETLCLDPHALSDASEIVIRDQNGEFEVGDPPTPPLDDADEDPALDDVQENERERRKLAELVRQHQMSTRIPAQPEEVLEALRASMRAKVAALTDDNWMYEAEEQAPVR

SEQ ID NO: 15023 - DNA, 2987 bp, Muscodor strobelii; identical to SEQ ID NO: 15020
  misc_feature: SGI EST ID NO. CUFF.35933.2
  misc_feature: Variant of the nucleotide sequence at SEQ ID NO 15021

SEQ ID NO: 15024 - DNA, 1134 bp, Muscodor strobelii
  misc_feature: SGI cDNA ID NO. 564965
  misc_feature: Encodes the peptide sequence at SEQ ID NO 15025
atgtctgaaccggtctttaatatccagcccattggccgctttacgggtgaaagcgaacctgtgaagcgacctaaggaaatcgcttgttactcgtatgacgacgagcatcaatttcatctggacgattcgtctttgcaatggtattatcctcccaggataggtgcggacctatccaaaggcttcgatagttttgacaagcatgatgactccggggacgagcatctcgatagtctactgaaaaccatcaccgcacatgagcgcgaagaaggcaagaagatagatgctgatgtggtcacatggcgtggaatgatgacgaagatcatgtctgctccttttgaggatcgagacggctttgaaatgaacgccacgttataccaagactgcatcttcgtagaggagaaccatgaatacaagcaagccagcaaacaagagcagaataggcaacagcgaggtcgacgaggacaattttctcccgagatgatgcaatattggggttacaagttcgaggcgatttcttgtattccaaaaccatggggggaagtggatcgtgaattcatcgaaaatcgcgacgagcacaccgtcagcaataaagcacaatactgttccgtggttcggacagggctaggcaagacgactctctgtcttggtggggaagtcgatgccatatgggattctaaacctatgcaaaaaggcgctccaatcaaatggatagagctcaagaccagcgcagagatccgcgacgaccgaggtatgcacaacttcgagcggaagctgatgaaattctggatccagtcatttctcctcggtgtcccgaaaatcatcgttgggttccgctcccaaggtggtattctcacgaaaatcgaagaaattcagacagcttctatccccgagacagcagcaaagcgcggagtcaagagttgggatgcgaatatgtgcatcaatttcgcttctgctttcttgtcttggttgaaggaaacgataaatgacgaaggtgtatggaggattcggcggaaagctggatcttcgatgattgaagtttttcaagtcgaggaggtaggacatggtagtgtactcaccgaggagttcatcaactggcgtatcaaacttagtcttggtagtagcgatactacttga

SEQ ID NO: 15025 - protein, 377 aa, Muscodor strobelii
  misc_feature: SGI Peptide ID NO. 564965
  misc_feature (219)..(287): Pfam Id: PF08652 Pfam Desc: RAI1 like
  misc_feature (6)..(372): NCBI GI: 261351612 Blast Desc: RAI1 [Verticillium albo-atrum VaMs.102]
  misc_feature (6)..(377): NCBI GI: 256731379 Blast Desc: [Nectria haematococca mpVI 77-13-4]
  misc_feature (6)..(375): NCBI GI: 46125935 Blast Desc: FG07345.1 [Gibberella zeae PH-1]
  misc_feature (6)..(375): NCBI GI: 115311708 Blast Desc: FG07345.1 [Gibberella zeae PH-1]
  misc_feature (1)..(368): NCBI GI: 145250099 Blast Desc: An15g00240 [Aspergillus niger] gi|134082076|emb|CAK42193.1| protein product [Aspergillus niger]
  misc_feature (5)..(371): NCBI GI: 74624509 Blast Desc: DOM3Z_NEUCR RecName: Full=Protein rai-1 gi|11595728|emb|CAC18206.1| conserved [Neurospora crassa]
  misc_feature (1)..(366): NCBI GI: 67540688 Blast Desc: AN6514.2 [Aspergillus nidulans FGSC A4] gi|74594337|sp|Q5AYW6.3|DOM3Z_EMENI RecName: Full=Protein rai1 gi|40738664|gb|EAA57854.1| AN6514.2 [Aspergillus nidulans FGSC
  misc_feature (1)..(366): NCBI GI: 70984102 Blast Desc: Dhp1-interacting protein Din1 [Aspergillus fumigatus Af293] gi|74667615|sp|Q4WDK5.3|DOM3Z_ASPFU RecName: Full=Protein rai1 gi|66845198|gb|EAL85533.1| Dhp1-interacting protein Din1,
  misc_feature (1)..(366): NCBI GI: 240110870 Blast Desc: CPC735_037320 [Coccidioides posadasii C735 delta SOWgp]
  misc_feature (1)..(368): NCBI GI: 242823981 Blast Desc: Dhp1-interacting protein Din1, [Talaromyces stipitatus ATCC 10500] gi|218713090|gb|EED12515.1| Dhp1-interacting protein Din1, [Talaromyces stipitatus ATCC 10500]
MSEPVFNIQPIGRFTGESEPVKRPKEIACYSYDDEHQFHLDDSSLQWYYPPRIGADLSKGFDSFDKHDDSGDEHLDSLLKTITAHEREEGKKIDADVVTWRGMMTKIMSAPFEDRDGFEMNATLYQDCIFVEENHEYKQASKQEQNRQQRGRRGQFSPEMMQYWGYKFEAISCIPKPWGEVDREFIENRDEHTVSNKAQYCSVVRTGLGKTTLCLGGEVDAIWDSKPMQKGAPIKWIELKTSAEIRDDRGMHNFERKLMKFWIQSFLLGVPKIIVGFRSQGGILTKIEEIQTASIPETAAKRGVKSWDANMCINFASAFLSWLKETINDEGVWRIRRKAGSSMIEVFQVEEVGHGSVLTEEFINWRIKLSLGSSDTT

SEQ ID NO: 15026 - DNA, 1792 bp, Muscodor strobelii
  misc_feature: SGI EST ID NO. CUFF.35833.2
  misc_feature: Variant of the nucleotide sequence at SEQ ID NO 15024
acgcaatctgcagagcattttgcctgcggtttgcaatgtattgcccaatcaagagaatatggtgattatgctgaagttgtcagtggctcagcctaccctaatcgccacctgtagcgtcgcgctttgtcactaccagaaaaccactgaaatggccaccgacccgcaaagacaaagagaaagggagatagacagctcgaaagcgcgattcatcatatgcgcccgaatttcggtttgcgcatctgcttccagcaacatcagctctcaacacacctctctgggcattgtaaacaatggaagctactgaacgcgcggatgtctgaaccggtctttaatatccagcccattggccgctttacgggtgaaagcgaacctgtgaagcgacctaaggaaatcgcttgttactcgtatgacgacgagcatcaatttcatctggacgattcgtctttgcaatggtattatcctcccaggataggtgcggacctatccaaaggcttcgatagttttgacaagcatgatgactccggggacgagcatctcgatagtctactgaaaaccatcaccgcacatgagcgcgaagaaggcaagaagatagatgctgatgtggtcacatggcgtggaatgatgacgaagatcatgtctgctccttttgaggatcgagacgggtgagcaaatctcgcttaagactagcgactgcggcctaattatcgtgttcatatcagctttgaaatgaacgccacgttataccaagactgcatcttcgtagaggagaaccatgaatacaagcaagccagcaaacaagagcagaataggcaacagcgaggtcgacgaggacaattttctcccgagatgatgcaatattggggttacaagttcgaggcgatttcttgtattccaaaaccatggggggaagtggatcgtgaattcatcgaaaatcgcgacgagcacaccgtcagcaataaagcacaatactgttccgtggttcggacagggctaggcaagacgactctctgtcttggtggggaagtcgatgccatatgggattctaaacctatgcaaaaaggcgctccaatcaaatggatagagctcaagaccagcgcagagatccgcgacgaccgaggtatgcacaacttcgagcggaagctgatgaaattctggatccagtcatttctcctcggtgtcccgaaaatcatcgttgggttccgctcccaaggtggtattctcacgaaaatcgaagaaattcagacagcttctatccccgagacagcagcaaagcgcggagtcaagagttgggatgcgaatatgtgcatcaatttcgcttctgctttcttgtcttggttgaaggaaacgataaatgacgaaggtgtatggaggattcggcggaaagctggatcttcgatgattgaagtttttcaagtcgaggaggtaggacatggtagtgtactcaccgaggagttcatcaactggcgtatcaaacttagtcttggtagtagcgatactacttgagcgatacgattttgccccagcttttatgaagaagggagatggactatttatctataaaccgtggcaatacgctaatgctatcctgtaatctatgtgtctattacgtctctttatacgccgttgggaatttcgtcgaatctatgatcgctacgcagtgagatcgacctgcatcttccggttgacaggcatgaattcgcccgcggtatcggctgtgctgtagacggcctttcctctagctttcgggtctatgctgtcatgatcaatttcaaaggccagatggttaaggaag

SEQ ID NO: 15027 - DNA, 1164 bp, Muscodor strobelii
  misc_feature: SGI cDNA ID NO. 564966
  misc_feature: Encodes the peptide sequence at SEQ ID NO 15028
atgtctgaaccggtctttaatatccagcccattggccgctttacgggtgaaagcgaacctgtgaagcgacctaaggaaatcgcttgttactcgtatgacgacgagcatcaatttcatctggacgattcgtctttgcaatggtattatcctcccaggataggtgcggacctatccaaaggcttcgatagttttgacaagcatgatgactccggggacgagcatctcgatagtctactgaaaaccatcaccgcacatgagcgcgaagaaggcaagaagatagatgctgatgtggtcacatggcgtggaatgatgacgaagatcatgtctgctccttttgaggatcgagacggctttgaaatgaacgccacgttataccaagtgtgcataccaaagtgtcgacttctgagtgtacccgtcttcgtagaggagaaccatgaatacaagcaagccagcaaacaagagcagaataggcaacagcgaggtcgacgaggacaattttctcccgagatgatgcaatattggggttacaagttcgaggcgatttcttgtattccaaaaccatggggggaagtggatcgtgaattcatcgaaaatcgcgacgagcacaccgtcagcaataaagcacaatactgttccgtggttcggacagggctaggcaagacgactctctgtcttggtggggaagtcgatgccatatgggattctaaacctatgcaaaaaggcgctccaatcaaatggatagagctcaagaccagcgcagagatccgcgacgaccgaggtatgcacaacttcgagcggaagctgatgaaattctggatccagtcatttctcctcggtgtcccgaaaatcatcgttgggttccgctcccaaggtggtattctcacgaaaatcgaagaaattcagacagcttctatccccgagacagcagcaaagcgcggagtcaagagttgggatgcgaatatgtgcatcaatttcgcttctgctttcttgtcttggttgaaggaaacgataaatgacgaaggtgtatggaggattcggcggaaagctggatcttcgatgattgaagtttttcaagtcgaggaggtaggacatggtagtgtactcaccgaggagttcatcaactggcgtatcaaacttagtcttggtagtagcgatactacttga

SEQ ID NO: 15028 - protein, 387 aa, Muscodor strobelii
  misc_feature: SGI Peptide ID NO. 564966
  misc_feature (229)..(297): Pfam Id: PF08652 Pfam Desc: RAI1 like
  misc_feature (6)..(382): NCBI GI: 261351612 Blast Desc: RAI1 [Verticillium albo-atrum VaMs.102]
  misc_feature (6)..(387): NCBI GI: 256731379 Blast Desc: [Nectria haematococca mpVI 77-13-4]
  misc_feature (6)..(385): NCBI GI: 46125935 Blast Desc: FG07345.1 [Gibberella zeae PH-1]
  misc_feature (6)..(385): NCBI GI: 115311708 Blast Desc: FG07345.1 [Gibberella zeae PH-1]
  misc_feature (5)..(381): NCBI GI: 74624509 Blast Desc: DOM3Z_NEUCR RecName: Full=Protein rai-1 gi|11595728|emb|CAC18206.1| conserved [Neurospora crassa]
  misc_feature (1)..(378): NCBI GI: 145250099 Blast Desc: An15g00240 [Aspergillus niger] gi|134082076|emb|CAK42193.1| protein product [Aspergillus niger]
  misc_feature (1)..(376): NCBI GI: 67540688 Blast Desc: AN6514.2 [Aspergillus nidulans FGSC A4] gi|74594337|sp|Q5AYW6.3|DOM3Z_EMENI RecName: Full=Protein rai1 gi|40738664|gb|EAA57854.1| AN6514.2 [Aspergillus nidulans FGSC
  misc_feature (1)..(376): NCBI GI: 240110870 Blast Desc: CPC735_037320 [Coccidioides posadasii C735 delta SOWgp]
  misc_feature (1)..(376): NCBI GI: 70984102 Blast Desc: Dhp1-interacting protein Din1 [Aspergillus fumigatus Af293] gi|74667615|sp|Q4WDK5.3|DOM3Z_ASPFU RecName: Full=Protein rai1 gi|66845198|gb|EAL85533.1| Dhp1-interacting protein Din1,
  misc_feature (1)..(378): NCBI GI: 242823981 Blast Desc: Dhp1-interacting protein Din1, [Talaromyces stipitatus ATCC 10500] gi|218713090|gb|EED12515.1| Dhp1-interacting protein Din1, [Talaromyces stipitatus ATCC 10500]
MSEPVFNIQPIGRFTGESEPVKRPKEIACYSYDDEHQFHLDDSSLQWYYPPRIGADLSKGFDSFDKHDDSGDEHLDSLLKTITAHEREEGKKIDADVVTWRGMMTKIMSAPFEDRDGFEMNATLYQVCIPKCRLLSVPVFVEENHEYKQASKQEQNRQQRGRRGQFSPEMMQYWGYKFEAISCIPKPWGEVDREFIENRDEHTVSNKAQYCSVVRTGLGKTTLCLGGEVDAIWDSKPMQKGAPIKWIELKTSAEIRDDRGMHNFERKLMKFWIQSFLLGVPKIIVGFRSQGGILTKIEEIQTASIPETAAKRGVKSWDANMCINFASAFLSWLKETINDEGVWRIRRKAGSSMIEVFQVEEVGHGSVLTEEFINWRIKLSLGSSDTT

SEQ ID NO: 15029 - DNA, 1792 bp, Muscodor strobelii; identical to SEQ ID NO: 15026
  misc_feature: SGI EST ID NO. CUFF.35833.2
  misc_feature: Variant of the nucleotide sequence at SEQ ID NO 15027

SEQ ID NO: 15030 - DNA, 1164 bp, Muscodor strobelii
  misc_feature: SGI cDNA ID NO. 564967
  misc_feature: Encodes the peptide sequence at SEQ ID NO 15031
atgtctgaaccggtctttaatatccagcccattggccgctttacgggtgaaagcgaacctgtgaagcgacctaaggaaatcgcttgttactcgtatgacgacgagcatcaatttcatctggacgattcgtctttgcaatggtattatcctcccaggataggtgcggacctatccaaaggcttcgatagttttgacaagcatgatgactccggggacgagcatctcgatagtctactgaaaaccatcaccgcacatgagcgcgaagaaggcaagaagatagatgctgatgtggtcacatggcgtggaatgatgacgaaggttgattctatcccgttttgtctacagacctgctttgaaatgaacgccacgttataccaagtgtgcataccaaagtgtcgacttctgagtgtacccgtcttcgtagaggagaaccatgaatacaagcaagccagcaaacaagagcagaataggcaacagcgaggtcgacgaggacaattttctcccgagatgatgcaatattggggttacaagttcgaggcgatttcttgtattccaaaaccatggggggaagtggatcgtgaattcatcgaaaatcgcgacgagcacaccgtcagcaataaagcacaatactgttccgtggttcggacagggctaggcaagacgactctctgtcttggtggggaagtcgatgccatatgggattctaaacctatgcaaaaaggcgctccaatcaaatggatagagctcaagaccagcgcagagatccgcgacgaccgaggtatgcacaacttcgagcggaagctgatgaaattctggatccagtcatttctcctcggtgtcccgaaaatcatcgttgggttccgctcccaaggtggtattctcacgaaaatcgaagaaattcagacagcttctatccccgagacagcagcaaagcgcggagtcaagagttgggatgcgaatatgtgcatcaatttcgcttctgctttcttgtcttggttgaaggaaacgataaatgacgaaggtgtatggaggattcggcggaaagctggatcttcgatgattgaagtttttcaagtcgaggaggtaggacatggtagtgtactcaccgaggagttcatcaactggcgtatcaaacttagtcttggtagtagcgatactacttga

SEQ ID NO: 15031 - protein, 387 aa, Muscodor strobelii
  misc_feature: SGI Peptide ID NO. 564967
  misc_feature (229)..(297): Pfam Id: PF08652 Pfam Desc: RAI1 like
  misc_feature (6)..(382): NCBI GI: 261351612 Blast Desc: RAI1 [Verticillium albo-atrum VaMs.102]
  misc_feature (6)..(387): NCBI GI: 256731379 Blast Desc: [Nectria haematococca mpVI 77-13-4]
  misc_feature (6)..(385): NCBI GI: 46125935 Blast Desc: FG07345.1 [Gibberella zeae PH-1]
  misc_feature (6)..(385): NCBI GI: 115311708 Blast Desc: FG07345.1 [Gibberella zeae PH-1]
  misc_feature (5)..(381): NCBI GI: 74624509 Blast Desc: DOM3Z_NEUCR RecName: Full=Protein rai-1 gi|11595728|emb|CAC18206.1| conserved [Neurospora crassa]
  misc_feature (1)..(378): NCBI GI: 145250099 Blast Desc: An15g00240 [Aspergillus niger] gi|134082076|emb|CAK42193.1| protein product [Aspergillus niger]
  misc_feature (1)..(376): NCBI GI: 67540688 Blast Desc: AN6514.2 [Aspergillus nidulans FGSC A4] gi|74594337|sp|Q5AYW6.3|DOM3Z_EMENI RecName: Full=Protein rai1 gi|40738664|gb|EAA57854.1| AN6514.2 [Aspergillus nidulans FGSC
  misc_feature (1)..(376): NCBI GI: 240110870 Blast Desc: CPC735_037320 [Coccidioides posadasii C735 delta SOWgp]
  misc_feature (6)..(381): NCBI GI: 116198031 Blast Desc: CHGG_07171 [Chaetomium globosum CBS 148.51] gi|115311707|sp|Q2GXY3.3|DOM3Z_CHAGB RecName: Full=Protein RAI1 gi|88178450|gb|EAQ85918.1| CHGG_07171 [Chaetomium globosum CBS
  misc_feature (1)..(376): NCBI GI: 70984102 Blast Desc: Dhp1-interacting protein Din1 [Aspergillus fumigatus Af293] gi|74667615|sp|Q4WDK5.3|DOM3Z_ASPFU RecName: Full=Protein rai1 gi|66845198|gb|EAL85533.1| Dhp1-interacting protein Din1,
MSEPVFNIQPIGRFTGESEPVKRPKEIACYSYDDEHQFHLDDSSLQWYYPPRIGADLSKGFDSFDKHDDSGDEHLDSLLKTITAHEREEGKKIDADVVTWRGMMTKVDSIPFCLQTCFEMNATLYQVCIPKCRLLSVPVFVEENHEYKQASKQEQNRQQRGRRGQFSPEMMQYWGYKFEAISCIPKPWGEVDREFIENRDEHTVSNKAQYCSVVRTGLGKTTLCLGGEVDAIWDSKPMQKGAPIKWIELKTSAEIRDDRGMHNFERKLMKFWIQSFLLGVPKIIVGFRSQGGILTKIEEIQTASIPETAAKRGVKSWDANMCINFASAFLSWLKETINDEGVWRIRRKAGSSMIEVFQVEEVGHGSVLTEEFINWRIKLSLGSSDTT

SEQ ID NO: 15032 - DNA, 1792 bp, Muscodor strobelii; identical to SEQ ID NO: 15026
  misc_feature: SGI EST ID NO. CUFF.35833.2
  misc_feature: Variant of the nucleotide sequence at SEQ ID NO 15030

SEQ ID NO: 15033 - DNA, 1278 bp, Muscodor strobelii
  misc_feature: SGI cDNA ID NO. 564968
  misc_feature: Reduced expression when VOC is produced
  misc_feature: Encodes the peptide sequence at SEQ ID NO 15034
atggagtggctcggacgggccaagatcgacttcataacggcaacccaatcattgccattgaaaggagcagatggcaaagaaacagacctcctgacgatctgcaaagacgcagtcccgccatgtcagctgaacccgttgctgttcaacggccacctgcaaacgatctggacgacggtgaacaaaaatgcgccacccatccactacaagcgcaagatcttcgaggccgaccgacccaagttcaacgggagcttcaccgtggactttttaacggcggaatcaactgagtctgacgagtcactcccgcctcgaacggcttatctcagtaaagaggagctggctgccatgggatcagacgacactcgtcctatgctcattgtgcttcatggcctctcgggaggctctcacgaagtgtatctccggcatggaattgcgccgctcgccgactctgggaagtgggaggtctgcgtcattaattcgcgcggttgtgccaagagcaagatcacgactggcctgctatacaatgctagggcgacctgggacacgaggcaggtcgttaaatggttgcggaagacgtacccaaatagaccacttttcggtctcggtttctctttgggcgcttgcattcttaccaactatatcggcgaagagggctctgagtgccaactcaaaggcgccgtcgtctgctcgaatccttggaatcttgaggtcggcagcaaagtgctcaagagcacatggatcggtcacgaaatttaccaaaaggcgcttggcagctcacttagacagctcgcaaataatcacaaagaagaaattgagaagtacaccaacgtcgatatgtcggagctatttagagtgaaatatctctatgaatttgatagggcttatcaatgtccgacatggggctacccgacagaggatgcatactaccgtgacgcatccagtgtcgatgcacttatggctgtgcgcattccacttctcgcggtgaacgcccttgacgaccctattgctgtgagcatgggtctgccttttcctgaagctgctaagaacccgtactccgtgctttgtacgacttcattaggtgggcatcttggctggtacgagatggatggcagcagatggcatgccaaacccatttgcaacttccttaaccatctggcctttgaaattgatcatgacagcatagacccgaaagctagaggaaaggccgtctacagcacagccgataccgcgggcgaattcatgcctgtcaaccggaagatgcaggtcgatctcactgcgtag

SEQ ID NO: 15034 - protein, 425 aa, Muscodor strobelii
  misc_feature: SGI Peptide ID NO. 564968
  misc_feature (152)..(383): Pfam Id: PF00561 Pfam Desc: alpha/beta hydrolase fold
  misc_feature (152)..(348): Pfam Id: PF00561 Pfam Desc: alpha/beta hydrolase fold
  misc_feature (1)..(421): NCBI GI: 171692181 Blast Desc: protein product [Podospora anserina] gi|170946039|emb|CAP72840.1| protein product [Podospora anserina]
  misc_feature (1)..(421): NCBI GI: 164426323 Blast Desc: NCU01302 [Neurospora crassa OR74A] gi|157071289|gb|EAA32152.2| conserved [Neurospora crassa OR74A]
  misc_feature (1)..(421): NCBI GI: 46124829 Blast Desc: FG06792.1 [Gibberella zeae PH-1]
  misc_feature (1)..(421): NCBI GI: 116206658 Blast Desc: CHGG_02622 [Chaetomium globosum CBS 148.51] gi|88183219|gb|EAQ90687.1| CHGG_02622 [Chaetomium globosum CBS 148.51]
  misc_feature (26)..(419): NCBI GI: 238494092 Blast Desc: alpha/beta hydrolase domain containing protein 1,3, [Aspergillus flavus NRRL3357] gi|220694932|gb|EED51275.1| alpha/beta hydrolase domain containing protein 1,3, [Aspergillus
  misc_feature (7)..(389): NCBI GI: 255945789 Blast Desc: Pc20g11760 [Penicillium chrysogenum Wisconsin 54-1255] gi|211588397|emb|CAP86505.1| Pc20g11760 [Penicillium chrysogenum Wisconsin 54-1255]
  misc_feature (26)..(389): NCBI GI: 119467726 Blast Desc: alpha/beta fold family hydrolase, [Neosartorya fischeri NRRL 181] gi|119405821|gb|EAW15772.1| alpha/beta fold family hydrolase, [Neosartorya fischeri NRRL 181]
  misc_feature (21)..(423): NCBI GI: 145250185 Blast Desc: An15g00670 [Aspergillus niger] gi|134082120|emb|CAK42236.1| protein product [Aspergillus niger]
  misc_feature (1)..(421): NCBI GI: 256731008 Blast Desc: [Nectria haematococca mpVI 77-13-4]
  misc_feature (26)..(389): NCBI GI: 70984192 Blast Desc: hydrolase, alpha/beta fold family [Aspergillus fumigatus Af293] gi|66845241|gb|EAL85576.1| hydrolase, alpha/beta fold family, [Aspergillus fumigatus Af293]
  misc_feature (42)..(381): SWISSPROT Homolog: EC 2.3.1.84 Alcohol O-acetyltransferase
  misc_feature: Useful for introducing or modulating the production of volatile compounds
MEWLGRAKIDFITATQSLPLKGADGKETDLLTICKDAVPPCQLNPLLFNGHLQTIWTTVNKNAPPIHYKRKIFEADRPKFNGSFTVDFLTAESTESDESLPPRTAYLSKEELAAMGSDDTRPMLIVLHGLSGGSHEVYLRHGIAPLADSGKWEVCVINSRGCAKSKITTGLLYNARATWDTRQVVKWLRKTYPNRPLFGLGFSLGACILTNYIGEEGSECQLKGAVVCSNPWNLEVGSKVLKSTWIGHEIYQKALGSSLRQLANNHKEEIEKYTNVDMSELFRVKYLYEFDRAYQCPTWGYPTEDAYYRDASSVDALMAVRIPLLAVNALDDPIAVSMGLPFPEAAKNPYSVLCTTSLGGHLGWYEMDGSRWHAKPICNFLNHLAFEIDHDSIDPKARGKAVYSTADTAGEFMPVNRKMQVDLTA

SEQ ID NO: 15035 - DNA, 4230 bp, Muscodor strobelii
  misc_feature: SGI EST ID NO. CUFF.35834.0
  misc_feature: Variant of the nucleotide sequence at SEQ ID NO 15033
aataagtatacttcgaaagtcgaactcgaactacagtagatgagagttaccgtcattaacgctaattatcttggtcgttgatgtaaacagccacaaacacctcgtgcctctatacttcccccctattcctgagactgagagtccagtctttcagccgtttaaagacaagatgcaagatccctgcgactcagatgttgaacttatgaaaccactaaaaaaaccgtggacgggagttatagtggtcgaagccatacataacacgcaacccgccgagccggctactgtagctgcagggcttgggcttcataaaccatccttgatcgatgtggcatcttgttcaattcaatggtggcctcgaggttcagctgctttattctatggaattaggttatcacgttccgcatactcggtaacggccgaggcaagtcacgagagtggggccgtccttatttctgtagcggcgcatacaagcccggactcgccgccgcaaatctctgacaatgaatattgcgtcctcgttctagctcagatcgcattgttctattgttgggacggcaagatctcatagaccattagattagaattaagtatatcatcttcgaacttctgccctttgtgctcgagggctgccgcttgaaaacgtcgttgattcacttaagacagcccggtcagcaggtctcgcggaagaagtctcaactccatcaccagagatggagtggctcggacgggccaagatcgacttcataacggcaacccaatcattgccattgaaaggagcagatggcaaagaaacagacctcctgacgatctgcaaagacgcagtcccgccatgtcagctgaacccgttgctgttcaacggccacctgcaaacgatctggacgacggtgaacaaaaatgcgccacccatccactacaagcgcaagatcttcgaggccgaccgacccaagttcaacgggagcttcaccgtggactttttaacggcggaatcaactgagtctgacgagtcactcccgcctcgaacggcttatctcagtaaagaggagctggctgccatgggatcagacgacactcgtcctatgctcattgtgcttcatggcctctcgggaggctctcacgaagtgtatctccggcatggaattgcgccgctcgccgactctgggaagtgggaggtctgcgtcattaattcgcgcggttgtgccaagagcaagatcacgactggcctgctatacaatgctagggcgacctgggacacgaggcaggtcgttaaatggttgcggaagacgtacccaaatagaccacttttcggtctcggtttctctttgggcgcttgcattcttaccaactatatcggcgaagagggctctgagtgccaactcaaaggcgccgtcgtctgctcgaatccttggaatcttgaggtcggcagcaaagtgctcaagagcacatggatcggtcacgaaatttaccaaaaggcgcttggcagctcacttagacagctcgcaaataatcacaaagaagaaattgagaagtacaccaacgtcgatatgtcggagctatttagagtgaaatatctctatgaatttgatagggcttatcaatgtccgacatggggctacccgacagaggatgcatactaccgtgacgcatccagtgtcgatgcacttatggctgtgcgcattccacttctcgcggtgaacgcccttgacgaccctattgctgtgagcatgggtctgccttttcctgaagctgctaagaacccgtactccgtgctttgtacgacttcattaggtgggcatcttggctggtacgagatggatggcagcagatggcatgccaaacccatttgcaacttccttaaccatctggcctttgaaattgatcatgacagcatagacccgaaagctagaggaaaggccgtctacagcacagccgataccgcgggcgaattcatgcctgtcaaccggaagatgcaggtcgatctcactgcgtagcgatcatagattcgacgaaattcccaacggcgtataaagagacgtaatagacacatagattacaggatagcattagcgtattgccacggtttatagataaatagtccatctcccttcttcataaaagctggggcaaaatcgtatcgctcaagtagtatcgctactaccaagactaagtttgatacgccagttgatgaactcctcggtgagtacactaccatgtcctacctcctcgacttgaaaaacttcaatcatcgaagatccagctttccgccgaatcctccatacaccttcgtcatttatcgtttccttcaaccctgcgatatgtcagtcgactctttcaggtgtactcgagttatgatgttcgaatcaacgtacaagacaagaaagcagaagcgaaattgatgcacatattcgcatcccaactcttgactccgcgctttgctgctgtctcggggatagaagctgtctgaatttcttcgattttcgtgagaataccaccttgggagcggaacccaacgatgattttcgggacaccgaggagaaatgactggatccagaatttcatcagcttccgctcgaagttgtgcatacctcggtcgtcgcggatctctgcgctggtcttgagctctatccatttgattggagcgcctttttgcataggtttagaatcccatactagaggggcctgtgttagcaagcatgtatgaaggacgatgataataaagagcgtactggcatcgacttccccaccaagacagagagtcgtcttgcctagccctgtccgaaccacggaacagtattgtgctttattgctgacggtgtgctcgtcgcgattttcgatgaattcacgatccacttccccccatggttttggaatacaagaaatcgcctcgaacttgtaacctagtaatgtacttagcccatatgaatttcttgcttgctttcatgcgttgctcataccccaatattgcatcatctcgggagaaaattgtcctcgtcgacctcgctgttgcctattctgctcttgtttgctggcttgcttgtattcatggttctcctctacgaagctttactgctggttagatcatcgtcgtcgtcggcttaaaaagtgaggtaccgagtcatacatgcagtccttgaaaacatcagcacacgggtacactcagaagtcgacactttggtatgcacacttggtataacgtggcgttcatttcaaagctgatatgaacacgataattaggccgcagtcgctagtcttaagcgagatttgctcacccgtctcgatcctcaaaaggagcagacatgatctatcattacgaattagaccaggtctgtagacaaaacgggatagaatcaaccttcgtcatcattccacgccatgtgaccacatcagcatctatcttcttgccttcttcgcgctcatgtgcggtgatggttttcagtagactatcgagatgctcgtccccggagtcatcatgcttgtcaaaactatcgaagcctttggataggtccgcacctatcctgggaggataataccattgcaaagacgaatcgtccagatgaaattgatgctcgtcgtcatacgagtaacaagcgatttcctatagccccattagttgcaactatgaagaactgtgcagacaagggagataggttagggtgtctaggctggatagagacataccttaggtcgcttcacaggttcgctttcacccgtaaagcggccaatgggctggatattaaagaccggttcagacatccgcgcgttcagtagcttccattgtttacaatgcccagagaggtgtgttgagagctgatgttgctggaagcagatgcgcaaaccgaaattcgggcgcatatgatgaatcgcgctttcgagctgtctatctccctttctctttgtctttgcgggtcggtggccatttcagtggttttctggtagtgacaaagcgcgacgctacaggtggcgattagggtaggctgagccactgacaacttcagcataatcaccatattctcttgattgggcaatacattgcaaaccgcaggcaaaatgctctgcagattgcgtattattctactcagcgatgagaacaatttacaataaacaaagtttcgtgtcacaaccgttcatcacgggcgccagtccaattagctgagcacggccgtgagactagccactcgaattatgccttttcatgacacccgtgagctggtcagaacaatagaccgatcatca

SEQ ID NO: 15036 - DNA, 525 bp, Muscodor strobelii
  misc_feature: SGI cDNA ID NO. 564969
  misc_feature: Reduced expression when VOC is produced
  misc_feature: Encodes the peptide sequence at SEQ ID NO 15037
atgacctaccccggctctcaaccccatggccatcagctggggttcaacaaccaacaacagggccagaatgggcagcaggactaccagttcgccagcgccttcgacggccagatggacatgaacatgaacatggacatgaacgtctggcccggcgctgggcagcagcagcaacagcaacagcagcagcagcagcattatcaacagcaccagttccagcctcagtacaacaacgccggccttgcgcagcataacatcccgcagaacgtctacgcgcaccacgccgcgcaacgtcaatctcaaccgccgccggcagctcagagccatggcgctcaccacggcatccagcctcagcagcagcggcaatatccacatcagcatcagcagcagctccagcagtcaccccagctccagcatgccaacttccagttccagagctacgatccgtcgttcgaccagaggcctcagccttatgcccgcaaccgcagcccaacaacacggctcacgacgctcagctcagccagcagt

SEQ ID NO: 15037 - protein, 175 aa, Muscodor strobelii
  misc_feature: SGI Peptide ID NO. 564969
  misc_feature: Useful for introducing or modulating the production of volatile compounds
MTYPGSQPHGHQLGFNNQQQGQNGQQDYQFASAFDGQMDMNMNMDMNVWPGAGQQQQQQQQQQQHYQQHQFQPQYNNAGLAQHNIPQNVYAHHAAQRQSQPPPAAQSHGAHHGIQPQQQRQYPHQHQQQLQQSPQLQHANFQFQSYDPSFDQRPQPYARNRSPTTRLTTLSSASS

SEQ ID NO: 15038 - DNA, 705 bp, Muscodor strobelii
  misc_feature: SGI EST ID NO. CUFF.35779.0
  misc_feature: Variant of the nucleotide sequence at SEQ ID NO 15036
cgaacactccaggccaaactgactgatttactgctctacatcggaccagggtcgccacgagtttcacaacatcgccaaactttgtcgcctgtctcaacgcgccgccacagagagacaggttcagccgcgcggacgtctgcgcgcaacgccagcgccgacgagggtcgaggcgcatcgcacagccgtcccagcacgcgggagacggccatgaaggacacgaaattatgacctaccccggctctcaaccccatggccatcagctggggttcaacaaccaacaacagggccagaatgggcagcaggactaccagttcgccagcgccttcgacggccagatggacatgaacatgaacatggacatgaacgtctggcccggcgctgggcagcagcagcaacagcaacagcagcagcagcagcattatcaacagcaccagttccagcctcagtacaacaacgccggccttgcgcagcataacatcccgcagaacgtctacgcgcaccacgccgcgcaacgtcaatctcaaccgccgccggcagctcagagccatggcgctcaccacggcatccagcctcagcagcagcggcaatatccacatcagcatcagcagcagctccagcagtcaccccagctccagcatgccaacttccagttccagagctacgatccgtcgttcgaccagaggcctcagccttatgcccgcaacc

SEQ ID NO: 15039 - DNA, 357 bp, Muscodor strobelii
  misc_feature: SGI cDNA ID NO. 564970
  misc_feature: Encodes the peptide sequence at SEQ ID NO 15040
atggtggtcgtcgcccagccgaccagcggcgaggagcgggtccccgacaatctcaaagatgacaagagggacgtgaaggacctgtggaaggaagcgctgaagagttacaaggggatcgtgggcattgatctcgagaggcgcttcgacaatgttgatgcgatgatgagtttcgggacggagcagatgaacaatttccataagttccgccacaatgaaaagaaggtagataagctacgaagtctgttcgccgccaacttggatctcctcgagcaaggcgcgcagcagctgatttctgccgccacgccggcgtttccgccagcggctgctatcgggacggcattgacctatattctgcag

SEQ ID NO: 15040 - protein, 119 aa, Muscodor strobelii
  misc_feature: SGI Peptide ID NO. 564970
  misc_feature (14)..(118): NCBI GI: 256727995 Blast Desc: NECHADRAFT_83338 [Nectria haematococca mpVI 77-13-4]
  misc_feature (4)..(119): NCBI GI: 225557793 Blast Desc: HCBG_05394 [Ajellomyces capsulatus G186AR]
  misc_feature (24)..(119): NCBI GI: 240274093 Blast Desc: [Ajellomyces capsulatus H143]
  misc_feature (20)..(119): NCBI GI: 225678303 Blast Desc: [Paracoccidioides brasiliensis Pb03]
  misc_feature (20)..(119): NCBI GI: 226290649 Blast Desc: conserved [Paracoccidioides brasiliensis Pb18]
  misc_feature (24)..(119): NCBI GI: 67523131 Blast Desc: AN2022.2 [Aspergillus nidulans FGSC A4] gi|40745698|gb|EAA64854.1| AN2022.2 [Aspergillus nidulans FGSC A4] gi|259487389|tpe|CBF86028.1| TPA: conserved [Aspergillus FGSC
  misc_feature (24)..(119): NCBI GI: 212541562 Blast Desc: conserved [Penicillium marneffei ATCC 18224] gi|210068235|gb|EEA22327.1| conserved [Penicillium marneffei ATCC 18224]
  misc_feature (24)..(107): NCBI GI: 242800108 Blast Desc: conserved [Talaromyces stipitatus ATCC 10500] gi|218716864|gb|EED16285.1| conserved [Talaromyces stipitatus ATCC 10500]
MVVVAQPTSGEERVPDNLKDDKRDVKDLWKEALKSYKGIVGIDLERRFDNVDAMMSFGTEQMNNFHKFRHNEKKVDKLRSLFAANLDLLEQGAQQLISAATPAFPPAAAIGTALTYILQ

SEQ ID NO: 15041 - DNA, 919 bp, Muscodor strobelii
  misc_feature: SGI EST ID NO. CUFF.35782.0
  misc_feature: Variant of the nucleotide sequence at SEQ ID NO 15039
ggtagcgcaccgaaatacttctccagctcgtccccgaggttattgcgtatcgcataggtacataggtactcaaagccgccacttttcactgggtgtttcagccgactgtggatactagggtggcctatttttagcacaccaacgcagaagatgaatatgcagaattccaatcattgaaaatgatcaatagacaggagatgctcgacgttggtaaatttgtttacgtggaacgaagcgactatcaatgacattttgactcttggagtcctgttctacttggtcatactcatttcgttacgattccagatttccactattgtcaagggttgcacgttgaacttgtcgtaatacggttagcagcaacaccatccaatgatgccgaaaaagagggggactggccaattgtgtgcggctggacttattccagtacttagctggcatgtcccatcaccgaacgatgttgaggtactgtctgttctcttcagctgcctcacattctgccggagacattgcggtatcattcagcagctctcatcatggtggtcgtcgcccagccgaccagcggcgaggagcgggtccccgacaatctcaaagatgacaagagggacgtgaaggacctgtggaaggaagcgctgaagagttacaaggggatcgtgggcattgatctcgagaggcgcttcgacaatgttgatgcgatgatgagtttcgggacggagcagatgaacaatttccataagttccgccacaatgaaaagaaggtagataagctacgaagtctgttcgccgccaacttggatctcctcgagcaaggcgcgcagcagctgatttctgccgccacgccggcgtttccgccagcggctgctatcgggacggcattgacctatattctgcaggtagagtgacagtgacgagggtgcac

SEQ ID NO: 15042 - DNA, 1341 bp, Muscodor strobelii
  misc_feature: SGI cDNA ID NO. 564971
  misc_feature: Encodes the peptide sequence at SEQ ID NO 15043
atggattcactatccgcttcgaatatatttgcaagagcattgaaaaagaaggagtgctcattaccaaatcctcttctcccaggtatgatacacagcgaggagctcatgtcacaacttatggcagtgactaactacaagatcaccacaacagaaccaacggaccatattgccggttcctacgacttttatcatctaaatgtcattatttctggcatatttgcgcttctcgcgatttttattacactaggactaatagtccgtcacgccacacatataagcaagcccaggcaacaactccaaatcatccgcatatgtatattcgtccctctgttcgctataggtctatgggtttctatctatcttccacgagcatacgtctacatagacgcgacaatcttcatcatcgagcccatagctgtgacatgtttctatttcttcgtgtgcgaaatcgcgtctctacacatctctcctgaagtcaatccgtcatttcgagatgtctttctcgcaccgctcattgcagcggcccatcgatgcggaagccagcgactcgatcagagcccggatatgtctatcaagaaatttaaacaccttaactggttcgtgttgcagggtatcccggcctcactgctcattggtatcttgatgattatcacggaagcaaagggtatcttctgccttacagctcatgatgcgcagcacgctcatctatatttgctggcgtttaagggtatcattactggtgcactgcttatcgcggttgtccgcacgactgtgcctctgaagggagagctccgagctcagaacgcaaaggcattgacgaagctcgctgtcttcaaactcttgatcttcctacaagttacgcagagtgctgcgttcggcattctggcgtctgtcaacccgccctcggtgcgaaattcgaccacccttagtgaggctgattggttgatcggcatcccgggtttgctcactgagatcgagctgttgttcttcgctatattcttccactatgcttatggtgtatcgctctacacgcttacggatgagaagcgggctgctggagaggaatacgtttcgtatggatggggaatcatcccgaagatcttcatcatccctgagctcccagcattttggaaattcgtcaagaacattccccgtgagattgagaattatcaagctgagcacccggagtctgtgtctgtgcctcagcagctcggcctcagcagtgagatttcttcgacgaaagctgcagaaaagaaaagcatcgaggatactcaacagagtgtcaatgaaagcgagagctcatcaacgaatgggaaccaagaacgtcctaccgcttcttag

SEQ ID NO: 15043 - protein, 446 aa, Muscodor strobelii
  misc_feature: SGI Peptide ID NO. 564971
  misc_feature (64)..(129): Pfam Id: PF03619 Pfam Desc: Domain of function
  misc_feature (54)..(348): NCBI GI: 145253569 Blast Desc: An17g00680 [Aspergillus niger] gi|134083865|emb|CAK42996.1| protein product [Aspergillus niger]
  misc_feature (51)..(362): NCBI GI: 256722176 Blast Desc: NECHADRAFT_52448 [Nectria haematococca mpVI 77-13-4]
  misc_feature (59)..(445): NCBI GI: 242818353 Blast Desc: DUF300 domain protein, [Talaromyces stipitatus ATCC 10500] gi|218713565|gb|EED12989.1| DUF300 domain protein, [Talaromyces stipitatus ATCC 10500]
  misc_feature (29)..(358): NCBI GI: 212530560 Blast Desc: DUF300 domain protein, [Penicillium marneffei ATCC 18224] gi|210074835|gb|EEA28922.1| DUF300 domain protein, [Penicillium marneffei ATCC 18224]
  misc_feature (48)..(347): NCBI GI: 255956117 Blast Desc: Pc21g18160 [Penicillium chrysogenum Wisconsin 54-1255] gi|211590522|emb|CAP96713.1| Pc21g18160 [Penicillium chrysogenum Wisconsin 54-1255]
  misc_feature (62)..(345): NCBI GI: 115438022 Blast Desc: conserved [Aspergillus terreus NIH2624] gi|114188774|gb|EAU30474.1| conserved [Aspergillus terreus NIH2624]
  misc_feature (47)..(363): NCBI GI: 121712878 Blast Desc: DUF300 domain protein, [Aspergillus clavatus NRRL 1] gi|119402203|gb|EAW12624.1| DUF300 domain protein, [Aspergillus clavatus NRRL 1]
  misc_feature (62)..(363): NCBI GI: 259487619 Blast Desc: TPA: DUF300 domain protein, (AFU_orthologue; AFUA_5G07250) [Aspergillus nidulans FGSC A4]
  misc_feature (62)..(343): NCBI GI: 238837535 Blast Desc: conserved [Microsporum canis CBS 113480]
  misc_feature (88)..(388): NCBI GI: 238494398 Blast Desc: DUF300 domain protein, [Aspergillus flavus NRRL3357] gi|220695085|gb|EED51428.1| DUF300 domain protein, [Aspergillus flavus NRRL3357]
MDSLSASNIFARALKKKECSLPNPLLPGMIHSEELMSQLMAVTNYKITTTEPTDHIAGSYDFYHLNVIISGIFALLAIFITLGLIVRHATHISKPRQQLQIIRICIFVPLFAIGLWVSIYLPRAYVYIDATIFIIEPIAVTCFYFFVCEIASLHISPEVNPSFRDVFLAPLIAAAHRCGSQRLDQSPDMSIKKFKHLNWFVLQGIPASLLIGILMIITEAKGIFCLTAHDAQHAHLYLLAFKGIITGALLIAVVRTTVPLKGELRAQNAKALTKLAVFKLLIFLQVTQSAAFGILASVNPPSVRNSTTLSEADWLIGIPGLLTEIELLFFAIFFHYAYGVSLYTLTDEKRAAGEEYVSYGWGIIPKIFIIPELPAFWKFVKNIPREIENYQAEHPESVSVPQQLGLSSEISSTKAAEKKSIEDTQQSVNESESSSTNGNQERPTAS

SEQ ID NO: 15044 - DNA, 1576 bp, Muscodor strobelii
  misc_feature: SGI EST ID NO. CUFF.35786.0
  misc_feature: Variant of the nucleotide sequence at SEQ ID NO 15042
gcgcattcttatctttcattgagaatatttgtatgtgagatcgtgaccgttgcactgaatgacagagttgtttctcgatacccaccagctttgatttgtttcttctgtctgtcccttctgcttcgtcaacacttatctcacaatggattcactatccgcttcgaatatatttgcaagagcattgaaaaagaaggagtgctcattaccaaatcctcttctcccagaaccaacggaccatattgccggttcctacgacttttatcatctaaatgtcattatttctggcatatttgcgcttctcgcgatttttattacactaggactaatagtccgtcacgccacacatataagcaagcccaggcaacaactccaaatcatccgcatatgtatattcgtccctctgttcgctataggtctatgggtttctatctatcttccacgagcatacgtctacatagacgcgacaatcttcatcatcgagcccatagctgtgacatgtttctatttcttcgtgtgcgaaatcgcgtctctacacatctctcctgaagtcaatccgtcatttcgagatgtctttctcgcaccgctcattgcagcggcccatcgatgcggaagccagcgactcgatcagagcccggatatgtctatcaagaaatttaaacaccttaactggttcgtgttgcagggtatcccggcctcactgctcattggtatcttgatgattatcacggaagcaaagggtatcttctgccttacagctcatgatgcgcagcacgctcatctatatttgctggcgtttaagggtatcattactggtgcactgcttatcgcggttgtccgcacgactgtgcctctgaagggagagctccgagctcagaacgcaaaggcattgacgaagctcgctgtcttcaaactcttgatcttcctacaagttacgcagagtgctgcgttcggcattctggcgtctgtcaacccgccctcggtgcgaaattcgaccacccttagtgaggctgattggttgatcggcatcccgggtttgctcactgagatcgagctgttgttcttcgctatattcttccactatgcttatggtgtatcgctctacacgcttacggatgagaagcgggctgctggagaggaatacgtttcgtatggatggggaatcatcccgaagatcttcatcatccctgagctcccagcattttggaaattcgtcaagaacattccccgtgagattgagaattatcaagctgagcacccggagtctgtgtctgtgcctcagcagctcggcctcagcagtgagatttcttcgacgaaagctgcagaaaagaaaagcatcgaggatactcaacagagtgtcaatgaaagcgagagctcatcaacgaatgggaaccaagaacgtcctaccgcttcttagacagggtgctggaagtagccatatctaaatccggcgcgttgggaaggcgttgcatacatactaccgcgttttatttttttttaattttattccttatgataccaatacctagaagatgagaggcaactggcgttagagatacctaacaaaatactattgtta

SEQ ID NO: 15045 - DNA, 894 bp, Muscodor strobelii
  misc_feature: SGI cDNA ID NO. 564972
  misc_feature: Reduced expression when VOC is produced
  misc_feature: Encodes the peptide sequence at SEQ ID NO 15046
atggcggtcaaagccccgatgctcccgggttacacacccgtcaactcccgcatttacatccggaacgagtcggcgaaatcggatgcatcgacaatcggtggcaaagaatctgggtctgagccgaccacaatcctgatttatggctggggcgatggactgccaaagcacgtcggtaaatatgccgagggttatcatgcactgttcccgacatcgcggattgtcgttatcattaaccccatattcggtgcaactatgcagacacttcggaaacggacggactccatgaagcctgttatcgatcttgtcttccccgaagaggttgacggttcggaacgaattctattccatatcatgtcaaacactggtgggatttacgccgccgcaacccttaacgcttaccgcgagcgctacggccaagatgcaatattgcctcatcatctctgtgtcagcgactcaacgcctggcagtctcactttctcgaccgaagtttggcgatgggcgagggccatggcaatgggtatgcccaaatggatcccctggcccttctccgtgacgcaagccgtctgctgcatgtggttgtacttcatgcactatcttgctatggccatgggcattgagccgtcgggcgttcaaagcgcaagggtatacctcgacccctcgatagcctcgaagagggcgctgaggctctatatgtactctaaagatgatgatttgatagggtgggaagaccttaccgcgttcgccgcaactgctcgaagtaaaggataccaaaccgtggaggaggaattcttgggctcgcctcatgtgggccacatgcgccatcatccagaacagtattggtcgactatcttgcgctgttggaaacaggcgctcctcatggaggacaagccgtaa

SEQ ID NO: 15046 - protein, 297 aa, Muscodor strobelii
  misc_feature: SGI Peptide ID NO. 564972
  misc_feature (40)..(290): Pfam Id: PF05705 Pfam Desc: Eukaryotic protein of function (DUF829)
  misc_feature (1)..(289): NCBI GI: 13021725 Blast Desc: AF279808_7 PaxU [Penicillium paxilli]
  misc_feature (10)..(291): NCBI GI: 145248431 Blast Desc: An13g03290 [Aspergillus niger] gi|134081216|emb|CAK41725.1| protein product [Aspergillus niger]
  misc_feature (1)..(291): NCBI GI: 255935657 Blast Desc: Pc13g04190 [Penicillium chrysogenum Wisconsin 54-1255] gi|211583475|emb|CAP91488.1| Pc13g04190 [Penicillium chrysogenum Wisconsin 54-1255]
  misc_feature (5)..(291): NCBI GI: 28949957 Blast Desc: conserved [Neurospora crassa]
  misc_feature (1)..(288): NCBI GI: 256735639 Blast Desc: NECHADRAFT_99039 [Nectria haematococca mpVI 77-13-4]
  misc_feature (39)..(291): NCBI GI: 164422855 Blast Desc: NCU09695 [Neurospora crassa OR74A] gi|157069849|gb|EAA31406.2| [Neurospora crassa OR74A]
  misc_feature (10)..(296): NCBI GI: 116200536 Blast Desc: CHGG_10813 [Chaetomium globosum CBS 148.51] gi|88175527|gb|EAQ82995.1| CHGG_10813 [Chaetomium globosum CBS 148.51]
  misc_feature (4)..(295): NCBI GI: 171676320 Blast Desc: protein product [Podospora anserina] gi|170936226|emb|CAP60885.1| protein product [Podospora anserina]
  misc_feature (8)..(290): NCBI GI: 67523829 Blast Desc: AN2370.2 [Aspergillus nidulans FGSC A4] gi|40745325|gb|EAA64481.1| AN2370.2 [Aspergillus nidulans FGSC A4] gi|259487773|tpe|CBF86707.1| TPA: conserved [Aspergillus FGSC
  misc_feature (4)..(288): NCBI GI: 46137985 Blast Desc: FG10507.1 [Gibberella zeae PH-1]
  misc_feature: Useful for introducing or modulating the production of volatile compounds
MAVKAPMLPGYTPVNSRIYIRNESAKSDASTIGGKESGSEPTTILIYGWGDGLPKHVGKYAEGYHALFPTSRIVVIINPIFGATMQTLRKRTDSMKPVIDLVFPEEVDGSERILFHIMSNTGGIYAAATLNAYRERYGQDAILPHHLCVSDSTPGSLTFSTEVWRWARAMAMGMPKWIPWPFSVTQAVCCMWLYFMHYLAMAMGIEPSGVQSARVYLDPSIASKRALRLYMYSKDDDLIGWEDLTAFAATARSKGYQTVEEEFLGSPHVGHMRHHPEQYWSTILRCWKQALLMEDKP

SEQ ID NO: 15047 - DNA, 1336 bp, Muscodor strobelii
  misc_feature: SGI EST ID NO. CUFF.35800.0
  misc_feature: Variant of the nucleotide sequence at SEQ ID NO 15045
cattttcggcttcctactcgatgatgggaacttgaagcttgtgacaggaggcagaagcgtgtcatcgtataatctcacgttgttgaatcgattctgcagtcgaagacaacaactacaaatagtgagtggtgcagcgactggactgtgagcgtacgagactcaatagagcagcgcgcattctgcagaatatcagattacctatcacattcaaaaaggggcacgatggcggtcaaagccccgatgctcccgggttacacacccgtcaactcccgcatttacatccggaacgagtcggcgaaatcggatgcatcgacaatcggtggcaaagaatctgggtctgagccgaccacaatcctgatttatggctggggcgatggactgccaaagcacgtcggtaaatatgccgagggttatcatgcactgttcccgacatcgcggattgtcgttatcattaaccccatattcggtgcaactatgcagacacttcggaaacggacggactccatgaagcctgttatcgatcttgtcttccccgaagaggttgacggttcggaacgaattctattccatatcatgtcaaacactggtgggatttacgccgccgcaacccttaacgcttaccgcgagcgctacggccaagatgcaatattgcctcatcatctctgtgtcagcgactcaacgcctggcagtctcactttctcgaccgaagtttggcgatgggcgagggccatggcaatgggtatgcccaaatggatcccctggcccttctccgtgacgcaagccgtctgctgcatgtggttgtacttcatgcactatcttgctatggccatgggcattgagccgtcgggcgttcaaagcgcaagggtatacctcgacccctcgatagcctcgaagagggcgctgaggctctatatgtactctaaagatgatgatttgatagggtgggaagaccttaccgcgttcgccgcaactgctcgaagtaaaggataccaaaccgtggaggaggaattcttgggctcgcctcatgtgggccacatgcgccatcatccagaacagtattggtcgactatcttgcgctgttggaaacaggcgctcctcatggaggacaagccgtaacgcccggcgcgaacaggcgatccggaaattgggttgcgcttcatctcgtccgtggcttgggacgcaacaatcatgcatgatgagtagtacgtaatgaatataggcaggatggtatggtgattgttcaatagacgataaatagattatactaataaacttttacgcttgcctttccaataggtgagtctttcacgaagtctctcacttattcggcttccgc

SEQ ID NO: 15048 - DNA, 471 bp, Muscodor strobelii
  misc_feature: SGI cDNA ID NO. 564973
  misc_feature: Encodes the peptide sequence at SEQ ID NO 15049
atgcaattgagagcagctcttgtctcgctggccttgatggctaccgccgtcgttgcgaagcccacaccgaccaagtgctccagagatgaaccttccacatgctctgacccaccgaaccagacaactggctaccccgactacgacgcctactgccaatgcggcccgtacgccgcgaatgctacggcgtggggcaacccataccttggtctcgctcattgcgactatacatgcgcgccggcgaaccctacccaacgagcgacgcacgataacaccgatagtctctcctcatgcatgaatgcatgcactggcagcttcgagaaggctaagcgtcaggacgatgactactggttttgtcacggcgtcaactttaaacagggtgaactttgcgagttcattgggcagaaaggaacgttgacgtttgctgctggtagtggaaatacctgttggtactctgacactctcgactcttaa

SEQ ID NO: 15049 - protein, 156 aa, Muscodor strobelii
  misc_feature: SGI Peptide ID NO. 564973
MQLRAALVSLALMATAVVAKPTPTKCSRDEPSTCSDPPNQTTGYPDYDAYCQCGPYAANATAWGNPYLGLAHCDYTCAPANPTQRATHDNTDSLSSCMNACTGSFEKAKRQDDDYWFCHGVNFKQGELCEFIGQKGTLTFAAGSGNTCWYSDTLDS

SEQ ID NO: 15050 - DNA, 4117 bp, Muscodor strobelii
  misc_feature: SGI EST ID NO. CUFF.35806.0
  misc_feature: Variant of the nucleotide sequence at SEQ ID NO 15048
tgaacatcggttctgttagcagccaagaccatcaatcgtggggcacaggatctgctggatcgcgcttagcagcatcttggcatcccattacgagatcgtcattcagcccaacaggcctaggaaggtagtgggcttggtagggaacttcctagcaacatgctacgatggaaagttcccatcaaacccttcatctggcaaccccagctttttgtataagtaagatgtatttccgtattatggacttagtgaatgatggcccggtctctcatatcacggcttcgtttcctccataactacggtactcaccacctgatcattcgccaaaatgcaattgagagcagctcttgtctcgctggccttgatggctaccgccgtcgttgcgaagcccacaccgaccaagtgctccagagatgaaccttccacatgctctgacccaccgaaccagacaactggctaccccgactacgacgcctactgccaatgcggcccgtacgccgcgaatgctacggcgtggggcaacccataccttggtctcgctcattgcgactatacatgcgcgccggcgaaccctacccaacgagcgacgcacgataacaccgatagtctctcctcatgcatgaatgcatgcactggcagcttcgagaaggctaagcgtcaggacgatgactactggttttgtcacggcgtcaactttaaacagggtgaactttgcgagttcattgggcagaaaggaacgttgacgtttgctgctggtagtggaaatacctgttggtactctgacactctcgactcttaagaaacctagggctatgacgtatcgaattggtcgattcacttctagaggaggcggtagcaatatctagaagcattataaacatgcagacaattagagtaggccttgcaaggcgactgctgacttgccttatctacctacctatgttttcgtcctcaattggaactgtaaatgcgaatgctcaagagctatcaacccgtgaaaatgcggtacttgtcaggatcaaggttatgactgcacagcgatagtgcgcaccaacccgttgagtagtatgtttttaaaaccaccacgagggatagatccacgaatcggcttcgtctccgagaaccagattatgcagagtactactcgcaatcggcggttgtgaataatagctgtaccaggtttgccaggcatacccataccggcaattaaaaatatcatcgatgtggagatgagacgttcatttaaggtggtattgtcaaggccggtctgcttcttatcatttgtttaatgtagatgaaaatggtaggacagacgcgcatccagcgaccggtgaagagctgaggtgaggcattggctagagaaatgccagctggacgtagcgcgctcaccggccacggcagctgacgcatcatgcaagcaagagcttcccccctctcccatttcgccactaccacggccacggacatcggggcaggcaaagatgagaccaccgccacggagcaaacggcctagccacctctcttcagtattcaccttctagaaatcatacgacgatagctgcggcccgggcgtttctgtggatctacctagtaaatggctaccgtgcacaacaagctcacatgcggactctgtggattcgtgcgcccagccaactcggcgacgggcccagtaattcactctccgtggactcaatattgtcgggctgtatattgtctagggaatagtgccgctgaacctcgactatcgggcgttgggtttcataggcatgagtcttctgtgaactacctgccgccagaagcctgccaacgatttgatgatgaggatcttgatctgtcaaccatgattacgatccgcggtgtgagcccgccacgtcttgacttgaccgaaacggagcagagtatctacgcgtggggctttcttttccacaattcctgctggaatctcttagaacaggcatgcgcaccacagcaagtgaatatatgtgccctttggcgtatcttactttctgtgccttatgctttcgatttgccgaattgggggcacaactacggtggtctttacctgggagttacaagggatatcgcccgcggacagcattttgtgcttctcggaagggcttcccatattgttattccctctgccttcagtgatcctttcaataatcctgatctcgaaaaattgatcatgaagaagagaattaacaaggatagtggagaggtagaagggcaagacgatgatcagcctgttccgctacctatgacctcaccttgcgactccgatcctttcgcaaagttgcccgttgaaattcgggaaatgatactcacctacacagctacactagacatcaccgagttacggcttgcctcccgagtcatagccggcgttccactctcgcaatacttctttcagagtcgattctggcccggccgcgaactagacaccgtcttcgatggcttcctgctcagtccttcgaaacgggctggtatcgattggcgatcgctgtactctgaaatgagattacgtcaaggacggggcatgataggtctcggagagaagaaccgcctgagaatatggaaacagactgtgcggccactttcaaaagcaatgcagaacatatctagacagagcgagctgaaaggtcagcctactggtgtgtttgctggtactgtgatgaaagaaagctggcgaacagtcctccctgcgcgaaggtacgacgaggattttatgggtgacgttagacgtcagactttccaggtcgaagccgagcttccaccaatgcgcatttgcgaagtccatgttagcctcatcagtttcttcaacacaagatatgtaacgggattgagattcacaccggaagacggcgaagatgtcgagatcggctacatctcctatgatcgtgaagagacactcgttgttgatacttacctcgaagggcttcacattgctgtggatgaatgtgctattcgcggcatatctccggccacggcacggtacatggagactgagtacttggtctgggcgggcgacgtgagcattttgcatcgccatacgctaaaaaaccaaggggtcgctatccgtaaaatacgggccttgtttgataactttcggatgcaagcgctacagattcccaatacacagaagccgctagtagacacatcaaatgccgacttagatcttccagcataagaaaaaagtacaaatgttttattggcatcacgaacgccgaacataaagatccatgtctctgaggcaaccatggctaaatttgtgtctgccttgttgcgtgtcaaatctccatcttgtgtactcgacattaaagcggcgttgaaaggtgttagttcggccgaaaaaagctaatggcgctgcctctatttcttgaaacggagaccatatgaccgctgctggtaatgccgtctcgcaaatcagctggcggaaggacttctcggcacatatgactagagttttgctgttgactctcaaaaacccgccgtgtctcccaggggctgcatctgggacggtgaagccaaaacgttcaagcacggcctcgtcttcctcgtaataacttgcatcttgagcatatagtctgatagtccttgtgccttttagacttccatctccttgccaccatggtttacctgcggggagttgtagagtactgggcaaaggagcattcttgctccattctaaaacgtcagcaacactaagagcgagcccgagtagttcacaatttcgacggcgcatctccaatgtggcatccgtattgtacttgaaattgccaaacccgaaacaaataattctctcgatttttggaagcctgttgccatggatcagctctgcgaatctcgagcggacgcgctgcgcttcagggctgagctcccattggtcaatatgggcctggatattttgaatcatcgtgtctatgccgatgcttcgattgcaatatggcagtctgttgattatgcgtgcatggttagaacatgaatattctactagcgtagggtacctcgaagcacggaaaaaacaaaggaaggaattttgatataagtacgaagaaaaacattcaatcgaagaatagacacacttttcctttttgtccacaccaatgaggtaattggcccg

SEQ ID NO: 15051 - DNA, 1593 bp, Muscodor strobelii
  misc_feature: SGI cDNA ID NO. 564974
  misc_feature: Encodes the peptide sequence at SEQ ID NO 15052
atggctaccgtgcacaacaagctcacatgcggactctgtggattcgtgcgcccagccaactcggcgacgggcccagtaattcactctccgtggactcaatattgtcgggctgtatattgtctagggaatagtgccgctgaacctcgactatcgggcgttgggtttcataggcatgagtcttctgtgaactacctgccgccagaagcctgccaacgatttgatgatgaggatcttgatctgtcaaccatgattacgatccgcggtgtgagcccgccacgtcttgacttgaccgaaacggagcagagtatctacgcgtggggctttcttttccacaattcctgctggaatctcttagaacaggcatgcgcaccacagcaagtgaatatatgtgccctttggcgtatcttactttctgtgccttatgctttcgatttgccgaattgggggcacaactacggtggtctttacctgggagttacaagggatatcgcccgcggacagcattttgtgcttctcggaagggcttcccatattgttattccctctgccttcagtgatcctttcaataatcctgatctcgaaaaattgatcatgaagaagagaattaacaaggatagtggagaggtagaagggcaagacgatgatcagcctgttccgctacctatgacctcaccttgcgactccgatcctttcgcaaagttgcccgttgaaattcgggaaatgatactcacctacacagctacactagacatcaccgagttacggcttgcctcccgagtcatagccggcgttccactctcgcaatacttctttcagagtcgattctggcccggccgcgaactagacaccgtcttcgatggcttcctgctcagtccttcgaaacgggctggtatcgattggcgatcgctgtactctgaaatgagattacgtcaaggacggggcatgataggtctcggagagaagaaccgcctgagaatatggaaacagactgtgcggccactttcaaaagcaatgcagaacatatctagacagagcgagctgaaaggtcagcctactggtgtgtttgctggtactgtgatgaaagaaagctggcgaacagtcctccctgcgcgaaggtacgacgaggattttatgggtgacgttagacgtcagactttccaggtcgaagccgagcttccaccaatgcgcatttgcgaagtccatgttagcctcatcagtttcttcaacacaagatatgtaacgggattgagattcacaccggaagacggcgaagatgtcgagatcggctacatctcctatgatcgtgaagagacactcgttgttgatacttacctcgaagggcttcacattgctgtggatgaatgtgctattcgcggcatatctccggccacggcacggtacatggagactgagtacttggtctgggcgggcgacgtgagcattttgcatcgccatacgctaaaaaaccaaggggtcgctatccgtaaaatacgggccttgtttgataactttcggatgcaagcgctacagattcccaatacacagaagccgctagtagacacatcaaatgccgacttagatcttccagcataa

SEQ ID NO: 15052 - protein, 530 aa, Muscodor strobelii
  misc_feature: SGI Peptide ID NO. 564974
  misc_feature (10)..(511): NCBI GI: 226284736 Blast Desc: conserved [Paracoccidioides brasiliensis Pb01]
  misc_feature (10)..(511): NCBI GI: 225684361 Blast Desc: [Paracoccidioides brasiliensis Pb03]
  misc_feature (1)..(512): NCBI GI: 256722965 Blast Desc: [Nectria haematococca mpVI 77-13-4]
  misc_feature (10)..(509): NCBI GI: 256734172 Blast Desc: [Nectria haematococca mpVI 77-13-4]
  misc_feature (10)..(515): NCBI GI: 239615270 Blast Desc: conserved [Ajellomyces dermatitidis ER-3]
  misc_feature (24)..(516): NCBI GI: 238840011 Blast Desc: conserved [Microsporum canis CBS 113480]
  misc_feature (8)..(509): NCBI GI: 256726723 Blast Desc: [Nectria haematococca mpVI 77-13-4]
  misc_feature (9)..(454): NCBI GI: 226283551 Blast Desc: conserved [Paracoccidioides brasiliensis Pb01]
  misc_feature (50)..(515): NCBI GI: 154272039 Blast Desc: [Ajellomyces capsulatus NAm1] gi|150408859|gb|EDN04315.1| [Ajellomyces capsulatus NAm1]
  misc_feature (10)..(515): NCBI GI: 261192550 Blast Desc: conserved [Ajellomyces dermatitidis SLH14081] gi|239589557|gb|EEQ72200.1| conserved [Ajellomyces dermatitidis SLH14081]
MATVHNKLTCGLCGFVRPANSATGPVIHSPWTQYCRAVYCLGNSAAEPRLSGVGFHRHESSVNYLPPEACQRFDDEDLDLSTMITIRGVSPPRLDLTETEQSIYAWGFLFHNSCWNLLEQACAPQQVNICALWRILLSVPYAFDLPNWGHNYGGLYLGVTRDIARGQHFVLLGRASHIVIPSAFSDPFNNPDLEKLIMKKRINKDSGEVEGQDDDQPVPLPMTSPCDSDPFAKLPVEIREMILTYTATLDITELRLASRVIAGVPLSQYFFQSRFWPGRELDTVFDGFLLSPSKRAGIDWRSLYSEMRLRQGRGMIGLGEKNRLRIWKQTVRPLSKAMQNISRQSELKGQPTGVFAGTVMKESWRTVLPARRYDEDFMGDVRRQTFQVEAELPPMRICEVHVSLISFFNTRYVTGLRFTPEDGEDVEIGYISYDREETLVVDTYLEGLHIAVDECAIRGISPATARYMETEYLVWAGDVSILHRHTLKNQGVAIRKIRALFDNFRMQALQIPNTQKPLVDTSNADLDLPA

SEQ ID NO: 15053 - DNA, 4117 bp, Muscodor strobelii; identical to SEQ ID NO: 15050
  misc_feature: SGI EST ID NO. CUFF.35806.0
  misc_feature: Variant of the nucleotide sequence at SEQ ID NO 15051

SEQ ID NO: 15054 - DNA, 522 bp, Muscodor strobelii
  misc_feature: SGI cDNA ID NO. 564975
  misc_feature: Elevated expression when VOC is produced
  misc_feature: Encodes the peptide sequence at SEQ ID NO 15055
atgccggcagactcagccgtataccacttgcatggccggtgcgactgcggcgacctggtgtatggtatgaaggccccgccaatggcaacacatgcctgccactgccgccggtgccagcgccaaacgggctcctcgtacgccctgcacgccatcatcgagaacaagcacctggagatagccagcggcgaggttgaagagtacacagtcgcgagcccgagcgggtacggacagacgctcacccgatgcgccaagtgccacttcgccgtctggagcgcctacctggtgctgggtgacgaggccgagtatctccgcgccgtcgacgtcgggactctcgataatcccgacgcatgcccgccgacgcaccatatctttgcgagtttcaagcagccgtgggtcgtgctgtcgggaggcgatgcaccggtgtttgacactttttacgacaggagggagtggtggacgttggagcagaacgagcggcgggatgccgcgcttgcggattatcgagcaagcgtcaaaaagtag

SEQ ID NO: 15055 - protein, 173 aa, Muscodor strobelii
  misc_feature: SGI Peptide ID NO. 564975
  misc_feature (31)..(134): Pfam Id: PF04828 Pfam Desc: Glutathione-dependent formaldehyde-activating enzyme
  misc_feature (9)..(165): NCBI GI: 91786100 Blast Desc: glutathione-dependent formaldehyde-activating, GFA [Polaromonas sp. JS666] gi|91695325|gb|ABE42154.1| glutathione-dependent formaldehyde-activating, GFA [Polaromonas
  misc_feature (3)..(169): NCBI GI: 224825551 Blast Desc: glutathione-dependent formaldehyde-activating GFA [Lutiella nitroferrum 2002] gi|224602472|gb|EEG08650.1| glutathione-dependent formaldehyde-activating GFA [Lutiella 2002]
  misc_feature (8)..(164): NCBI GI: 163795085 Blast Desc: glutathione-dependent formaldehyde-activating, GFA [alpha proteobacterium BAL199] gi|159179483|gb|EDP64012.1| glutathione-dependent formaldehyde-activating, GFA [alpha BAL199]
  misc_feature (12)..(160): NCBI GI: 89900747 Blast Desc: glutathione-dependent formaldehyde-activating, GFA [Rhodoferax ferrireducens T118] gi|89345484|gb|ABD69687.1| glutathione-dependent formaldehyde-activating, GFA [Rhodoferax
  misc_feature (4)..(160): NCBI GI: 167565683 Blast Desc: BoklE_24219 [Burkholderia oklahomensis EO147] gi|167572788|ref|ZP_02365662.1| BoklC_23333 [Burkholderia oklahomensis C6786]
  misc_feature (8)..(162): NCBI GI: 238841374 Blast Desc: glutathione-dependent formaldehyde-activating [Microsporum canis CBS 113480]
  misc_feature (10)..(166): NCBI GI: 103487705 Blast Desc: glutathione-dependent formaldehyde-activating, GFA [Sphingopyxis alaskensis RB2256] gi|98977782|gb|ABF53933.1| glutathione-dependent formaldehyde-activating, GFA [Sphingopyxis
  misc_feature (10)..(166): NCBI GI: 260576889 Blast Desc: glutathione-dependent formaldehyde-activating GFA [Rhodobacter sp. SW2] gi|259020926|gb|EEW24239.1| glutathione-dependent formaldehyde-activating GFA [Rhodobacter
  misc_feature (4)..(153): NCBI GI: 167839590 Blast Desc: Bpse38_23154 [Burkholderia thailandensis MSMB43]
  misc_feature (4)..(165): NCBI GI: 126444450 Blast Desc: BURPS668_A1446 [Burkholderia pseudomallei 668] gi|167723391|ref|ZP_02406627.1| BpseD_30523 [Burkholderia pseudomallei DM98] gi|167906315|ref|ZP_02493520.1| BpseN_29043
  misc_feature: Useful for introducing or modulating the production of volatile compounds
MPADSAVYHLHGRCDCGDLVYGMKAPPMATHACHCRRCQRQTGSSYALHAIIENKHLEIASGEVEEYTVASPSGYGQTLTRCAKCHFAVWSAYLVLGDEAEYLRAVDVGTLDNPDACPPTHHIFASFKQPWVVLSGGDAPVFDTFYDRREWWTLEQNERRDAALADYRASVKK

SEQ ID NO: 15056 - DNA, 1424 bp, Muscodor strobelii
  misc_feature: SGI EST ID NO. CUFF.35816.0
  misc_feature: Variant of the nucleotide sequence at SEQ ID NO 15054
ccgcctccttgattgctagagagatggccggtcgcttcatgtataaacacgccgttgatcaagtctagacacccataggggattaccaagctctgttgaattgagcacattgaaacaggatgccggcagactcagccgtataccacttgcatggccggtgcgactgcggcgacctggtgtatggtatgaaggccccgccaatggcaacacatgcctgccactgccgccggtgccagcgccaaacgggctcctcgtacgccctgcacgccatcatcgagaacaagcacctggagatagccagcggcgaggttgaagagtacacagtcgcgagcccgagcgggtacggacagacgctcacccgatgcgccaagtgccacttcgccgtctggagcgcctacctggtgctgggtgacgaggccgagtatctccgcgccgtcgacgtcgggactctcgataatcccgacgcatgcccgccgacgcaccatatctttgcgagtttcaagcagccgtgggtcgtgctgtcgggaggcgatgcaccggtgtttgacactttttacgacaggagggagtggtggacgttggagcagaacgagcggcgggatgccgcgcttgcggattatcgagcaagcgtcaaaaagtagagtgagccgtttaacgtattgacaggcaggactgaatactgatacctggctcaacccttcattgccgtcatgcgctttgaatgtgccgatccagatcatcaccctcccatggctgagctcccaggacgagcaggccgtgttgttgccgacacactctctgcttcggtatcatgttgggtctgtgctaagcgtcgcaaccaaatcaaccactccaaattgagtttgagatcagagcccgtcttcatacctctttgcccttggctgccacacgttgggtcgatgcgcactttcaactcgacttgcttttaatcgtaaatagtaattaacaaacttcgaaattacacccttcctagactagcaagcgtgttttatacaggacaaagtttagagcagaaggacgaatagacctagcactttggaacataatacatccccgacctaggaatagggatgacattaggtggaaacaggcagccgaatggattgtcggacttatagctgaatcaatcgtcgaatcaaataccggatcatgaataaaagtatctacacaatcgatatcgagaatgaggacgagaaggaacattcgagtgcctgcgggattggctaagagatcaacttgatcacagggatgtcaggctgttattcccagatacatatacgtgatgtatatacgttgaatatgtcaatgctttatacagatatgaaatttgtggaaggcgtgaatcaaacacttgctcccgttgacgaactgactgcactgatattgtcgcaacagttctaatt

SEQ ID NO: 15057 - DNA, 1116 bp, Muscodor strobelii
  misc_feature: SGI cDNA ID NO. 564976
  misc_feature: Reduced expression when VOC is produced
  misc_feature: Encodes the peptide sequence at SEQ ID NO 15058
atggcacccaccgtcctccacctacgccacgaggagaaggccctcgagcaccgcagtgctctcactcccaccacagccaaggcgttgattgaggcaggctacacagtcaatgtcgagaagagtccagtacggatctttgatgatgaagagtttactgccgtaggctgctcgcttgtcgagactggaagctggcgcaacgcccccgccgaacacatcattgtcggcctgaaggagcttcctgaggaggaattccccctcaagcacgtccacgtccagttcgcccactgctacaaaggtcaaggaggctgggatcaggtcctcgcccggtttccccgaggtggcggcactctcctagatctcgaatttctgcaggaccccaagactggccgtcgtgtcgcagcttttggttatatggctgggttcagcggcagtgccctcgcgctcaagaactgggcatggcagcaaactcacccagctggagagcttttgcccggtgtcgagagctaccctaacgagacagccctcattaccgatgtgaagaaggatctcgaagccgctagggccaaggctggccgtggaccccgtgtcatcgtcattggtgctctcggacgctgcgggcgtggcgctgtggatatgtgtcttaaagccggtatccctgatgaccagatcctgaagtgggatatggatgagacggccaagggcgggccgttcaaggagattcacgagaatgatatattcgttaactgcatctacctttcatctaagataccgcatttcgtcaaccttgattccttgaaggaacccggtcgcaagctcaccgttgtctgcgacgtctctgctgatactaccaaccccaacaatcctatccctatctacaccgtcgcgacgacgttcaaggagcccactgtcccggtagaaggactcgagggcgagccattgagtgtcatcagcatagatcatctgcctagtctgctaccgcgcgagtcttccgaggcatttagcaacgacctgttaccgtgtctcctgaagctgaacgactggcaaaatgacgccgtatgggctggtgcgaagaagctctttgacgagaaagttgctactttaccgtcacgatcttga

SEQ ID NO: 15058 - protein, 371 aa, Muscodor strobelii
  misc_feature: SGI Peptide ID NO. 564976
  misc_feature (175)..(323): Pfam Id: PF01262 Pfam Desc: Alanine dehydrogenase/PNT, C-terminal domain
  misc_feature (7)..(142): Pfam Id: PF05222 Pfam Desc: Alanine dehydrogenase/PNT, N-terminal domain
  misc_feature (1)..(368): NCBI GI: 154320959 Blast Desc: saccharopine dehydrogenase [Botryotinia fuckeliana B05.10] gi|150851892|gb|EDN27084.1| saccharopine dehydrogenase [Botryotinia fuckeliana B05.10]
  misc_feature (1)..(370): NCBI GI: 156054636 Blast Desc: saccharopine dehydrogenase [Sclerotinia sclerotiorum 1980] gi|154703946|gb|EDO03685.1| saccharopine dehydrogenase [Sclerotinia sclerotiorum 1980]
  misc_feature (1)..(371): NCBI GI: 171687641 Blast Desc: protein product [Podospora anserina] gi|170943782|emb|CAP69434.1| protein product [Podospora anserina]
  misc_feature (1)..(369): NCBI GI: 261358826 Blast Desc: saccharopine dehydrogenase [Verticillium albo-atrum VaMs.102]
  misc_feature (1)..(371): NCBI GI: 116180468 Blast Desc: CHGG_00862 [Chaetomium globosum CBS 148.51] gi|88185159|gb|EAQ92627.1| CHGG_00862 [Chaetomium globosum CBS 148.51]
  misc_feature (1)..(368): NCBI GI: 85116012 Blast Desc: saccharopine dehydrogenase [Neurospora crassa OR74A] gi|52783134|sp|Q7SFX6.1|LYS1_NEUCR RecName: Full=Saccharopine dehydrogenase [NAD+, L-lysine-forming]; Short=SDH; AltName:
  misc_feature (4)..(368): NCBI GI: 39951433 Blast Desc: MGG_01359 [Magnaporthe grisea 70-15] gi|145020817|gb|EDK04946.1| MGG_01359 [Magnaporthe grisea 70-15]
  misc_feature (1)..(368): NCBI GI: 115396504 Blast Desc: ATEG_04713 [Aspergillus terreus NIH2624] gi|114193460|gb|EAU35160.1| ATEG_04713 [Aspergillus terreus NIH2624]
  misc_feature (1)..(368): NCBI GI: 67524831 Blast Desc: AN2873.2 [Aspergillus nidulans FGSC A4] gi|40744268|gb|EAA63444.1| AN2873.2 [Aspergillus nidulans FGSC A4]
  misc_feature (1)..(368): NCBI GI: 238054302 Blast Desc: LYS1_EMENI RecName: Full=Saccharopine dehydrogenase [NAD+, L-lysine-forming]; Short=SDH; AltName: Full=Lysine--2-oxoglutarate reductase TPA: Saccharopine [NAD+,
  misc_feature (1)..(368): SWISSPROT Homolog: EC 1.5.1.7 Saccharopine dehydrogenase (NAD(+), L-lysine-forming)
  misc_feature: Useful for introducing or modulating the production of volatile compounds
MAPTVLHLRHEEKALEHRSALTPTTAKALIEAGYTVNVEKSPVRIFDDEEFTAVGCSLVETGSWRNAPAEHIIVGLKELPEEEFPLKHVHVQFAHCYKGQGGWDQVLARFPRGGGTLLDLEFLQDPKTGRRVAAFGYMAGFSGSALALKNWAWQQTHPAGELLPGVESYPNETALITDVKKDLEAARAKAGRGPRVIVIGALGRCGRGAVDMCLKAGIPDDQILKWDMDETAKGGPFKEIHENDIFVNCIYLSSKIPHFVNLDSLKEPGRKLTVVCDVSADTTNPNNPIPIYTVATTFKEPTVPVEGLEGEPLSVISIDHLPSLLPRESSEAFSNDLLPCLLKLNDWQNDAVWAGAKKLFDEKVATLPSRS

SEQ ID NO: 15059 - DNA, 1811 bp, Muscodor strobelii
  misc_feature: SGI EST ID NO. CUFF.35830.0
  misc_feature: Variant of the nucleotide sequence at SEQ ID NO 15057
cgtcacctcaactatcacaataattcaggtttctgttttcctcaattgagatcattgcaattgacttcaggttgtcgctcttttcgttaattggattccgaatcaattcgaattagagttacattcaaccaggatagacactgacaaggctgaagcccccaaccatggcacccaccgtcctccacctacgccacgaggagaaggccctcgagcaccgcagtgctctcactcccaccacagccaaggcgttgattgaggcaggctacacagtcaatgtcgagaagagtccagtacggatctttgatgatgaagagtttactgccgtaggctgctcgcttgtcgagactggaagctggcgcaacgcccccgccgaacacatcattgtcggcctgaaggagcttcctgaggaggaattccccctcaagcacgtccacgtccagttcgcccactgctacaaaggtcaaggaggctgggatcaggtcctcgcccggtttccccgaggtggcggcactctcctagatctcgaatttctgcaggaccccaagactggccgtcgtgtcgcagcttttggttatatggctgggttcagcggcagtgccctcgcgctcaagaactgggcatggcagcaaactcacccagctggagagcttttgcccggtgtcgagagctaccctaacgagacagccctcattaccgatgtgaagaaggatctcgaagccgctagggccaaggctggccgtggaccccgtgtcatcgtcattggtgctctcggacgctgcgggcgtggcgctgtggatatgtgtcttaaagccggtatccctgatgaccagatcctgaagtgggatatggatgagacggccaagggcgggccgttcaaggagattcacgagaatgatatattcgttaactgcatctacctttcatctaagataccgcatttcgtcaaccttgattccttgaaggaacccggtcgcaagctcaccgttgtctgcgacgtctctgctgatactaccaaccccaacaatcctatccctatctacaccgtcgcgacgacgttcaaggagcccactgtcccggtagaaggactcgagggcgagccattgagtgtcatcagcatagatcatctgcctagtctgctaccgcgcgagtcttccgaggcatttagcaacgacctgttaccgtgtctcctgaagctgaacgactggcaaaatgacgccgtatgggctggtgcgaagaagctctttgacgagaaagttgctactttaccgtcacgatcttgattgtatattccatgttgcgtgagttgtttggagtagtgaaagaagaatgggatgagaaaatagataccaaggcgtagagaaaacgagccaaaatgaagctcgatcgtgcggatataaaaacggtagaccagacgagaaatagagagaaatcgagataatagctgtgcacggaattttgactataggtaatgtgagcatacatcaaacgccgataagctgcgtcacacgtggttgacaccaggtaccggtggtgcgactataacatagaagaacgtggcattacgtcgtaaatcccacagtccaagactgcatgccgtgccatgagctcttgccaacaccgatgcgccctttctcaattggaagagcacgtgtctccgacttccggtcactgggccactctttccacagtggttgaaaaatttgaaaaccttctagagaatgccattaagtttagctagcggtgttgggccgcgaggcgttgcaacggtctcggccgttggagatggtgtcgatgctgacgctgatgctgcc

SEQ ID NO: 15060 - DNA, 3534 bp, Muscodor strobelii
  misc_feature: SGI cDNA ID NO. 564977
  misc_feature: Reduced expression when VOC is produced
  misc_feature: Encodes the peptide sequence at SEQ ID NO 15061
atgttatggggtccatggacgacgtcccttcccacgattctcttcgtctgcgccttcgtcgcctggtactttgttgagcctaagacggctcatctcaacttcatcttcgttactggcggccttctcttctactttgccgtcgcgcccgagaacgcctcgtccactgccatccacctctactacctcggcaccaatctcgccactttcctccagctcgactatctcgtcatgtatcacaccaatgtcctcgttactgtctcggctggtgcttggctggtccaccgagctgtccagacgctgaggaagtctgtcaacgaactcatcggcgtcctgggtgtcgaggtccccgatgcccccgatgtatcactcgccgagattcgaccgaataatgcgaccctcaactggacacgaccgttacctagtcggccggttgccaagttcatcatccaagtcaacggagtcattgtgggtgatatcagcaacacggacaccgccatcaccgtcacagggctgaagccgaatcacttttacaacattcgagtcatcgctgttggttacaataactttcaagccgggagccgcgtgatccgactacgtacttttaacagagatgggcgtccgcagcttggcgatggccgacttccgtccaatttcgtgccagaagaacctcagctcgccccgccattgctcagcgatcaggctgacgacgataatgcctaccggggcccggcaggtctcgagaccatttcgataccggagaacgctgccgcatctccacgtgatgcgtctacgatttcctcggctggaagacggaatacgctaactagaaagcactcaccttctaccacgagcatggatcagtccgccaaagatgccctcgccgatctgtccgagcagtctctgcaggagctgggtgagaaatttcagagcatccgcaaagaaatcgaagaggtccaagcacagattgcgaaggacgagaaagaacataaggagtcactcgaagaactcaatgcagagaaaaaggagaagaaacggattttgaaggagaaggatgatacgaccgagaagctgaagagggaaatgggatcaacagagagggccatgcggagcacccagcaaaagaaaacgcagaaagagaaactgttacgtgacagacaggcagagcggcagaagctccacgacgacatggctaagtgggagaaagatattgctaccatgcttaagcgtcagcgtggctttgaggccgagaaggaaaaggttgagaaggaggccgaagctcgatcggaagacctccaatcagaaattgcgcaggtacaggcaagcctgacgcaggaagaagccgagctcaaggagaaaggcagggagttgaaagaggcggaagagcagcgaaagaagcttccgggcggagaagagagcgaagagtggcgagaaagagacgtggaaatcaagagaaactggacatacagagccaaggacctccagcgacgactattccaggctaataagaaaatccggttggtcaaagactacgagcacttcttgcagagtcaactggcggcggcatcgcaggcaggcatgcccatcatgtacaaccaagccaactcgtccggcgtcgatttcgacatggggacgcaaaaccagctcaagaggcggagtcgcaacagcaattccatccccaatgctgccattccctcgcctgctccctcctttgccgccacagatcgtccatatggaccttcgccgacctacggagtctctagggctccaactttacccccggggttcgctcaggggccttacatggataccagccttcccatgtccgaacccctggacgaagaaggcattcgggcattgacaggcggtgcgcctctaagccctaccgctacttcactattacctgccggcatgttagacgatattctcgacgatgacgaccctagcagttttgatggattcggtgctctgcccgcacggcagggaacgtttggttcggcggcgctatcaccagagtacgatcctcaatcgcctacatcgtcgatcgagtccccgaacttcatgtctagtccccaagactccacacagcatcttccctactcacaattcccgggcgaaaacagcgatcgtcgctctctgagggatcttcagggcgagccaggcacttcctcatcgccaatcgcaacggccacccaaccggccaagaagagttttctgccttgggggaatcgcaaccccaaaagcgctcaagagcctcccgcacttggcagcctgaaaggtagccaaagccaatctttcccccgacagacagacgatgtcgagcatgctcccaacaagagacggattagtttttccaccggttggaacgtgtttcatcgaggggcaccggctccccgaacgtcagatgcggcggagacgagcacggcgagtccacggactctagcctctcgccgtttgggtctcggtgccaatgcgagcggtcttggcagcaatatcttctcggaaagagatccaagtagtcctcgaccgctctcgattgcgtcgtcggagcttccgcgtccctcgacggacagcggatccatttggggtggccgaggtataccaccgcctagccgactttggtcgaatgaccaagatccctgggctgcgtcgtctcggaacccgtctagaaggccgtcactccatggatccccatcgctgctcaagacgacgcttgctgatgccgaggatgagattctggacgactctgagctactgcacgcctccccgagccaagtgggtgtcattggcaccaagccaagcaaagcgtcgctcacccagcggctgaatcccgcagcgcctaccttcatggctggcctgtttggtggtaagcctgataaacagccaaagatgggtaaggatgccaaggaggcgaaagagaagtccaagggtaagggcaaggaaaaggagacgagggaaaagaagcctcggcaatcctttacttcggtttccgacgtgggccccccttcgctggacgaatctccgtcgaacccccggcagtcgcgcgacgactactctgtggattcgacttcgatcacggaatcccgcgagtctcttccgctagaacagcccgtgtctcactcaccatcggaccatgcgagtagcatcggcctacaagagagcgggcttaggaagctgttgcgaaagggcagctcctcgaagttcagcctctcgtctgtgcgaggactcagcagtaagaagggcccgaacagcgtgacaggctcggaccgcaacgcctctggcgatcgcacaagtttcgacgacttcgctgaggaagttgcgagcggccatctgctgggacggagcgtggacagcaacacgagcagcccgctgatcggaccgacgagcggaccgcgttcggctaaggagaaaccggtcagctggggagctaggttctcgatgaagaagaagacgggcaaggagaaggagagtctggacatcgacagggacgagataggatcacagagcacggctcccaatacgccgactctgggctaa

SEQ ID NO: 15061 - protein, 1177 aa, Muscodor strobelii
  misc_feature: SGI Peptide ID NO. 564977
  misc_feature (116)..(190): Pfam Id: PF00041 Pfam Desc: Fibronectin type III domain
  misc_feature (116)..(184): Pfam Id: PF00041 Pfam Desc: Fibronectin type III domain
  misc_feature (1)..(1162): NCBI GI: 85111955 Blast Desc: NCU03136 [Neurospora crassa OR74A] gi|28925956|gb|EAA34949.1| [Neurospora crassa OR74A] gi|38567268|emb|CAE76558.1| [Neurospora crassa]
  misc_feature (6)..(1167): NCBI GI: 171687757 Blast Desc: protein product [Podospora anserina] gi|170943840|emb|CAP69492.1| protein product [Podospora anserina]
  misc_feature (6)..(1161): NCBI GI: 261358824 Blast Desc: conserved [Verticillium albo-atrum VaMs.102]
  misc_feature (6)..(1161): NCBI GI: 256735434 Blast Desc: NECHADRAFT_30853 [Nectria haematococca mpVI 77-13-4]
  misc_feature (6)..(1160): NCBI GI: 46107974 Blast Desc: FG00869.1 [Gibberella zeae PH-1]
  misc_feature (1)..(712): NCBI GI: 116180502 Blast Desc: CHGG_00879 [Chaetomium globosum CBS 148.51] gi|88185176|gb|EAQ92644.1| CHGG_00879 [Chaetomium globosum CBS 148.51]
  misc_feature (1)..(797): NCBI GI: 145613858 Blast Desc: MGG_11235 [Magnaporthe grisea 70-15] gi|145020874|gb|EDK05003.1| MGG_11235 [Magnaporthe grisea 70-15]
  misc_feature (92)..(1163): NCBI GI: 156054658 Blast Desc: SS1G_06177 [Sclerotinia sclerotiorum 1980] gi|154703957|gb|EDO03696.1| SS1G_06177 [Sclerotinia sclerotiorum 1980]
  misc_feature (92)..(852): NCBI GI: 154296368 Blast Desc: BC1G_13010 [Botryotinia fuckeliana B05.10] gi|150843371|gb|EDN18564.1| BC1G_13010 [Botryotinia fuckeliana B05.10]
  misc_feature (84)..(1157): NCBI GI: 189197395 Blast Desc: conserved [Pyrenophora tritici-repentis Pt-1C-BFP] gi|187980983|gb|EDU47609.1| conserved [Pyrenophora tritici-repentis Pt-1C-BFP]
  misc_feature: Useful for introducing or modulating the production of volatile compounds
MLWGPWTTSLPTILFVCAFVAWYFVEPKTAHLNFIFVTGGLLFYFAVAPENASSTAIHLYYLGTNLATFLQLDYLVMYHTNVLVTVSAGAWLVHRAVQTLRKSVNELIGVLGVEVPDAPDVSLAEIRPNNATLNWTRPLPSRPVAKFIIQVNGVIVGDISNTDTAITVTGLKPNHFYNIRVIAVGYNNFQAGSRVIRLRTFNRDGRPQLGDGRLPSNFVPEEPQLAPPLLSDQADDDNAYRGPAGLETISIPENAAASPRDASTISSAGRRNTLTRKHSPSTTSMDQSAKDALADLSEQSLQELGEKFQSIRKEIEEVQAQIAKDEKEHKESLEELNAEKKEKKRILKEKDDTTEKLKREMGSTERAMRSTQQKKTQKEKLLRDRQAERQKLHDDMAKWEKDIATMLKRQRGFEAEKEKVEKEAEARSEDLQSEIAQVQASLTQEEAELKEKGRELKEAEEQRKKLPGGEESEEWRERDVEIKRNWTYRAKDLQRRLFQANKKIRLVKDYEHFLQSQLAAASQAGMPIMYNQANSSGVDFDMGTQNQLKRRSRNSNSIPNAAIPSPAPSFAATDRPYGPSPTYGVSRAPTLPPGFAQGPYMDTSLPMSEPLDEEGIRALTGGAPLSPTATSLLPAGMLDDILDDDDPSSFDGFGALPARQGTFGSAALSPEYDPQSPTSSIESPNFMSSPQDSTQHLPYSQFPGENSDRRSLRDLQGEPGTSSSPIATATQPAKKSFLPWGNRNPKSAQEPPALGSLKGSQSQSFPRQTDDVEHAPNKRRISFSTGWNVFHRGAPAPRTSDAAETSTASPRTLASRRLGLGANASGLGSNIFSERDPSSPRPLSIASSELPRPSTDSGSIWGGRGIPPPSRLWSNDQDPWAASSRNPSRRPSLHGSPSLLKTTLADAEDEILDDSELLHASPSQVGVIGTKPSKASLTQRLNPAAPTFMAGLFGGKPDKQPKMGKDAKEAKEKSKGKGKEKETREKKPRQSFTSVSDVGPPSLDESPSNPRQSRDDYSVDSTSITESRESLPLEQPVSHSPSDHASSIGLQESGLRKLLRKGSSSKFSLSSVRGLSSKKGPNSVTGSDRNASGDRTSFDDFAEEVASGHLLGRSVDSNTSSPLIGPTSGPRSAKEKPVSWGARFSMKKKTGKEKESLDIDRDEIGSQSTAPNTPTLG

SEQ ID NO: 15062 - DNA, 4121 bp, Muscodor strobelii
  misc_feature: SGI EST ID NO. CUFF.36047.0
  misc_feature: Variant of the nucleotide sequence at SEQ ID NO 15060
gtatctctctgcacacactcacatcccaccatcgcggccgcatccgcatcgacaccagcgtctgcatctgccatgaatttgttttgctagtgagagtctgaaatgagggcatcgcatccatgagttttgcagttcatcccgctctcgcccgcaactcatcccagcatatacgcatctactaggctaattaacccgacatttttgcatcgcatcacatcaaattaccatcaccgtaagatcccccacgtggtattcacagccagccgaatgtgtcctcttcatggtcgccaccaccacaatacccggcctcatcaagctcctcgccatccgcgtactgctgctgtctttgcctcgtccctttgccggctgccttgacgctcgatatgttatggggtccatggacgacgtcccttcccacgattctcttcgtctgcgccttcgtcgcctggtactttgttgagcctaagacggctcatctcaacttcatcttcgttactggcggccttctcttctactttgccgtcgcgcccgagaacgcctcgtccactgccatccacctctactacctcggcaccaatctcgccactttcctccagctcgactatctcgtcatgtatcacaccaatgtcctcgttactgtctcggctggtgcttggctggtccaccgagctgtccagacgctgaggaagtctgtcaacgaactcatcggcgtcctgggtgtcgaggtccccgatgcccccgatgtatcactcgccgagattcgaccgaataatgcgaccctcaactggacacgaccgttacctagtcggccggttgccaagttcatcatccaagtcaacggagtcattgtgggtgatatcagcaacacggacaccgccatcaccgtcacagggctgaagccgaatcacttttacaacattcgagtcatcgctgttggttacaataactttcaagccgggagccgcgtgatccgactacgtacttttaacagagatgggcgtccgcagcttggcgatggccgacttccgtccaatttcgtgccagaagaacctcagctcgccccgccattgctcagcgatcaggctgacgacgataatgcctaccggggcccggcaggtctcgagaccatttcgataccggagaacgctgccgcatctccacgtgatgcgtctacgatttcctcggctggaagacggaatacgctaactagaaagcactcaccttctaccacgagcatggatcagtccgccaaagatgccctcgccgatctgtccgagcagtctctgcaggagctgggtgagaaatttcagagcatccgcaaagaaatcgaagaggtccaagcacagattgcgaaggacgagaaagaacataaggagtcactcgaagaactcaatgcagagaaaaaggagaagaaacggattttgaaggagaaggatgatacgaccgagaagctgaagagggaaatgggatcaacagagagggccatgcggagcacccagcaaaagaaaacgcagaaagagaaactgttacgtgacagacaggcagagcggcagaagctccacgacgacatggctaagtgggagaaagatattgctaccatgcttaagcgtcagcgtggctttgaggccgagaaggaaaaggttgagaaggaggccgaagctcgatcggaagacctccaatcagaaattgcgcaggtacaggcaagcctgacgcaggaagaagccgagctcaaggagaaaggcagggagttgaaagaggcggaagagcagcgaaagaagcttccgggcggagaagagagcgaagagtggcgagaaagagacgtggaaatcaagagaaactggacatacagagccaaggacctccagcgacgactattccaggctaataagaaaatccggttggtcaaagactacgagcacttcttgcagagtcaactggcggcggcatcgcaggcaggcatgcccatcatgtacaaccaagccaactcgtccggcgtcgatttcgacatggggacgcaaaaccagctcaagaggcggagtcgcaacagcaattccatccccaatgctgccattccctcgcctgctccctcctttgccgccacagatcgtccatatggaccttcgccgacctacggagtctctagggctccaactttacccccggggttcgctcaggggccttacatggataccagccttcccatgtccgaacccctggacgaagaaggcattcgggcattgacaggcggtgcgcctctaagccctaccgctacttcactattacctgccggcatgttagacgatattctcgacgatgacgaccctagcagttttgatggattcggtgctctgcccgcacggcagggaacgtttggttcggcggcgctatcaccagagtacgatcctcaatcgcctacatcgtcgatcgagtccccgaacttcatgtctagtccccaagactccacacagcatcttccctactcacaattcccgggcgaaaacagcgatcgtcgctctctgagggatcttcagggcgagccaggcacttcctcatcgccaatcgcaacggccacccaaccggccaagaagagttttctgccttgggggaatcgcaaccccaaaagcgctcaagagcctcccgcacttggcagcctgaaaggtagccaaagccaatctttcccccgacagacagacgatgtcgagcatgctcccaacaagagacggattagtttttccaccggttggaacgtgtttcatcgaggggcaccggctccccgaacgtcagatgcggcggagacgagcacggcgagtccacggactctagcctctcgccgtttgggtctcggtgccaatgcgagcggtcttggcagcaatatcttctcggaaagagatccaagtagtcctcgaccgctctcgattgcgtcgtcggagcttccgcgtccctcgacggacagcggatccatttggggtggccgaggtataccaccgcctagccgactttggtcgaatgaccaagatccctgggctgcgtcgtctcggaacccgtctagaaggccgtcactccatggatccccatcgctgctcaagacgacgcttgctgatgccgaggatgagattctggacgactctgagctactgcacgcctccccgagccaagtgggtgtcattggcaccaagccaagcaaagcgtcgctcacccagcggctgaatcccgcagcgcctaccttcatggctggcctgtttggtggtaagcctgataaacagccaaagatgggtaaggatgccaaggaggcgaaagagaagtccaagggtaagggcaaggaaaaggagacgagggaaaagaagcctcggcaatcctttacttcggtttccgacgtgggccccccttcgctggacgaatctccgtcgaacccccggcagtcgcgcgacgactactctgtggattcgacttcgatcacggaatcccgcgagtctcttccgctagaacagcccgtgtctcactcaccatcggaccatgcgagtagcatcggcctacaagagagcgggcttaggaagctgttgcgaaagggcagctcctcgaagttcagcctctcgtctgtgcgaggactcagcagtaagaagggcccgaacagcgtgacaggctcggaccgcaacgcctctggcgatcgcacaagtttcgacgacttcgctgaggaagttgcgagcggccatctgctgggacggagcgtggacagcaacacgagcagcccgctgatcggaccgacgagcggaccgcgttcggctaaggagaaaccggtcagctggggagctaggttctcgatgaagaagaagacgggcaaggagaaggagagtctggacatcgacagggacgagataggatcacagagcacggctcccaatacgccgactctgggctaaagaggagaaagccgaaagaggaaaagcatgacttataagcggtgtcagcggaccttgcaacagccagcagggtgcagtaaatagcagttttcatccgaggtatatgattagcacaggtagtatatctagtcgatgcaatcgatagtttccgctcactgcatatgagactatcagcaggtaaaaaagcactcatgtcaagttcct

SEQ ID NO: 15063 - DNA, 474 bp, Muscodor strobelii
  misc_feature: SGI cDNA ID NO. 564978
  misc_feature: Encodes the peptide sequence at SEQ ID NO 15064
atggcgcccacggaaacaccgagaagcggcgacgagcgcttgccgatgccatcgcggaaccccttaccgctgtccgcaagccaggaggcacaggtccgcgaggtgtttaacgcgcgtgtaaggtcgctttgcgcggatgacatcaaagcattcgcagcctgcgcggcaaaccgaacattcagcatccccttcgcctgtcgggctttgtcacatgcgatgaacaactgcatgcttgcgcatgctacgccggaagaacatgataaagcgagggaagactggtttgcggcgcgaatgcaacgcgcgaaagagagggagatgaaggagaggcggaagattgagcaggaacggtttcatagggagtggtggggattgccggaaagggatccggaggaggttagacgggagctggagaaacttgagaggccggaacgggttgggggaacggttaggaggagggaagatagtgggcggtag

SEQ ID NO: 15064 - protein, 157 aa, Muscodor strobelii
  misc_feature: SGI Peptide ID NO. 564978
  misc_feature (12)..(149): NCBI GI: 164427274 Blast Desc: NCU03135 [Neurospora crassa OR74A] gi|157071677|gb|EAA34948.2| conserved [Neurospora crassa OR74A]
  misc_feature (16)..(151): NCBI GI: 145613854 Blast Desc: MGG_01312 [Magnaporthe grisea 70-15] gi|145020872|gb|EDK05001.1| MGG_01312 [Magnaporthe grisea 70-15]
  misc_feature (13)..(153): NCBI GI: 156054144 Blast Desc: SS1G_05920 [Sclerotinia sclerotiorum 1980] gi|154703700|gb|EDO03439.1| SS1G_05920 [Sclerotinia sclerotiorum 1980]
  misc_feature (2)..(151): NCBI GI: 261358825 Blast Desc: conserved [Verticillium albo-atrum VaMs.102]
  misc_feature (4)..(151): NCBI GI: 256734909 Blast Desc: NECHADRAFT_73444 [Nectria haematococca mpVI 77-13-4]
  misc_feature (4)..(151): NCBI GI: 46120606 Blast Desc: FG04927.1 [Gibberella zeae PH-1]
  misc_feature (19)..(116): NCBI GI: 225561517 Blast Desc: conserved [Ajellomyces capsulatus G186AR]
  misc_feature (19)..(120): NCBI GI: 67517029 Blast Desc: AN0795.2 [Aspergillus nidulans FGSC A4] gi|40746469|gb|EAA65625.1| AN0795.2 [Aspergillus nidulans FGSC A4] gi|259488923|tpe|CBF88767.1| TPA: [Aspergillus nidulans FGSC
  misc_feature (19)..(135): NCBI GI: 226278788 Blast Desc: [Paracoccidioides brasiliensis Pb01]
  misc_feature (4)..(95): NCBI GI: 145230802 Blast Desc: An01g12590 [Aspergillus niger] gi|134055786|emb|CAK37310.1| protein product [Aspergillus niger]
MAPTETPRSGDERLPMPSRNPLPLSASQEAQVREVFNARVRSLCADDIKAFAACAANRTFSIPFACRALSHAMNNCMLAHATPEEHDKAREDWFAARMQRAKEREMKERRKIEQERFHREWWGLPERDPEEVRRELEKLERPERVGGTVRRREDSGR

SEQ ID NO: 15065 - DNA, 1055 bp, Muscodor strobelii
  misc_feature: SGI EST ID NO. CUFF.35840.0
  misc_feature: Variant of the nucleotide sequence at SEQ ID NO 15063
agacatggagcttggggaagctttggcaagaagttctctactcatccgcgcgacacaattagattaattggaggaacgaaagccgtcagaagagcgatagatcatcaagaacacgcatacgactgcattactgcatcagacatagaaatacgcgcattatcgcatcacgcgacttctggttggggaacacgacggtctacgagcttccagctagacaaggcattggagtacgacacggacatcgagacactcttttctaagccttcgctcgttgatcgattcatcgactctctccttgtacggcaggctcatggccgccgcgcaccctcagatcacaatggcgcccacggaaacaccgagaagcggcgacgagcgcttgccgatgccatcgcggaaccccttaccgctgtccgcaagccaggaggcacaggtccgcgaggtgtttaacgcgcgtgtaaggtcgctttgcgcggatgacatcaaagcattcgcagcctgcgcggcaaaccgaacattcagcatccccttcgcctgtcgggctttgtcacatgcgatgaacaactgcatgcttgcgcatgctacgccggaagaacatgataaagcgagggaagactggtttgcggcgcgaatgcaacgcgcgaaagagagggagatgaaggagaggcggaagattgagcaggaacggtttcatagggagtggtggggattgccggaaagggatccggaggaggttagacgggagctggagaaacttgagaggccggaacgggttgggggaacggttaggaggagggaagatagtgggcggtagtgttgttggaggtttgggttgggattatggtgttgtaggatatacagggagagggttgaggacgtgggtcagagggtgagatggtgcgtttaaatattggtgtgattagcgacgatgagtgggcatgagaggttggcgtgagttgtacattatgtattgtatctatgcatatatgcctggcgttatggaatcgagttctctctgcatacatttatctttgcgagagatcggtgcttgaagatgt

SEQ ID NO: 15066 - DNA, 1923 bp, Muscodor strobelii
  misc_feature: SGI cDNA ID NO. 564979
  misc_feature: Elevated expression when VOC is produced
  misc_feature: Encodes the peptide sequence at SEQ ID NO 15067
atggcagtcaatcgcattgattacctgaaagaggactgttacgaccccgctagttaccccgcaagacttcagcatacccagtcactaccgcactctttacagcgatatcatgacctactcgatgagagagagggacgagtgttcgtagggaactctaagaactggattattcggttctgggattgttttgatggccaaaaacaatttccgactgttccacataattgcaccacccttgatgggctccgcgagtacctgctgaatgggctctccaaagatcccaagtgtcggcatgtgtttctcgagactgatcattcttacgcaccgctagattgttcgaggaatatgcttgtgctattgctcacctttcaccaggtgatgcctcaattcctagatattgttcttgctttcggtacagttgcagcacgaaccgtgccggtcgcgtttccgacttgcgtattctactacgaaaatttcctaaatctcagctctgagcggttcgatatcccgcagcttggtcgttctggctgcgaactccgtcattgttataacctgtggtcggcggagagatccgatccggaaagtaaccctcaacagacatggacaatccggcaagctggattgtaccactcttttgatattgaaaccgggagggctacgtggatccacctcaaaacgaatgatcttctgcaacaccgtataaggcaggcgacagttcatgcagagaagttcaaagctaagaacatacaaaccgtgcaaggttcgttcttagcaactttgctaacccagtttatcattttcgagtggagcagcgagaactgggctcaatatttgaaccactgcgagtgtcaaattgagaccattttgaccaagctcaaaaaagcaccacttggggcagtcgagaagcgtattatggacgatcttgctcaatctcctcaggtggcaaacgagtattctggaaagggtttcaagttctcaagcagagctggaacagcagtgagtggcacgtcttttcggataccttctagaaggagcacgatggcgagcaaatcatttcggagtatcgatattcactctgcactacatcgcgttatgtccaatctgacagagaaaacattgatcgcacgtccagaaacacatgtgtcacaacgtcaagttaatgatccagctgctgagaccgaagaggatcttgatgcaatatttgatagttttaagtttcaagatcttcagcgcttgcattctctcagcgagacacttcacgaagcggatttgataatcggattgaatatcagagttctgactcagatactagagtactatcaagattacgtccgggatcaggagacacctacatccatcaggatagattgtcagtccgggttgaaatatctcatccagaggacaactagcatagtacaaaacctagagactgagcagatgcgtatttctactcttcaagttttgttggaagatgggaaaactattttcgatgcgatcactggattacgaaatgttgagcttaaccggcgagcttcgaagagaatggaggacatgaccgaaaacatgcacaagttgaccgcccaaaccaaaaaagatacatcctcgatgcactggatcacgggcgtgactctaatcttccttccgggaacattcattgccacattcctcggcgccggtttctatcaatggcctcaacccccacaatcagcagagatggcaaagttcccagtgtttcgaccaaaatatttcttcttatttctcgggatcagcttgggtttgacttccgtaactttgtttctgtggtggtgtaaagtctggttgacgcctcgaatcaaaactcgttaccgaatggtcagacaattggtcaaaattgaagacgaagaggctcatttacccacagggcccgtccaagtgagcagctaa

SEQ ID NO: 15067 - protein, 640 aa, Muscodor strobelii
  misc_feature: SGI Peptide ID NO. 564979
  misc_feature (3)..(629): NCBI GI: 212537493 Blast Desc: PMAA_093510 [Penicillium marneffei ATCC 18224] gi|210068644|gb|EEA22735.1| PMAA_093510 [Penicillium marneffei ATCC 18224]
  misc_feature (3)..(628): NCBI GI: 171679401 Blast Desc: protein product [Podospora anserina] gi|170939326|emb|CAP64554.1| protein product [Podospora anserina]
  misc_feature (13)..(601): NCBI GI: 116197192 Blast Desc: CHGG_05194 [Chaetomium globosum CBS 148.51] gi|88181107|gb|EAQ88575.1| CHGG_05194 [Chaetomium globosum CBS 148.51]
  misc_feature (1)..(601): NCBI GI: 256723607 Blast Desc: NECHADRAFT_52101 [Nectria haematococca mpVI 77-13-4]
  misc_feature (8)..(601): NCBI GI: 46111065 Blast Desc: FG02414.1 [Gibberella zeae PH-1]
  misc_feature (9)..(565): NCBI GI: 46109784 Blast Desc: FG01774.1 [Gibberella zeae PH-1]
  misc_feature (99)..(495): NCBI GI: 145613746 Blast Desc: MGG_01394 [Magnaporthe grisea 70-15] gi|145020776|gb|EDK04905.1| MGG_01394 [Magnaporthe grisea 70-15]
  misc_feature (162)..(601): NCBI GI: 46122979 Blast Desc: FG05867.1 [Gibberella zeae PH-1]
  misc_feature (126)..(616): NCBI GI: 189204522 Blast Desc: conserved [Pyrenophora tritici-repentis Pt-1C-BFP] gi|187985695|gb|EDU51183.1| conserved [Pyrenophora tritici-repentis Pt-1C-BFP]
  misc_feature (117)..(565): NCBI GI: 256729537 Blast Desc: NECHADRAFT_84216 [Nectria haematococca mpVI 77-13-4]
  misc_feature: Useful for introducing or modulating the production of volatile compounds
MAVNRIDYLKEDCYDPASYPARLQHTQSLPHSLQRYHDLLDEREGRVFVGNSKNWIIRFWDCFDGQKQFPTVPHNCTTLDGLREYLLNGLSKDPKCRHVFLETDHSYAPLDCSRNMLVLLLTFHQVMPQFLDIVLAFGTVAARTVPVAFPTCVFYYENFLNLSSERFDIPQLGRSGCELRHCYNLWSAERSDPESNPQQTWTIRQAGLYHSFDIETGRATWIHLKTNDLLQHRIRQATVHAEKFKAKNIQTVQGSFLATLLTQFIIFEWSSENWAQYLNHCECQIETILTKLKKAPLGAVEKRIMDDLAQSPQVANEYSGKGFKFSSRAGTAVSGTSFRIPSRRSTMASKSFRSIDIHSALHRVMSNLTEKTLIARPETHVSQRQVNDPAAETEEDLDAIFDSFKFQDLQRLHSLSETLHEADLIIGLNIRVLTQILEYYQDYVRDQETPTSIRIDCQSGLKYLIQRTTSIVQNLETEQMRISTLQVLLEDGKTIFDAITGLRNVELNRRASKRMEDMTENMHKLTAQTKKDTSSMHWITGVTLIFLPGTFIATFLGAGFYQWPQPPQSAEMAKFPVFRPKYFFLFLGISLGLTSVTLFLWWCKVWLTPRIKTRYRMVRQLVKIEDEEAHLPTGPVQVSS

SEQ ID NO: 15068 - DNA, 6019 bp, Muscodor strobelii
  misc_feature: SGI EST ID NO. CUFF.35942.2
  misc_feature: Variant of the nucleotide sequence at SEQ ID NO 15066
cgcgaagacatttgcaaaaacccacattccttgtcgtactaggaactcccattctttccaactacattctagtttccaggcaccgatttagtgaccagcactgcctaatgtactctttgcttccgtaccttcaagccattctctcgttattgccatggcagtcaatcgcattgattacctgaaagaggactgttacgaccccgctagttaccccgcaagacttcagcatacccagtcactaccgcactctttacagcgatatcatgacctactcgatgagagagagggacgagtgttcgtagggaactctaagaactggattattcggttctgggattgttttgatggccaaaaacaatttccgactgttccacataattgcaccacccttgatgggctccgcgagtacctgctgaatgggctctccaaagatcccaagtgtcggcatgtgtttctcgagactgatcattcttacgcaccgctagattgttcgaggaatatgcttgtgctattgctcacctttcaccaggtgatgcctcaattcctagatattgttcttgctttcggtacagttgcagcacgaaccgtgccggtcgcgtttccgacttgcgtattctactacgaaaatttcctaaatctcagctctgagcggttcgatatcccgcagcttggtcgttctggctgcgaactccgtcattgttataacctgtggtcggcggagagatccgatccggaaagtaaccctcaacagacatggacaatccggcaagctggattgtaccactcttttgatattgaaaccgggagggctacgtggatccacctcaaaacgaatgatcttctgcaacaccgtataaggcaggcgacagttcatgcagagaagttcaaagctaagaacatacaaaccgtgcaaggttcgttcttagcaactttgctaacccagtttatcattttcgagtggagcagcgagaactgggctcaatatttgaaccactgcgagtgtcaaattgagaccattttgaccaagctcaaaaaagcaccacttggggcagtcgagaagcgtattatggacgatcttgctcaatctcctcaggtggcaaacgagtattctggaaagggtttcaagttctcaagcagagctggaacagcagtgagtggcacgtcttttcggataccttctagaaggagcacgatggcgagcaaatcatttcggagtatcgatattcactctgcactacatcgcgttatgtccaatctgacagagaaaacattgatcgcacgtccagaaacacatgtgtcacaacgtcaagttaatgatccagctgctgagaccgaagaggatcttgatgcaatatttgatagttttaagtttcaagatcttcagcgcttgcattctctcagcgagacacttcacgaagcggatttgataatcggattgaatatcagagttctgactcagatactagagtactatcaagattacgtccgggatcaggagacacctacatccatcaggatagattgtcagtccgggttgaaatatctcatccagaggacaactagcatagtacaaaacctagagactgagcagatgcgtatttctactcttcaagttttgttggaagatgggaaaactattttcgatgcgatcactggattacgaaatgttgagcttaaccggcgagcttcgaagagaatggaggacatgaccgaaaacatgcacaagttgaccgcccaaaccaaaaaagatacatcctcgatgcactggatcacgggcgtgactctaatcttccttccgggaacattcattgccgtaagatatgcgctgccgaagttctgggatattctacgttcttgtctgacgactgatgcgcagacattcctcggcgccggtttctatcaatggcctcaacccccacaatcagcagagatggcaaagttcccagtgtttcgaccaaaatatttcttcttatttctcgggatcagcttgggtttgacttccgtaactttgtttctgtggtggtgtaaagtctggttgacgcctcgaatcaaaactcgttaccgaatggtcagacaattggtcaaaattgaagacgaagaggctcatttacccacagggcccgtccaagtgagcagctaatatttcagagctggcattcaagaaaggtctttcaaggaattcgcaacaatgctagcacgatccaaaacgtgcttggcagcggctgattaatacgttggtagcacggctggaaaataggagataggtgatacaccaatgttcatcttaagtaggacgcgcgaggtaaacgtaacgatgagtatggtcattggtgaggtactgctttcctcctccagtcgaaatcgcttagtcgtgtacaatagacaaaagacctgatgcaagtcattgtgggacggctcgctaggcagatttgccctggtcggcaaggtctgtggcgcaacacaggccaaccggaagatctataggtcatgcatgtggttcttacacctctatctaagccccgtcaggtagtattactagcaacactagttacaaggcatccgatgcgacacccaaggcgtataggcaggctgctgctcgtcatttcacgttgcccaatggcgcgtccgctgagtcgcaaactcttccttctccgttatatagccttggtgcctttacaacacaaggaacatctggccgcttcacgcctctaaatcggcctctcttttcttgcaaccctgcgccaatctgtctgttccagtaccactactggcaaactctctcatagccttggctttaattcagccctaatttaccgatggaacctccacggcgtgatggactgccgaatctttatagagaatttaagttgtgggtaaaaagtcattccgctgagggtatagatgggaatggaacaatacagccatacgtttcacacgccagtcttgagcaatattttgatgaagaaagaattgcggagtacttaccaaaggacgatactttgaataccacagagatacgcgcccattatcttcgcgtattgtccatcctagcttggatctcaaacgatggggatcatcacactgaacaccttctgtatttcacagacgcggggttcgacgatgatcatctacccttgcctgaccctcgcaagacaggttcacatcctggggtgcatgacccattcccttctgccccccacgaaaaagcggttgccgagaaatttttcgacaatcaatggcgattccttccgctcgtgataatcgacaaaagcaacattaagataaataagagtgggaataaaccagtacctgtaccgcaaataataccagtcacccgtttaggtgaattggattctacgtcaaacaaagccacacgcatcttcaaagttgagccccacctgagtagtggtctaccaccagtacgttagcgtcttttgctctaccaagcaccaggattgacgttgacttccattgtatggcagaatccaattgtctttaaagagtatgaagaatcggaagacgagttccaatttcgacaagagattagagcatataaggttttagacaactgcaaaatccagaaccttgatcgatatgtcttaaagtatttgggttctttcaagcaaggaagtaaatgtgttgtcattgtcgaatatgctctacatggcagtctcttggactttttcaagggatgggatcatcatccacgagacgagcaagaggctcgtagactttggctaggattgggaaatcttcttgacgctcttgaaattactcacgaacagtgtaagggcaagggtatcatccaccaagacatcatgccttcaaacatttttgtctcacttgacgataaacgtcagattcagttcaagctcggagactttggagtgtccagcagtgggctattgtctactaatggcgatgctattgggcaagataatgagggctcgaaaatgtactcggctccggagaattgtcatctctctgaagcaggagccgccccacactcaacggtaacatgggaaattgacatgtggtctctcggctgtgtaatatttgaggcaggggcatggatggccagattcgagcgcggccgactagatttccgtcatgagcgagcacaggcgattcgagaagggtctgcatctcacgcagcgggttatcaaggcgcattccacgatggatttaatcctctaccagtgctgaaatcccaagttgaaaaagttcgagctatggactgggacgtggcccgagtgtctgctatcgtcatggatttcgcactcaaagagatattgatagagaaaagccgccaacgtttgaatgcaagacaggtcaaacctcgcttccacgacctcctcacggaaagcacggcagttccgttctcgcctcgatcgtctctcagaaagtctcgtattacgattcagacagacgagagctcgctgccacagttaaaccgaagctcaacgcttgttacgccatctagaagcaatgcaatattggagatgggtgatagctcaccaactgttagtccaccgttcagacctcaaaatccggatccaaatgacgcctcgagcaactcgttgaacactcaaagtccagctacccacagaccaggattccacaaacagaaaagtaactttcctgagtgcaaggtcagccaagtactcaaatggttggaggacaagacaacagaactacctggaaaggaggcagtacttcagtccataagcgtcaaagatcgtgatcaggtgttcatccttgatacatcggcatccatggaaccgcattgggacgatgtgaagaacacggcagaggctttgatcaatctcgcgaaagtaattgacccgaatggatttgagattttccttaccaacacttctggcagggaccgccatatgaagagtaaagaatgcaacaaactatttgggcgcaccgaatactttagtcgaatcagaccgtcagcggcagctgggccgtgccagatgaaggcggtcctgtggaaaattctgcctcaggtgataaaaaaggcagccccacaaacattcctcaagaaattgcatcaaactattcgtcctattaacggcataaatatctatgtctttaccgacgcagtctgggaagacggcgacggaaggagcacagaccagaaagccgagggcgtggaggacgtcatcaaggatatcgttaagatggtacaaggcattcctcgggcagaaagacttcgtctcaatccagttcatccgttttggcgagaataagagtggtagaaggaaactccgttaccttgataacaaacttaagaaagaggtcgcagaagaatgggacatcgttgaccacgtccaccatactggtagtgtatggaagatgataatcggatccacaagccactgggaagataaagctggtgacgagacatctgactcagacgatgctgagacgatgctcaaggactaggagatttggtcgaggcgtgctgcacttaatcgagcaaagatcttcacaatcaaacggaagtaatcgagtgacgcaagaagtgggaagaccaggccgtctagcacgtttgccgacagcaatcttagggggtgtgggttctgcttgaggcgctttgtgagtgatgtgttttttctatttcttaggcatgactttgggtagaggcagtcatcgggaaatgtcagcatcggagtctggtgaatttatgaaagttacagttataaaagtgcacatttctttgcactctgtatatatgattgtcattatgagtcagggaaatgggcaatacatgcacctgggttgatcacccgaatgttttgggctacggaaaagagtcagcatcagcggcgttagatctggacagcatggcgttctatatagcattgccattcgagggatagcccgcaatctcagaatttcgagactaaaagagtgttcatctgtaaatatatacggtttgcattccatatcaccttgttctcactctccgacaggtagaagctaggttagcgtaaaacatgatgccccg

SEQ ID NO: 15069 - DNA, 1125 bp, Muscodor strobelii
  misc_feature: SGI cDNA ID NO. 564980
  misc_feature: Encodes the peptide sequence at SEQ ID NO 15070
atggcttcagcgccaagcagtcttccagatagctacagcgcgctttacttcgcttctccatcagacattcccgaggtcaaatcgttttccacacctacagtagacaacgggtctgtcctggtcaagccgttgtactcttggattcccggatatctcaatcaagtctacgccaatggcaactcacgccagtacccgactcacttcccactaatagggggcacccatgccgtaggccgcgtcgtagccgtccctcctgatgcggcgaagttgaaagttggcgacctcattgtcgttgatcctgcgattcacccgcgtgacaatcacagcctgatcatgttacaagctctcattgctgctggcgaaatggagccgattgctaaaaaggtctggaactacggaacttgggccgaatttgtaaaggcgcctctggaatctgtacaccgcttcgacgaaggggcattgcagagacaaggtatcacggcacgggaccttgttttctttggacagatgactgtaccctatggcggtctacgcgaagtcaacttaagagccggcgagacagtactcatcacacctgcaacgggcaactttggcggcgcagccgtacatgttgctctggcaatgggtgctcgagtcattgctatgggccgcaatgaaaaggtcttggaaagacttcgagaactagcgcctggccgggttgagaccatcaagcttagcgggagtgtagagacagacgtcgctgcgatctcgaagtttggggccatcgatgtatacctcgacctgacgccgcagactgcttctaacaccgctcatatcaccgctggcatactctccttggccgcaggtgggcgcgtgaacctgatgggtggtgttcagaatgttacgatctctccagtgccgcttcaggccaagggtgtgacgatccgaacgacgatgatgtgtacatggaaacaggaagaggatctagtgaagcttgtagagactggtgtgcttaagttgggcgagcaggctggtctgcaagtcaccgccgcttttgagctcaaagacttcagcgaggcattggatacagcggaaagggagtcttcagctggtcaggctgtggtgttcatgcctaatgtagagtag

SEQ ID NO: 15070 - protein, 374 aa, Muscodor strobelii
  misc_feature: SGI Peptide ID NO. 564980
  misc_feature (36)..(149): Pfam Id: PF08240 Pfam Desc: Alcohol dehydrogenase GroES-like domain
  misc_feature (184)..(327): Pfam Id: PF00107 Pfam Desc: Zinc-binding dehydrogenase
  misc_feature (63)..(103): Pfam Id: PF08240 Pfam Desc: Alcohol dehydrogenase GroES-like domain
  misc_feature (6)..(374): NCBI GI: 261358234 Blast Desc: alcohol dehydrogenase GroES domain-containing protein [Verticillium albo-atrum VaMs.102]
  misc_feature (8)..(368): NCBI GI: 256726237 Blast Desc: NECHADRAFT_81942 [Nectria haematococca mpVI 77-13-4]
  misc_feature (6)..(371): NCBI GI: 156061299 Blast Desc: SS1G_02792 [Sclerotinia sclerotiorum 1980] gi|154700196|gb|EDN99934.1| SS1G_02792 [Sclerotinia sclerotiorum 1980]
  misc_feature (1)..(369): NCBI GI: 154319662 Blast Desc: BC1G_02312 [Botryotinia fuckeliana B05.10] gi|150855970|gb|EDN31162.1| BC1G_02312 [Botryotinia fuckeliana B05.10]
  misc_feature (1)..(371): NCBI GI: 242823919 Blast Desc: quinone oxidoreductase, [Talaromyces stipitatus ATCC 10500] gi|218713077|gb|EED12502.1| quinone oxidoreductase, [Talaromyces stipitatus ATCC 10500]
  misc_feature (8)..(372): NCBI GI: 212544364 Blast Desc: alcohol dehydrogenase, [Penicillium marneffei ATCC 18224] gi|210065305|gb|EEA19399.1| alcohol dehydrogenase, [Penicillium marneffei ATCC 18224]
  misc_feature (7)..(371): NCBI GI: 256728770 Blast Desc: NECHADRAFT_86057 [Nectria haematococca mpVI 77-13-4]
  misc_feature (3)..(371): NCBI GI: 145615352 Blast Desc: MGG_05519 [Magnaporthe grisea 70-15] gi|145022190|gb|EDK06210.1| MGG_05519 [Magnaporthe grisea 70-15]
  misc_feature (8)..(371): NCBI GI: 261198679 Blast Desc: isopropanol dehydrogenase [Ajellomyces dermatitidis SLH14081] gi|239594893|gb|EEQ77474.1| isopropanol dehydrogenase [Ajellomyces dermatitidis SLH14081] gi|239609983|gb|EEQ86970.1|
  misc_feature (7)..(371): NCBI GI: 281211102 Blast Desc: isopropanol dehydrogenase [Polysphondylium pallidum PN500]
MASAPSSLPDSYSALYFASPSDIPEVKSFSTPTVDNGSVLVKPLYSWIPGYLNQVYANGNSRQYPTHFPLIGGTHAVGRVVAVPPDAAKLKVGDLIVVDPAIHPRDNHSLIMLQALIAAGEMEPIAKKVWNYGTWAEFVKAPLESVHRFDEGALQRQGITARDLVFFGQMTVPYGGLREVNLRAGETVLITPATGNFGGAAVHVALAMGARVIAMGRNEKVLERLRELAPGRVETIKLSGSVETDVAAISKFGAIDVYLDLTPQTASNTAHITAGILSLAAGGRVNLMGGVQNVTISPVPLQAKGVTIRTTMMCTWKQEEDLVKLVETGVLKLGEQAGLQVTAAFELKDFSEALDTAERESSAGQAVVFMPNVE

SEQ ID NO: 15071 - DNA, 2980 bp, Muscodor strobelii
  misc_feature: SGI EST ID NO. CUFF.35853.0
  misc_feature: Variant of the nucleotide sequence at SEQ ID NO 15069
aaagagatttatcggtgtgagaacacatctatgatttggaatttctgtggcctcctcccatctctgacgatttcctcctggtccctactcacgataccaaaggccttttctcaataaaacatcctctgattctctcttgtgtgtacagcttcccggacttgctttgcttatcctgtcgtaacgtgttggcctaacgatgaagcctaacatcgtaggagtcgtaacggtaatactgagagtcgatgtccatctggtcgccctcctcctcctcagcagtggcgtcatcgtcatccacctcaatactagagtaccaggggcatatgcgtcaggaaaggtcgcctctgcggaaccctcattgtccgcagtctgcgcctagtaagggacgaaagcttcgcggacagcgatggctttcttcgcgtagagctcctcaattaagtagagattcatgtcagctgcttgtaatatacaaagatcgagttgtttacccttgtcagtgaacttatcgacgattttagtgaaatcgctcgaggcacttcgcagtgtgaaaggcttgttctcgtcctctcccacgatccactttcgtgccatgaaatctgtctccataaaccacatatcgctcagggcgaagtaccgagctgcgataatctgcagcgagagggcatacagaagctcgatgataaacgggcgagtagcactgttatacatacacacctaaacccttgcatcatgtttcattgagcgtgccgaattgcttctgttgaggcaatccgaatgagcgagccactttgtgactggatgaacgatccctgccacgtagtctagtgcaatgagagctttcctcctcggcctatgatgtcaaagcccgatttgtccttcggagacgacctggaattgagttcgcggcagagtcgtaatgaaaggatatcagaacttgcactcctcaattcatttggttgtctagtgtctctcgtctcgcgtcgtgttctttgtcattgagagaatcacggtactgacaattcatgaaaatctaactgaattggatcttcatgcattatgtatgtagagctgatagaaattacgtctgcaggtatagtcgagagccatcgcaacagtgttgattggataatggaggcaacgagtgtgacataagcactatcggaccactgtaaactccgttcggggcaagttccgcggaacctgtgacctcagccgttgtatttaccaatcccatccgcagatcgaaaatgctggttgaatcatcaattttattaaatcataaagttggaagacttggctcctgtcctaaatccaagcaaaatctgttgacatcaggtgcaagctggtgtcgtgggattattcagcgtctctgtacttgagtatgcgcacagtagcgccggagtccctctgggtccgttactgaactcgactgacgaagcagtcttgtatgagaatgctaggattcgaaatgatagaaaaggcacctgaagaaagagaaaatgagagcgatgtcgctacacgctctattctcgtcaccaaccgcttttgcgctgcttgatcaagatattcaaaatggcttcagcgccaagcagtcttccagatagctacagcgcgctttacttcgcttctccatcagacattcccgaggtcaaatcgttttccacacctacagtagacaacgggtctgtcctggtcaagccgttgtactcttggattcccggatatctcaatcaagtctacgccaatggcaactcacgccagtacccgactcacttcccactaatagggggcacccatgccgtaggccgcgtcgtagccgtccctcctgatgcggcgaagttgaaagttggcgacctcattgtcgttgatcctgcgattcacccgcgtgacaatcacagcctgatcatgttacaagctctcattgctgctggcgaaatggagccgattgctaaaaaggtctggaactacggaacttgggccgaatttgtaaaggcgcctctggaatctgtacaccgcttcgacgaaggggcattgcagagacaaggtatcacggcacgggaccttgttttctttggacagatgactgtaccctatggcggtctacgcgaagtcaacttaagagccggcgagacagtactcatcacacctgcaacgggcaactttggcggcgcagccgtacatgttgctctggcaatgggtgctcgagtcattgctatgggccgcaatgaaaaggtcttggaaagacttcgagaactagcgcctggccgggttgagaccatcaagcttagcgggagtgtagagacagacgtcgctgcgatctcgaagtttggggccatcgatgtatacctcgacctgacgccgcagactgcttctaacaccgctcatatcaccgctggcatactctccttggccgcaggtgggcgcgtgaacctgatgggtggtgttcagaatgttacgatctctccagtgccgcttcaggccaagggtgtgacgatccgaacgacgatgatgtgtacatggaaacaggaagaggatctagtgaagcttgtagagactggtgtgcttaagttgggcgagcaggctggtctgcaagtcaccgccgcttttgagctcaaagacttcagcgaggcattggatacagcggaaagggagtcttcagctggtcaggctgtggtgttcatgcctaatgtagagtaggtagttcaaatgtggaaggctctagtcatattacctgaacatgtgaattgaagtcggttctgggcaaatttgccccttcgctatggacttctcagctttgcatttacaatggcgcgcgggcatgaggtcctttactgtggacgacaagcgtgatggctcaaatttcatgctcctttcttcattgtagactgaatgtggcaagacttgatgcgcctttcaaaatcctccgacttcatgaatcacgacgacgtacttgactctgcttcgtagtagtgttcaacgtttc

SEQ ID NO: 15072 - DNA, 2616 bp, Muscodor strobelii
  misc_feature: SGI cDNA ID NO. 564981
  misc_feature: Encodes the peptide sequence at SEQ ID NO 15073
atggtgtccagtgcaacgggcctcatcttggccctgttcttttcaatcggtctgcagtatgtggaagcaagtagcattagcaatgacagcggcgctgcaacacctggtcgagagcgcaccagtctcaatgcgaattggcgattttcgcgtttcacgacgaacccggactccttatcctatagcacactgaagtcatggctcctaccttctggcaatgacttcatcgctggtgcaaagcacgcagtaccttcaggaactccaccggggagcaatgtggactacgtgaaatccactttcaacgatgcctcatgggaaaccctgaatttgccgcatgactgggcaattaaaggacctttcaacgctcctggcatcaacggcggtatgggtcgtttaccatcaaacggagtgggctggtatcgccgcaatgtaacaatggtggaggctgacgttggaaaaactatcttcttggatattgacggagcaatgtcctatgcggcagtatggctgaatggtaatttggttggaggctggccgtacggctatgcatcgttccgccttgatatcacaccataccttaaggtgggcgaaggaaacttgcttgcaatccgtttggacaatgcgctcgactcgtcgcgctggtacccaggggctggcatataccgaaatgtctggcttgtcaaggtggatccggtgcatgtagggcaaacgggcacatacatcacgacgccaaaagtgtctgctcagtctgcaaccattaatttggttgttgacgttgagaacaaaggcaacgcgacctcgtcagttggcgtatcaacaagtattcatattctcgacgctgcaagtgggaaagcaggtgctgagaccattgcaacgtttcctccagccactgtttccgttcctgctaaggcgaaacagtctaccaatgcctccactaccgtaaccaacccgctcttgtggggaccaccgcctgctcaaaagccaaatatgtacgttgcagtgacgaccttaacagttgataatgtcacagtcgatacatacgagacgaacttcggcatccgcaacgtcgtgctagatgccaataagggtgtcatcatcaacgatcagaatgttcgtgttcaagggacaaataaccacggcgatcatggctctttggggaccgcatttaataccagggccgctgagaggcagctccagatcttgcaagagatgggttgcaatgccctccgaatgtcgcataatccacccgctccggaactgctcgatctagctgaccggatgggctttctggtcatggacgaaatattcgatacatggagcacaggaaagactaccaatgattttcacatcatctttgacgattggaaggagccagatctgcgatctttccttcaccgtgaccgtaatcacccttcggtgatcgcgtggagcatcggcaatgagatcgggcagcagactagcagtaatggtgggacattggcaaagacgttgctggatatagttcatgccgaagatacacggctaggaaccgcatcaatgaactcggcttcagctagcagctcctttgccaacgctttggatatcatcagcttgaactaccagggcgaaggattgggcacctcgacgtcgggctctttctcgagttttcactccaaatttccgaataagttgatatggacctcagagagttcatctgccatcagctcgaggggaagctacatgttccccgtaacaagcgctaatagtgcgactgtaggcgacaactccggtggagactccaagaatctcagggttagcgactatggactatatgctgtatcatggggttcgtcccctgataaggtttttgcagcgcaagataaggccccctatgtggctggagagtttgtgtggactggctgggattatatcggcgaacccacgccgtatgattcagctcgcagttcgtatttcggtatgatcgatctggctggctttaagaaggaccgcttttttatctaccaggctcgttggcgccccgacattccaatggcccacatcctcccgcattggacatggcccgacagagcaggacaggttactcccgttcatgtgttttcgtccggcgacgaagcagaactttttgtgaatggggtctcagcaggtcgagtaaagaaagcggattacacctaccgctttcgatgggacaaagttacctaccagcccggagatcttcgggtagttacttacaagaacggcacacagtgggcaactgacacgaagacaaccgcaggcagcgcggctatgttgaatgcgaccgccgaccgtactaccatcaacggcgacggttatgatctatcattcataaccgtggcagtaactgacaagaacggtacaatagtaccaactgccaacaactcgattaccttttctatttcaggaccaggacagattgtgtcgactgacaacggggatcctgctgacatgactgtcttcccgtctcttactcgaaaagcattcaacggtctcgcgctcgccgttgttcgtactacccctggcgcgtcggggcagataacagtccaagccgccgcgactggactcactgggggagaggtcaagctgcagactcagggtagttaa

SEQ ID NO: 15073 - protein, 871 aa, Muscodor strobelii
  misc_feature: SGI Peptide ID NO. 564981
  misc_feature (355)..(675): Pfam Id: PF02836 Pfam Desc: Glycosyl hydrolases family 2, TIM barrel domain
  misc_feature (36)..(229): Pfam Id: PF02837 Pfam Desc: Glycosyl hydrolases family 2, sugar binding domain
  misc_feature (355)..(434): Pfam Id: PF02836 Pfam Desc: Glycosyl hydrolases family 2, TIM barrel domain
  misc_feature (459)..(480): Pfam Id: PF02836 Pfam Desc: Glycosyl hydrolases family 2, TIM barrel domain
  misc_feature (38)..(867): NCBI GI: 116201005 Blast Desc: CHGG_08387 [Chaetomium globosum CBS 148.51] gi|88176905|gb|EAQ84373.1| CHGG_08387 [Chaetomium globosum CBS 148.51]
  misc_feature (7)..(866): NCBI GI: 169626176 Blast Desc: SNOG_16366 [Phaeosphaeria nodorum SN15] gi|111055071|gb|EAT76191.1| SNOG_16366 [Phaeosphaeria nodorum SN15]
  misc_feature (1)..(868): NCBI GI: 189201045 Blast Desc: beta-galactosidase [Pyrenophora tritici-repentis Pt-1C-BFP] gi|187983958|gb|EDU49446.1| beta-galactosidase [Pyrenophora tritici-repentis Pt-1C-BFP]
  misc_feature (1)..(869): NCBI GI: 169622643 Blast Desc: SNOG_14548 [Phaeosphaeria nodorum SN15] gi|160704818|gb|EAT78088.2| SNOG_14548 [Phaeosphaeria nodorum SN15]
  misc_feature (37)..(869): NCBI GI: 171688178 Blast Desc: protein product [Podospora anserina] gi|170944051|emb|CAP70161.1| protein product [Podospora anserina]
  misc_feature (22)..(868): NCBI GI: 284036634 Blast Desc: glycoside hydrolase family 2 sugar binding protein [Spirosoma linguale DSM 74] gi|283815927|gb|ADB37765.1| glycoside hydrolase family 2 sugar binding protein [Spirosoma linguale DSM
  misc_feature (7)..(864): NCBI GI: 256720338 Blast Desc: NECHADRAFT_56078 [Nectria haematococca mpVI 77-13-4]
  misc_feature (36)..(869): NCBI GI: 241774332 Blast Desc: glycoside hydrolase family 2 sugar binding [Asticcacaulis excentricus CB 48] gi|241213150|gb|EER49158.1| glycoside hydrolase family 2 sugar binding [Asticcacaulis CB 48]
  misc_feature (26)..(869): NCBI GI: 78049912 Blast Desc: beta-galactosidase [Xanthomonas campestris pv. vesicatoria str. 85-10] gi|78038342|emb|CAJ26087.1| beta-galactosidase [Xanthomonas campestris pv. vesicatoria str.
  misc_feature (37)..(866): NCBI GI: 188993723 Blast Desc: beta-galactosidase [Xanthomonas campestris pv. campestris str. B100] gi|167735483|emb|CAP53698.1| beta-galactosidase [Xanthomonas campestris pv. campestris]
  misc_feature (93)..(811): SWISSPROT Homolog: EC 3.2.1.23 Beta-galactosidase
MVSSATGLILALFFSIGLQYVEASSISNDSGAATPGRERTSLNANWRFSRFTTNPDSLSYSTLKSWLLPSGNDFIAGAKHAVPSGTPPGSNVDYVKSTFNDASWETLNLPHDWAIKGPFNAPGINGGMGRLPSNGVGWYRRNVTMVEADVGKTIFLDIDGAMSYAAVWLNGNLVGGWPYGYASFRLDITPYLKVGEGNLLAIRLDNALDSSRWYPGAGIYRNVWLVKVDPVHVGQTGTYITTPKVSAQSATINLVVDVENKGNATSSVGVSTSIHILDAASGKAGAETIATFPPATVSVPAKAKQSTNASTTVTNPLLWGPPPAQKPNMYVAVTTLTVDNVTVDTYETNFGIRNVVLDANKGVIINDQNVRVQGTNNHGDHGSLGTAFNTRAAERQLQILQEMGCNALRMSHNPPAPELLDLADRMGFLVMDEIFDTWSTGKTTNDFHIIFDDWKEPDLRSFLHRDRNHPSVIAWSIGNEIGQQTSSNGGTLAKTLLDIVHAEDTRLGTASMNSASASSSFANALDIISLNYQGEGLGTSTSGSFSSFHSKFPNKLIWTSESSSAISSRGSYMFPVTSANSATVGDNSGGDSKNLRVSDYGLYAVSWGSSPDKVFAAQDKAPYVAGEFVWTGWDYIGEPTPYDSARSSYFGMIDLAGFKKDRFFIYQARWRPDIPMAHILPHWTWPDRAGQVTPVHVFSSGDEAELFVNGVSAGRVKKADYTYRFRWDKVTYQPGDLRVVTYKNGTQWATDTKTTAGSAAMLNATADRTTINGDGYDLSFITVAVTDKNGTIVPTANNSITFSISGPGQIVSTDNGDPADMTVFPSLTRKAFNGLALAVVRTTPGASGQITVQAAATGLTGGEVKLQTQGS

SEQ ID NO: 15074 - DNA, 3016 bp, Muscodor strobelii
  misc_feature: SGI EST ID NO. CUFF.35857.0
  misc_feature: Variant of the nucleotide sequence at SEQ ID NO 15072
gcttgccaccggaatcatttgtttcggaacggagcaggacacaactgaccggacatggcgcgcacatgaatgtcccacaggtactcacactgtccaaatgtaggattacttgaaacaaaatgttctcttgcgcgcggatggtgtccagtgcaacgggcctcatcttggccctgttcttttcaatcggtctgcagtatgtggaagcaagtagcattagcaatgacagcggcgctgcaacacctggtcgagagcgcaccagtctcaatgcgaattggcgattttcgcgtttcacgacgaacccggactccttatcctatagcacactgaagtcatggctcctaccttctggcaatgacttcatcgctggtgcaaagcacgcagtaccttcaggaactccaccggggagcaatgtggactacgtgaaatccactttcaacgatgcctcatgggaaaccctgaatttgccgcatgactgggcaattaaaggacctttcaacgctcctggcatcaacggcggtatgggtcgtttaccatcaaacggagtgggctggtatcgccgcaatgtaacaatggtggaggctgacgttggaaaaactatcttcttggatattgacggagcaatgtcctatgcggcagtatggctgaatggtaatttggttggaggctggccgtacggctatgcatcgttccgccttgatatcacaccataccttaaggtgggcgaaggaaacttgcttgcaatccgtttggacaatgcgctcgactcgtcgcgctggtacccaggggctggcatataccgaaatgtctggcttgtcaaggtggatccggtgcatgtagggcaaacgggcacatacatcacgacgccaaaagtgtctgctcagtctgcaaccattaatttggttgttgacgttgagaacaaaggcaacgcgacctcgtcagttggcgtatcaacaagtattcatattctcgacgctgcaagtgggaaagcaggtgctgagaccattgcaacgtttcctccagccactgtttccgttcctgctaaggcgaaacagtctaccaatgcctccactaccgtaaccaacccgctcttgtggggaccaccgcctgctcaaaagccaaatatgtacgttgcagtgacgaccttaacagttgataatgtcacagtcgatacatacgagacgaacttcggcatccgcaacgtcgtgctagatgccaataagggtgtcatcatcaacgatcagaatgttcgtgttcaagggacaaataaccacggcgatcatggctctttggggaccgcatttaataccagggccgctgagaggcagctccagatcttgcaagagatgggttgcaatgccctccgaatgtcgcataatccacccgctccggaactgctcgatctagctgaccggatgggctttctggtcatggacgaaatattcgatacatggagcacaggaaagactaccaatgattttcacatcatctttgacgattggaaggagccagatctgcgatctttccttcaccgtgaccgtaatcacccttcggtgatcgcgtggagcatcggcaatgagatcgggcagcagactagcagtaatggtgggacattggcaaagacgttgctggatatagttcatgccgaagatacacggctaggaaccgcatcaatgaactcggcttcagctagcagctcctttgccaacgctttggatatcatcagcttgaactaccagggcgaaggattgggcacctcgacgtcgggctctttctcgagttttcactccaaatttccgaataagttgatatggacctcagagagttcatctgccatcagctcgaggggaagctacatgttccccgtaacaagcgctaatagtgcgactgtaggcgacaactccggtggagactccaagaatctcagggttagcgactatggactatatgctgtatcatggggttcgtcccctgataaggtttttgcagcgcaagataaggccccctatgtggctggagagtttgtgtggactggctgggattatatcggcgaacccacgccgtatgattcagctcgcagttcgtatttcggtatgatcgatctggctggctttaagaaggaccgcttttttatctaccaggctcgttggcgccccgacattccaatggcccacatcctcccgcattggacatggcccgacagagcaggacaggttactcccgttcatgtgttttcgtccggcgacgaagcagaactttttgtgaatggggtctcagcaggtcgagtaaagaaagcggattacacctaccgctttcgatgggacaaagttacctaccagcccggagatcttcgggtagttacttacaagaacggcacacagtgggcaactgacacgaagacaaccgcaggcagcgcggctatgttgaatgcgaccgccgaccgtactaccatcaacggcgacggttatgatctatcattcataaccgtggcagtaactgacaagaacggtacaatagtaccaactgccaacaactcgattaccttttctatttcaggaccaggacagattgtgtcgactgacaacggggatcctgctgacatgactgtcttcccgtctcttactcgaaaagcattcaacggtctcgcgctcgccgttgttcgtactacccctggcgcgtcggggcagataacagtccaagccgccgcgactggactcactgggggagaggtcaagctgcagactcagggtagttaactactatgtattctgtgaataattcacgctccctactctcgcttcgaaggaagtgtgaaggaaccctttcgtctattatgtgtcatttccttcctcagacgagtcgcagaaagggccttattctgcgacgatgactcaacgagtgccgattggggtgggcatgacttctatatacatataagaaattattgatcttctcataccataaagaggccaatgcgggtcaaatctatgtaactgagatgcagccgcgaaacttggca

SEQ ID NO: 15075 - DNA, 1569 bp, Muscodor strobelii
  misc_feature: SGI cDNA ID NO. 564982
  misc_feature: Encodes the peptide sequence at SEQ ID NO 15076
atgcctgtcgcggctgattcggatttgtccagcactaatctgtccgtaattcacgatggtagcttcgcgtatacagcaacgaaagctgggaacgggtcgaaagcagcctatcaggaagcgaacggggcaccggtagagtcccaatcgccgctgggctatcacgtcggctgggttggggtgatcttcttaaacgtcaaccagatgatcggcactggtatattttctacgcctgggactattttgaacagaaccggctctatcggcctagcactcttctattgggtcattggcatactaggtgctatcgccggtttctccatgtacctcgagtatgcgagttactttccgaatcgctccgggtctgaggttgtctacctggagcaggccttcccaagacccaagcacttctttccgatagcctttgcggtatacacggtgctgctctcattcgctgcgagtaacgcgattgatttatgggctcttgctgaggtgaggccaacggagtggcaggaaaagggtgttgcggtggcagcctatacggtcgctgtagtttttgtcttgatcaacacgaggttcagcctatgggctatcaacttcatcggggccctcaaagtcatcacgctagttttcattagcataactggcttcgttgtgctaggtggccacgtctccagggtggccgatccaggagccaactttcgcaatgctttcgagggaacaacgacgagtgggtatgatctgtccgtcgccatcgtcaatatcatcttcgcatatacaggctaccagaacgcgttttctctcgtaaatgagatcaaggacccgattcccactctgaaaagaaatgggaccatctcggttgctattgtatcggtactctatattctgtgcaatgtcgcgtatttctctgcagtgccaaaagaggaattcgctcgagccaagacaaccgccgcatcggttttcttcggcgccgtattcggtactggcggtgctcagaaagcattgaacttcttagtcctactaagcgctttcggaaatttgctggcggtgctgatcggacagtcgagattgattcgtgagatgggatctttcacctgtcgctgttcgttggactctacatggtccgccatcgacacaagcggctcaaccgaggacgacctgagtttcgagcgtggcatattccgctggtatattatggccttttacagctctacactctcgcaacaccgtggatcactcccaagggggggaccatatgcaggagaagtcagcttctggtatgcgacatacgttgtggtaggcctcgcggtaattgccctttgcggcctatactacattgtctggatgtacattttgccaaaatggggcaagtacgaactgcgaccagagacaaccgtgataggagataacggggccacaacgcatcgcctgatcaaggtaccgctgaatgaattgtccgcgtgggacgacgagcacgacgaagcgggtcagatccggcagacgcacggcatcaggcagtcatcgggatcttccgctgatggagaggtcgaggttgcagaagaaaagaactag

SEQ ID NO: 15076 - protein, 522 aa, Muscodor strobelii
  misc_feature: SGI Peptide ID NO. 564982
  misc_feature (10)..(512): NCBI GI: 261353144 Blast Desc: high-affinity methionine permease [Verticillium albo-atrum VaMs.102]
  misc_feature (3)..(496): NCBI GI: 169622826 Blast Desc: SNOG_14637 [Phaeosphaeria nodorum SN15] gi|111056709|gb|EAT77829.1| SNOG_14637 [Phaeosphaeria nodorum SN15]
  misc_feature (10)..(361): NCBI GI: 39977427 Blast Desc: MGG_06616 [Magnaporthe grisea 70-15] gi|145015936|gb|EDK00426.1| MGG_06616 [Magnaporthe grisea 70-15]
  misc_feature (4)..(361): NCBI GI: 256728145 Blast Desc: NECHADRAFT_54243 [Nectria haematococca mpVI 77-13-4]
  misc_feature (3)..(361): NCBI GI: 256722465 Blast Desc: NECHADRAFT_34938 [Nectria haematococca mpVI 77-13-4]
  misc_feature (17)..(513): NCBI GI: 85092912 Blast Desc: NCU02195 [Neurospora crassa OR74A] gi|28921032|gb|EAA30353.1| NCU02195 [Neurospora crassa OR74A]
  misc_feature (15)..(360): NCBI GI: 46105066 Blast Desc: FG00161.1 [Gibberella zeae PH-1]
  misc_feature (63)..(499): NCBI GI: 259479579 Blast Desc: TPA: methionine transporter (Eurofung) [Aspergillus nidulans FGSC A4]
  misc_feature (7)..(499): NCBI GI: 115395836 Blast Desc: conserved [Aspergillus terreus NIH2624] gi|114193126|gb|EAU34826.1| conserved [Aspergillus terreus NIH2624]
  misc_feature (2)..(361): NCBI GI: 121709691 Blast Desc: high affinity methionine permease [Aspergillus clavatus NRRL 1] gi|119400640|gb|EAW11065.1| high affinity methionine permease [Aspergillus clavatus NRRL 1]
MPVAADSDLSSTNLSVIHDGSFAYTATKAGNGSKAAYQEANGAPVESQSPLGYHVGWVGVIFLNVNQMIGTGIFSTPGTILNRTGSIGLALFYWVIGILGAIAGFSMYLEYASYFPNRSGSEVVYLEQAFPRPKHFFPIAFAVYTVLLSFAASNAIDLWALAEVRPTEWQEKGVAVAAYTVAVVFVLINTRFSLWAINFIGALKVITLVFISITGFVVLGGHVSRVADPGANFRNAFEGTTTSGYDLSVAIVNIIFAYTGYQNAFSLVNEIKDPIPTLKRNGTISVAIVSVLYILCNVAYFSAVPKEEFARAKTTAASVFFGAVFGTGGAQKALNFLVLLSAFGNLLAVLIGQSRLIREMGSFTCRCSLDSTWSAIDTSGSTEDDLSFERGIFRWYIMAFYSSTLSQHRGSLPRGGPYAGEVSFWYATYVVVGLAVIALCGLYYIVWMYILPKWGKYELRPETTVIGDNGATTHRLIKVPLNELSAWDDEHDEAGQIRQTHGIRQSSGSSADGEVEVAEEKN

SEQ ID NO: 15077 - DNA, 843 bp, Muscodor strobelii
  misc_feature: SGI EST ID NO. CUFF.35863.1
  misc_feature: Variant of the nucleotide sequence at SEQ ID NO 15075
ctcgcggtaattgccctttgcggcctatactacattgtctggatgtacattttgccaaaatggggcaagtacgaactgcgaccagagacaaccgtgataggagataacggggccacaacgcatcgcctgatcaaggtaccgctgaatgaattgtccgcgtgggacgacgagcacgacgaagcgggtcagatccggcagacgcacggcatcaggcagtcatcgggatcttccgctgatggagaggtcgaggttgcagaagaaaagaactagaacaacctgagtaaggactcgtttgacagcaatcacatcccttgtgatgatgctcaatatagccgtggtcttgattggctgattatctatgcatctaaaacgaaaaccatgggactattccctgtgtaaaacgcccggtagacaccggtgaagctggtacgcagtgacatcccatagataaggataagatgagcctggttccgcatctagttatgcggtggtactattaatgtaatcgtgagctatgcagagcgcgcttcgtagtcaacgaataagtattcaccttcgttctccctctacttgagagtctgtgggcaataacccatgctgcaatcaaatttagcactttaacatcgtgatatttgcatcacctgtcgttggctctgatttactggggctcatctcgtagtgtcgacatcaagagggtatggaaacataagtccagattcgactgaatagacgaggctcaattcaatcggataaacgagcttgaaattgaccagatcgtttcgacgccaaaggtgctatatgcaagcccgacttccagcagctcatgatagaagtcacttctgc

SEQ ID NO: 15078 - DNA, 381 bp, Muscodor strobelii
  misc_feature: SGI cDNA ID NO. 564983
  misc_feature: Encodes the peptide sequence at SEQ ID NO 15079
atgtcatcaaagtcaagcaatagcattaagccctccacgctcagcaattctgtgctgggtggtatcaacttcatcgccaccggtcgcatccttctaggggccgtcccagacgatctcatcctcgtagcaagactactcgggatccgcgatttcatgcttggcgtattgttacggaccgctcgaactgatgaccctaccccgttgggtcgctcggagcttcggcgggcactcacggcgggagtctttgctgatacagcggactttgtggccacgcttgtcgctttcgcgactggaaactatgacctgaagaatacagttatcttcttcggtctagtgacgcctttcattggttcggggatacttggattatcttctctttag

SEQ ID NO: 15079 - protein, 126 aa, Muscodor strobelii
  misc_feature: SGI Peptide ID NO. 564983
MSSKSSNSIKPSTLSNSVLGGINFIATGRILLGAVPDDLILVARLLGIRDFMLGVLLRTARTDDPTPLGRSELRRALTAGVFADTADFVATLVAFATGNYDLKNTVIFFGLVTPFIGSGILGLSSL

SEQ ID NO: 15080 - DNA, 1887 bp, Muscodor strobelii
  misc_feature: SGI cDNA ID NO. 564984
  misc_feature: Encodes the peptide sequence at SEQ ID NO 15081
atgggctctctctctgttgcaagttatcttccccaacttactgacttaacacttgatccacttggccaacgaccagtcacctatggaggtcaaaattttacgcattgctgtcttgttgctctgaatcagtcgctcgtcatacgcgaggggaacctgagcttcgcagatcagtctttcgtaggacctggaatctctatagaggatcttgaatacgcggcacaaaatgagcaatttccctgcggtgcccagtactcaggagatctgagtggtgcgccccttgtcagcgttactttcaactggtgcaacaaacagtgccccggatgggagatttctcacttcggggcactaaaacagtggatcgggcctctcgtccaattcataatacctagcttagcgttctgtacaaacgtgcctcgaaccagaaagctcggtataccagatattgtattcaaaggacatcctcggacgctcgtgggcctctgcacctactggattcggcttttaggtgccttgattctcatgcttctagacaccgtgttctggctctctatctgcttcgcattcgcaggacccatgctcttgagcgctgtctatgagtatgcactggatcggaaggtgctcgagtttctgtccccgccgagtggccagccacctcgaattccaatgaagctccgagcgcagctattgcttgcggttgttgcaggtaacattcgcatggcgatgcgagaaagatcgaattcaatttccagtactcagtctcataacagcgtcaacgaagacaccaagaacacgcaggccgaaatgtcgcatcggctcgttcacaacagtatctggaaaagggtcatgacgatggtcgacgactacgaggaagcccgtctgagaagccgacaacagattgtgtcactacccatcaagctcaaagctttactgaactcacaagcgagttttggttcgacaatcggagcacccattttatttttcgttggcagtttcatttacactgtcatagacagcgacaacaatcttggcgacaatgacacatcgcacgccctcgcattcggcatgtggtggatggtgatcccatacttagcgataattgcctgtgcaatgctcgctgccaacagtcccagcgtgctagatgcggtggtctacgacggatccgatatagcagtgccaagcaactatcaaatgggcttcttttcatcacagttgcagcgggctaaaagtagctgcaagctcctcagagtgatcatcagtcaaatcgaaggttacagtccagtcgagacagctttcgaaggccgcttccgaaccgtgcagctctggaaccgtggactgaataaaagacaatgggtgcaagaagcaattaacgactatgaatcatcagctgatgccgaacaccctgccaggggcatcgaacccaagatatgtcgcagcctgacttaccttgtttatggcatcagtcagctctgcgagatgattctgtgggctatcgctgcacgactccgaatatcatatggtaatcgctggtttgagactaatcctccagcgaagcgaatatgttggcacggccaagtcttcgttggcttctttgccatcttcgcaagtgttggtggtacaatgctgcagctgctgggagcatatcgcacctgcctttgccaagtaccggcaacgtactggcgcaacctaagcagtcccgacgcctacttcccgttaagcagcaacagcagggaagatattcaggccgcgcagcaatggtggacggccactggaagcgttgccgttggtctcatcagtatcgtgtgtgcgttagcttggtggcatcagcggcgcttgaggagggtcttcaggagcgaggcggacaaactagaattcgatgagatttactga

SEQ ID NO: 15081 - protein, 628 aa, Muscodor strobelii
  misc_feature: SGI Peptide ID NO. 564984
  misc_feature (80)..(454): NCBI GI: 85090492 Blast Desc: NCU09296 [Neurospora crassa OR74A] gi|28919806|gb|EAA29206.1| NCU09296 [Neurospora crassa OR74A]
  misc_feature (293)..(459): NCBI GI: 116178956 Blast Desc: [Chaetomium globosum CBS 148.51] gi|88184403|gb|EAQ91871.1| [Chaetomium globosum CBS 148.51]
  misc_feature (529)..(613): NCBI GI: 85090492 Blast Desc: NCU09296 [Neurospora crassa OR74A] gi|28919806|gb|EAA29206.1| NCU09296 [Neurospora crassa OR74A]
MGSLSVASYLPQLTDLTLDPLGQRPVTYGGQNFTHCCLVALNQSLVIREGNLSFADQSFVGPGISIEDLEYAAQNEQFPCGAQYSGDLSGAPLVSVTFNWCNKQCPGWEISHFGALKQWIGPLVQFIIPSLAFCTNVPRTRKLGIPDIVFKGHPRTLVGLCTYWIRLLGALILMLLDTVFWLSICFAFAGPMLLSAVYEYALDRKVLEFLSPPSGQPPRIPMKLRAQLLLAVVAGNIRMAMRERSNSISSTQSHNSVNEDTKNTQAEMSHRLVHNSIWKRVMTMVDDYEEARLRSRQQIVSLPIKLKALLNSQASFGSTIGAPILFFVGSFIYTVIDSDNNLGDNDTSHALAFGMWWMVIPYLAIIACAMLAANSPSVLDAVVYDGSDIAVPSNYQMGFFSSQLQRAKSSCKLLRVIISQIEGYSPVETAFEGRFRTVQLWNRGLNKRQWVQEAINDYESSADAEHPARGIEPKICRSLTYLVYGISQLCEMILWAIAARLRISYGNRWFETNPPAKRICWHGQVFVGFFAIFASVGGTMLQLLGAYRTCLCQVPATYWRNLSSPDAYFPLSSNSREDIQAAQQWWTATGSVAVGLISIVCALAWWHQRRLRRVFRSEADKLEFDEIY

SEQ ID NO: 15082 - DNA, 993 bp, Muscodor strobelii
  misc_feature: SGI cDNA ID NO. 564985
  misc_feature: Encodes the peptide sequence at SEQ ID NO 15083
atggaatcaatcaagtcacctcgcgaaacgctaatcccccatatcacaacggacgaagccgcagcgttagcttacccgccaaacgccctgcccggcgcccgcgatgtgaagactttctacggaaccatgcgcgtctatgagtggggcccagaagacggcgataaggtcttgtttgtccacggagacgccacaccgtgtctcatctttgccgacattgcccagactctcgtcgatgccggccatcgcgtcatgctctttgatcctcctggctctagtctcctccccgctatcatgggaagcgacaactccttctccatcgttgccttctcgcttggcggccccatatccctcactttcaccgctgccttcccggacgctgtgcggtcgctagtgcttctaggccccgcgggtctagttcgaaaaccaccagcgggctatgatgacgaagtaatgcaacacccgtatcgtgcttcatcggagacatctattcgggacaaggttcgggagatcttaggagtcgatgcaactgttgcaccactgacgggaacggatgcatcttcgggtggtcagcgggtcctcgtgcttccatcaagggtggagaggaagttcgatatgggagccatctcccaatttcaatttacttatcatcaaggccacgtatactcgtttcaaaataccgttcagtatagaccgctgcagcataaagaaaggctatggggaaccatttgcgacatcatcgccggcaaatctgagattgggttcccgctacatgattctaggctgctcgtcttcttcggcgaggatgacaacgtcgtagtgggcacggagactactgaggatatccttaagctacttccatctgagcgacttcaggttgagtatctgccaggaggacatggatttccttatcctaacagtgcgagcattgccgacaagatccttgccttctggtccaaatccgaactggtttcaagcgcagtaataaagtcatga

SEQ ID NO: 15083 - protein, 330 aa, Muscodor strobelii
  misc_feature: SGI Peptide ID NO. 564985
  misc_feature (106)..(157): Pfam Id: PF00561 Pfam Desc: alpha/beta hydrolase fold
  misc_feature (4)..(319): NCBI GI: 171683891 Blast Desc: protein product [Podospora anserina] gi|170941906|emb|CAP67558.1| protein product [Podospora anserina]
  misc_feature (4)..(323): NCBI GI: 189202964 Blast Desc: conserved [Pyrenophora tritici-repentis Pt-1C-BFP] gi|187984917|gb|EDU50405.1| conserved [Pyrenophora tritici-repentis Pt-1C-BFP]
  misc_feature (4)..(321): NCBI GI: 145610141 Blast Desc: MGG_12616 [Magnaporthe grisea 70-15] gi|145017511|gb|EDK01874.1| MGG_12616 [Magnaporthe grisea 70-15]
  misc_feature (4)..(317): NCBI GI: 212540580 Blast Desc: alpha/beta hydrolase family protein, [Penicillium marneffei ATCC 18224] gi|210067744|gb|EEA21836.1| alpha/beta hydrolase family protein, [Penicillium marneffei ATCC 18224]
  misc_feature (4)..(320): NCBI GI: 85113693 Blast Desc: NCU03158 [Neurospora crassa OR74A] gi|28926351|gb|EAA35328.1| conserved [Neurospora crassa OR74A]
  misc_feature (26)..(317): NCBI GI: 242801483 Blast Desc: alpha/beta hydrolase family protein, [Talaromyces stipitatus ATCC 10500] gi|218717122|gb|EED16543.1| alpha/beta hydrolase family protein, [Talaromyces stipitatus ATCC 10500]
  misc_feature (4)..(314): NCBI GI: 169763964 Blast Desc: [Aspergillus oryzae RIB40] gi|238489941|ref|XP_002376208.1| alpha/beta hydrolase family protein, [Aspergillus flavus NRRL3357] protein product oryzae]
  misc_feature (16)..(317): NCBI GI: 46125009 Blast Desc: FG06882.1 [Gibberella zeae PH-1]
  misc_feature (18)..(317): NCBI GI: 256733126 Blast Desc: NECHADRAFT_68433 [Nectria haematococca mpVI 77-13-4]
  misc_feature (6)..(314): NCBI GI: 255943001 Blast Desc: Pc18g04340 [Penicillium chrysogenum Wisconsin 54-1255] gi|211587002|emb|CAP94658.1| Pc18g04340 [Penicillium chrysogenum Wisconsin 54-1255]
MESIKSPRETLIPHITTDEAAALAYPPNALPGARDVKTFYGTMRVYEWGPEDGDKVLFVHGDATPCLIFADIAQTLVDAGHRVMLFDPPGSSLLPAIMGSDNSFSIVAFSLGGPISLTFTAAFPDAVRSLVLLGPAGLVRKPPAGYDDEVMQHPYRASSETSIRDKVREILGVDATVAPLTGTDASSGGQRVLVLPSRVERKFDMGAISQFQFTYHQGHVYSFQNTVQYRPLQHKERLWGTICDIIAGKSEIGFPLHDSRLLVFFGEDDNVVVGTETTEDILKLLPSERLQVEYLPGGHGFPYPNSASIADKILAFWSKSELVSSAVIKS

SEQ ID NO: 15084 - DNA, 441 bp, Muscodor strobelii
  misc_feature: SGI cDNA ID NO. 564986
  misc_feature: Encodes the peptide sequence at SEQ ID NO 15085
atgaaggaattggacggcagtctcctgtacgcactgtcgattaaaatcatctccgcccgttactttggccagtccgacatctgggtcgcccagggcgattttatcaccagacgaggtttcatcactcagtccgaggtcaaacgctaccagtggttgtctcaggaaacccgcctgactcttgataagctatatgttacttctaaaaccgacgtgcgtgagacatttgtcccgtactggagccagactgccgacaacgaaggctcggctgcggccacgtttggtgacggctacgttcccggcccctgcctcaccgggaacgagcctgatccacgcgagccgcagcccggtgacggagagcctcgcgacgaccgcgccgattccctggataaggacgccacgacgtcggatgaagacgatgatgtcgagttcattctccagtga

SEQ ID NO: 15085 - protein, 146 aa, Muscodor strobelii
  misc_feature: SGI Peptide ID NO. 564986
MKELDGSLLYALSIKIISARYFGQSDIWVAQGDFITRRGFITQSEVKRYQWLSQETRLTLDKLYVTSKTDVRETFVPYWSQTADNEGSAAATFGDGYVPGPCLTGNEPDPREPQPGDGEPRDDRADSLDKDATTSDEDDDVEFILQ

SEQ ID NO: 15086 - DNA, 696 bp, Muscodor strobelii
  misc_feature: SGI cDNA ID NO. 564987
  misc_feature: Encodes the peptide sequence at SEQ ID NO 15087
atgaagactctgggcttgctgggcggcatgagctgggagtcgaccgtgacctactaccaagatatcaatcgtcgagtacgcgaagtaaaaggcggcctacattcggcccaatgcgtattattctccttcgacttcgccaagattgaggagttacaacatgccggcaagtgggacgacgctggtgcgcttctcgacgatgcggccgccaagctcaagcttgcgggggctgacgcgattgtactctgcaccaatacaatgcactttgtctcccaaaacatcgagaaagtttcgcagctgcctctcatccatattgttgaccccaccgccgataggatattgaaagccgggtacaagtccgttggcttgttagggacgcgattcacgatggagaaggagttttatcgggcgcgactcgcgactgagtttggcttgcgcgctatcgtgcccgaggaagaaggccgcgacgttgtgcacagaatcatttatgatgagttggttcagggcgtcatatcggaggcttcccgacggagctatatccgagtcattgaggatctcgccaaagcaggtgccgagtgtctcattcttggttgcacggaaatcgggctcttgatcaatacggacgttagtccactgccgatctttgatacagcgcagattcatgctattgcttctgccgattgggctatgacagattga

SEQ ID NO: 15087 - protein, 231 aa, Muscodor strobelii
  misc_feature: SGI Peptide ID NO. 564987
  misc_feature (3)..(229): Pfam Id: PF01177 Pfam Desc: Asp/Glu/Hydantoin racemase
  misc_feature (1)..(229): NCBI GI: 256731149 Blast Desc: NECHADRAFT_85108 [Nectria haematococca mpVI 77-13-4]
  misc_feature (1)..(229): NCBI GI: 238763870 Blast Desc: Aspartate racemase [Yersinia kristensenii ATCC 33638] gi|238697838|gb|EEP90598.1| Aspartate racemase [Yersinia kristensenii ATCC 33638]
  misc_feature (1)..(230): NCBI GI: 238791924 Blast Desc: Aspartate racemase [Yersinia intermedia ATCC 29909] gi|238728555|gb|EEQ20073.1| Aspartate racemase [Yersinia intermedia ATCC 29909]
  misc_feature (1)..(229): NCBI GI: 89902487 Blast Desc: aspartate racemase [Rhodoferax ferrireducens T118] gi|89347224|gb|ABD71427.1| Aspartate racemase [Rhodoferax ferrireducens T118]
  misc_feature (1)..(229): NCBI GI: 159901071 Blast Desc: aspartate racemase [Herpetosiphon aurantiacus ATCC 23779] gi|159894110|gb|ABX07190.1| aspartate racemase [Herpetosiphon aurantiacus ATCC 23779]
  misc_feature (1)..(228): NCBI GI: 170733497 Blast Desc: aspartate racemase [Burkholderia cenocepacia MC0-3] gi|169816739|gb|ACA91322.1| aspartate racemase [Burkholderia cenocepacia MC0-3]
  misc_feature (1)..(228): NCBI GI: 254247766 Blast Desc: Aspartate racemase [Burkholderia cenocepacia PC184] gi|124872542|gb|EAY64258.1| Aspartate racemase [Burkholderia cenocepacia PC184]
  misc_feature (1)..(228): NCBI GI: 107028677 Blast Desc: aspartate racemase [Burkholderia cenocepacia AU 1054] gi|116690164|ref|YP_835787.1| aspartate racemase [Burkholderia cenocepacia HI2424] gi|105897841|gb|ABF80799.1| Aspartate AU
  misc_feature (2)..(230): NCBI GI: 227329729 Blast Desc: aspartate/glutamate racemase [Pectobacterium carotovorum subsp. carotovorum WPP14]
  misc_feature (1)..(231): NCBI GI: 196158793 Blast Desc: aspartate racemase [Alteromonas macleodii 'Deep ecotype'] gi|196114572|gb|ACG68288.1| aspartate racemase [Alteromonas macleodii 'Deep ecotype']
  misc_feature (79)..(231): SWISSPROT Homolog: EC 5.1.1.13 Aspartate racemase
MKTLGLLGGMSWESTVTYYQDINRRVREVKGGLHSAQCVLFSFDFAKIEELQHAGKWDDAGALLDDAAAKLKLAGADAIVLCTNTMHFVSQNIEKVSQLPLIHIVDPTADRILKAGYKSVGLLGTRFTMEKEFYRARLATEFGLRAIVPEEEGRDVVHRIIYDELVQGVISEASRRSYIRVIEDLAKAGAECLILGCTEIGLLINTDVSPLPIFDTAQIHAIASADWAMTD

SEQ ID NO: 15088 - DNA, 2011 bp, Muscodor strobelii
  misc_feature: SGI EST ID NO. CUFF.35920.0
  misc_feature: Variant of the nucleotide sequence at SEQ ID NO 15086
tctctgttgagttttgtattgacgaagagaaatattacctaagctatcaggacaaggatgaactgcccttaagtccgggctgacaaatctctcctcgactacctatgtacgggcacgtgtccagaattattcgagtcgcgctactgttgttcattatcgacgcagtgtttggagcgtctcaagtcccgcaaagatctctactaggacttaacatatcgtctttaacacaaccataatgaagactctgggcttgctgggcggcatgagctgggagtcgaccgtgacctactaccaagatatcaatcgtcgagtacgcgaagtaaaaggcggcctacattcggcccaatgcgtattattctccttcgacttcgccaagattgaggagttacaacatgccggcaagtgggacgacgctggtgcgcttctcgacgatgcggccgccaagctcaagcttgcgggggctgacgcgattgtactctgcaccaatacaatgcactttgtctcccaaaacatcgagaaagtttcgcagctgcctctcatccatattgttgaccccaccgccgataggatattgaaagccgggtacaagtccgttggcttgttagggacgcgattcacgatggagaaggagttttatcgggcgcgactcgcgactgagtttggcttgcgcgctatcgtgcccgaggaagaaggccgcgacgttgtgcacagaatcatttatgatgagttggttcagggcgtcatatcggaggcttcccgacggagctatatccgagtcattgaggatctcgccaaagcaggtgccgagtgtctcattcttggttgcacggaaatcgggctcttgatcaatacggacgttagtccactgccgatctttgatacagcgcagattcatgctattgcttctgccgattgggctatgacagattgattcatagaatgcggctttcgattggtgaatgacggtagttggccgtcaattcatctcctgagcggagggcgattgttttgttttgatctttctcgtctagcttcgataatcaagctgaggacaggtactcctggtctgagatcttctcttttcgatgatatagaaatatgatgccctcgaatactgagatcgcgagtggcagccagaactcggggcgcaataatgtctagatcctcccaactcatcgcgtcttcctcgtacttctcttggaaaatgacggcagcttcctgagggtatgcatcccatgcgaagatcttcagtaccggagttgagtccctataatcgcacaagaccacgaatcgtgtagatataccagttagggacgtcagaaataccatggcaataaccatcgagtacctaacccggaaatactgtttcggtgtcaaaaataccctatctgtgtaatcccataacgctccgggaatcgcccgttgaagttcaaacaatgtgtctgcaggaacatggagtgcaaaccaccgaaaattttgtaacaataatgaatcgtttgaacctgggtcgataacaagagatgtctcactaccgctgcagatagcaatctggtcgtagtcattcataccaaatcgttttagtgatttcccaccgactctacaaaagagtttcggtccaatttttcgaagataaatgccccatacaccaatatatcccttcgccgctcctagcatgaagagatatagcggttctgcaatcggcccatccttattcaaagcaacacgcaatggggcaccgccgtcaagtcggagccctttgttggtcaaagaggactctgctaagtcatctttgtatgtcctgatgtcgccgctgttttcgaacacggcgggtgtgggtgcgagaataccgaccaagctatcgctgcgttctggcgggatttcccaggcaagtatgctcatgtcgctgttgtgcttgatgattttgcgttgtaggcgtcgaaaagccccattaccttctccatataggagcgacatgctgagctgaaatattcctaagaggcagtatgcttca

SEQ ID NO: 15089 - DNA, 1620 bp, Muscodor strobelii
  misc_feature: SGI cDNA ID NO. 564988
  misc_feature: Encodes the peptide sequence at SEQ ID NO 15090
atgaggctcattgacaccaaaaccttggagctccgggaatatttcccccctaatgtgccaccttatgcaatcctgtcacatacctggggcgagggggaagtcagttttcaagaaatgcagtcagctaagagttccgataagagaggatttcataagatcgtggcaggttgtcgtctggctcgccacgaggggctgaacttcttgtgggttgatacctgctgcatcgacaagtcgagcagtgccgagctcagcgagtccatcaattccatgttccgatggtatgcagaggcaaacgtctgcttcgcctggcttgtcgatctttccgttgacacagcgactgaaagtgggctacctcactgtcgttggttcactcgtggttggaccttgcaagagttgctcgcctccaaaactgtcaagttctatgacaaagcgtggatataccgaggaacgaagaattactatgcttcgcttatttcacggatctccaaaatacccgtcgacacgttgcggggcattgatgatccttgggattcgtctgttgcagctagattgtcctgggctgctcgaagacaaaccactcgtgtggaagatgaagcatactgcctcttaggaatatttcagctcagcatgtcgctcctatatggagaaggtaatggggcttttcgacgcctacaacgcaaaatcatcaagcacaacagcgacatgagcatacttgcctgggaaatcccgccagaacgcagcgatagcttggtcggtattctcgcacccacacccgccgtgttcgaaaacagcggcgacatcaggacatacaaagatgacttagcagagtcctctttgaccaacaaagggctccgacttgacggcggtgccccattgcgtgttgctttgaataaggatgggccgattgcagaaccgctatatctcttcatgctaggagcggcgaagggatatattggtgtatggggcatttatcttcgaaaaattggaccgaaactcttttgtagagtcggtgggaaatcactaaaacgatttggtatgaatgactacgaccagattgctatctgcagcggtagtgagacatctcttgttatcgacccaggttcaaacgattcattattgttacaaaattttcggtggtttgcactccatgttcctgcagacacattgtttgaacttcaacgggcgattcccggagcgttatgggattacacagatagggtatttttgacaccgaaacagtatttccgggttaggtactcgatggttattgccatggtatttctgacgtccctaactggtatatctacacgattcgtggtcttgtgcgattatagggactcaactccggtactgaagatcttcgcatgggatgcataccctcaggaagctgccgtcattttccaagagaagtacgaggaagacgcgatgagttgggaggatctagacattattgcgccccgagttctggctgccactcgcgatctcagtattcgagggcatcatatttctatatcatcgaaaagagaagatctcagaccaggagtacctgtcctcagcttgattatcgaagctagacgagaaagatcaaaacaaaacaatcgccctccgctcaggagatga

SEQ ID NO: 15090 - protein, 539 aa, Muscodor strobelii
  misc_feature: SGI Peptide ID NO. 564988
  misc_feature (22)..(131): Pfam Id: PF06985 Pfam Desc: Heterokaryon incompatibility protein (HET)
  misc_feature (22)..(104): Pfam Id: PF06985 Pfam Desc: Heterokaryon incompatibility protein (HET)
  misc_feature (120)..(131): Pfam Id: PF06985 Pfam Desc: Heterokaryon incompatibility protein (HET)
  misc_feature (1)..(482): NCBI GI: 171677580 Blast Desc: protein product [Podospora anserina] gi|170936858|emb|CAP61516.1| protein product [Podospora anserina]
  misc_feature (1)..(497): NCBI GI: 171689682 Blast Desc: protein product [Podospora anserina] gi|170944803|emb|CAP70915.1| protein product [Podospora anserina]
  misc_feature (1)..(318): NCBI GI: 46126619 Blast Desc: FG07687.1 [Gibberella zeae PH-1]
  misc_feature (1)..(416): NCBI GI: 256734168 Blast Desc: NECHADRAFT_78015 [Nectria haematococca mpVI 77-13-4]
  misc_feature (1)..(286): NCBI GI: 256723740 Blast Desc: NECHADRAFT_52245 [Nectria haematococca mpVI 77-13-4]
  misc_feature (1)..(287): NCBI GI: 256720502 Blast Desc: NECHADRAFT_55867 [Nectria haematococca mpVI 77-13-4]
  misc_feature (1)..(287): NCBI GI: 256722255 Blast Desc: NECHADRAFT_52327 [Nectria haematococca mpVI 77-13-4]
  misc_feature (3)..(416): NCBI GI: 46139005 Blast Desc: FG11017.1 [Gibberella zeae PH-1]
  misc_feature (1)..(287): NCBI GI: 115437654 Blast Desc: [Aspergillus terreus NIH2624] gi|114188680|gb|EAU30380.1| [Aspergillus terreus NIH2624]
  misc_feature (5)..(481): NCBI GI: 171677823 Blast Desc: protein product [Podospora anserina] gi|170936980|emb|CAP61638.1| protein product [Podospora anserina]
MRLIDTKTLELREYFPPNVPPYAILSHTWGEGEVSFQEMQSAKSSDKRGFHKIVAGCRLARHEGLNFLWVDTCCIDKSSSAELSESINSMFRWYAEANVCFAWLVDLSVDTATESGLPHCRWFTRGWTLQELLASKTVKFYDKAWIYRGTKNYYASLISRISKIPVDTLRGIDDPWDSSVAARLSWAARRQTTRVEDEAYCLLGIFQLSMSLLYGEGNGAFRRLQRKIIKHNSDMSILAWEIPPERSDSLVGILAPTPAVFENSGDIRTYKDDLAESSLTNKGLRLDGGAPLRVALNKDGPIAEPLYLFMLGAAKGYIGVWGIYLRKIGPKLFCRVGGKSLKRFGMNDYDQIAICSGSETSLVIDPGSNDSLLLQNFRWFALHVPADTLFELQRAIPGALWDYTDRVFLTPKQYFRVRYSMVIAMVFLTSLTGISTRFVVLCDYRDSTPVLKIFAWDAYPQEAAVIFQEKYEEDAMSWEDLDIIAPRVLAATRDLSIRGHHISISSKREDLRPGVPVLSLIIEARRERSKQNNRPPLRR

SEQ ID NO: 15091 - DNA, 2011 bp, Muscodor strobelii
  misc_feature: SGI EST ID NO. CUFF.35920.0
  misc_feature: Variant of the nucleotide sequence at SEQ ID NO 15089
tgaagcatactgcctcttaggaatatttcagctcagcatgtcgctcctatatggagaaggtaatggggcttttcgacgcctacaacgcaaaatcatcaagcacaacagcgacatgagcatacttgcctgggaaatcccgccagaacgcagcgatagcttggtcggtattctcgcacccacacccgccgtgttcgaaaacagcggcgacatcaggacatacaaagatgacttagcagagtcctctttgaccaacaaagggctccgacttgacggcggtgccccattgcgtgttgctttgaataaggatgggccgattgcagaaccgctatatctcttcatgctaggagcggcgaagggatatattggtgtatggggcatttatcttcgaaaaattggaccgaaactcttttgtagagtcggtgggaaatcactaaaacgatttggtatgaatgactacgaccagattgctatctgcagcggtagtgagacatctcttgttatcgacccaggttcaaacgattcattattgttacaaaattttcggtggtttgcactccatgttcctgcagacacattgtttgaacttcaacgggcgattcccggagcgttatgggattacacagatagggtatttttgacaccgaaacagtatttccgggttaggtactcgatggttattgccatggtatttctgacgtccctaactggtatatctacacgattcgtggtcttgtgcgattatagggactcaactccggtactgaagatcttcgcatgggatgcataccctcaggaagctgccgtcattttccaagagaagtacgaggaagacgcgatgagttgggaggatctagacattattgcgccccgagttctggctgccactcgcgatctcagtattcgagggcatcatatttctatatcatcgaaaagagaagatctcagaccaggagtacctgtcctcagcttgattatcgaagctagacgagaaagatcaaaacaaaacaatcgccctccgctcaggagatgaattgacggccaactaccgtcattcaccaatcgaaagccgcattctatgaatcaatctgtcatagcccaatcggcagaagcaatagcatgaatctgcgctgtatcaaagatcggcagtggactaacgtccgtattgatcaagagcccgatttccgtgcaaccaagaatgagacactcggcacctgctttggcgagatcctcaatgactcggatatagctccgtcgggaagcctccgatatgacgccctgaaccaactcatcataaatgattctgtgcacaacgtcgcggccttcttcctcgggcacgatagcgcgcaagccaaactcagtcgcgagtcgcgcccgataaaactccttctccatcgtgaatcgcgtccctaacaagccaacggacttgtacccggctttcaatatcctatcggcggtggggtcaacaatatggatgagaggcagctgcgaaactttctcgatgttttgggagacaaagtgcattgtattggtgcagagtacaatcgcgtcagcccccgcaagcttgagcttggcggccgcatcgtcgagaagcgcaccagcgtcgtcccacttgccggcatgttgtaactcctcaatcttggcgaagtcgaaggagaataatacgcattgggccgaatgtaggccgccttttacttcgcgtactcgacgattgatatcttggtagtaggtcacggtcgactcccagctcatgccgcccagcaagcccagagtcttcattatggttgtgttaaagacgatatgttaagtcctagtagagatctttgcgggacttgagacgctccaaacactgcgtcgataatgaacaacagtagcgcgactcgaataattctggacacgtgcccgtacataggtagtcgaggagagatttgtcagcccggacttaagggcagttcatccttgtcctgatagcttaggtaatatttctcttcgtcaatacaaaactcaacagaga

SEQ ID NO: 15092 - DNA, 3573 bp, Muscodor strobelii
  misc_feature: SGI cDNA ID NO. 564989
  misc_feature: Elevated expression when VOC is produced
  misc_feature: Encodes the peptide sequence at SEQ ID NO 15093
atggctagtgtcgcgtcagtgcccgacccatggctgcaagccgccttcgaaacggcacaggccgaattcaatgcccagtttcccgaggctgatagggttgacttctcgcaatattgctctatcgaagatgtctacgatacgacggaagccatccagatgcggcaatccaagtctacgatgcttgtcggcttgaagaggatccaaccattcctcgactgtatggcacagttcaagggtgtcatagagcaatttgtgtcagtcaagccggagatgctcgctttgatctgggccccaatcagacttgtacttgagagcgcaagtcgtctagtgaaggcgttcgaagtattagttgaggtattggagacgatcggactcagtctgccgcatttccagcaatacgcccagctcttccggagcaacgataaggttcggaagacattaagtctcttctttcaggatatactagactttcacgtcacacttgcgaagttctttcggaaaccaaaatgggaactgatcttggtcgagagtctatggccgaggacttcgcgcaaggtggacttgatagtgcagcagatcaacaagcataaactgatgatgacaaatgaggtgacgctagagaacatctcacaagaagtggcagcgaggcaacgggcctatgatgagtttgaacgggttcaagagcacgaggcgttgcagaacttccgatccttgctgaatgagcttgcgccatgtctatatgataaagagctgcgcaatatttcgaggaatatcacccctggctccggggagtggcttatacagaggcaggagtatttggcatgggcgaacacgaataataagactcacagatgcctttgggttcacgggattccgggagctgggaagacttttcttaccggaacaatcatccaagagatacagaaagccgacaggcctgtggtgtttgcattcatgacgtacaaagatgcggcacagagcagcacaatcaaactgctccaaagtttcatattccagatcctggttgaaaacaaggccttacaacccattctacacgaagcctacttgtctagctatcggcagttaatcggcgacgagaggttcctcacgcaattgctggtcaacattttagagggctgcgggacgattttcgtcgtgatcgacggtttggatgaggtagatgaagatgagcagagtatcatgatgaaggttctgcttgatatcctacgtcagtgccagggtgtcaagatgcttgttagcagtcgctccgagccacccatattccggggtattgggcgagccgcattttcgttgcgtatcgacaaacacaatgcagacgacatcgcgtcttatgttgacgtggcgaggagcgaagtaatagaaaagctcaagcaatggggtgcagacgatgacgtctgctcgaacgtcataaccgcgatggatcaagtcaagacccgcgccggaggcatgtttctgtacgctgatctaatgattcggatcctccagggacttgataaccctgacgatatcgagagggagatgcaagatcttcctacaggcttggatcaggcatatgatcgcatactggataaaatcgcgaagaaccctgtaaagaaagaacgagaggcggctcggaagatccttcggtgggttgcctgcgctcgccgtccgctatctcaagaagagttactacaagtgctggttattcagccagggatgtcaaaatttgcgtcgtcgcgcaaggcttttcgagatttacagcagacttgtggtccaatcattgagattagcgagaaccgggtgggttttgttcacttcacagctagggactatctattcaagggcaaacatcgagtgtttgaagagaatgacagcaatcttgaactcggctccatatgcacgacgtacctcacttttgagaatcatgatgggatctgtacacccagtcttgtcgccaacgaaagaccaaatattgtctccggagacttcatcatgttcgagtacgctgccagggagtggttgtcgcatgtcagactgggaagccaggctaggaaagggccagaggtagaagagctgtctgagcaactcgaacggatgtttgatcgccgaacagacaagtcaaaagaaaaatctagccgcacacacctcccgaagggcgaatatcgttcctttcggagacatcccgagctggtatcgcatttggcggaagcggaaagattcagtcgcgcattctcgtccggcgcactcgaagaaagtgataaagaatggtttcgtaaagatcccactcagatttcagccggtctggctcgactacgaacagagctcgagcactcgatctgcgattctctgaaacacgagcaagattgctactgcgaaaagatcaaacaactgtatggcgacgccatcttcaagtgcacgaacacagcctgtgtatactttacgcaaggtttcacgacacggaccgcccgcgacgaacacgcaacagtacacagtcgaccgtataaatgcgctgatctcggctgtctgttcgccaagctcggcttcagaaccgcatacgaccgatcccgacacgaagcagccgtgcatcgaggccacggcggcttgcagttgagcaacatgtcgcgcggctcgagtgcgaacctcgcggctcaagactttgatgcggtactggaagatgcgatcgcgcaggatcaggccgacgttgtgaatgacgtcttaatcagctatcatgcaagtctgaagggcaagaatggagtggatgtagaaatggctctagaggacattgtagaagtcttctacggggcgctaaaaacaggctcggcggcggtcgtagatgcgttcctccgcgctcgtcaaacggcagcgaacgaaccgaagcggaagagatggcccgtgaactgggacgtcgcattgggtaacgcgatagggagcgaaaacgtgtcggcgcttgaactcctgatgaccgagcgagtgaccctcgactgcgaggtgttcgtcccttccacgagcgctgatttcccgggagactgggaaggtttatacgacgacaccctttggccgttcgagcttgcgcttggcatggccaacgcgaccatgatgggcatccttcaacagaacggcgcatccgcttcggtacggactactaaccttgagcccattttcgccttgtctggccagcgccggctactcaccaaggacgatattgagaccaggactcggctgaaggccctcaaacgatttcatctctctgcgaacgtccatcagtttgcactatttgtggccgtccgggctggcgcggtacactatgcccgcttttcactcgagatgggtgctgacgtgaatggtatagtcaagaaacacaaacaggcacggccactgctctatatggcagccaggtcaggcaacgccgagatggcaaggctgctcttacagaacggcgctgacatccaagttgcgactgagtgtgaagacctggcgggagtgagaaagattgagcagcattttgaaatgacgtgggacgaaattgttacacagtatggggttgcggagcgctcggaagatgaccaggattga

SEQ ID NO: 15093 - protein, 1190 aa, Muscodor strobelii
  misc_feature: SGI Peptide ID NO. 564989
  misc_feature (1122)..(1154): Pfam Id: PF00023 Pfam Desc: Ankyrin repeat
  misc_feature (1127)..(1154): Pfam Id: PF00023 Pfam Desc: Ankyrin repeat
  misc_feature (6)..(952): NCBI GI: 159128646 Blast Desc: NACHT domain protein [Aspergillus fumigatus A1163]
  misc_feature (6)..(952): NCBI GI: 119497799 Blast Desc: NFIA_033260 [Neosartorya fischeri NRRL 181] gi|119413821|gb|EAW23760.1| [Neosartorya fischeri NRRL 181]
  misc_feature (40)..(1179): NCBI GI: 145235703 Blast Desc: An03g06250 [Aspergillus niger] gi|134058189|emb|CAK38381.1| protein product [Aspergillus niger]
  misc_feature (40)..(887): NCBI GI: 256724218 Blast Desc: NECHADRAFT_87481 [Nectria haematococca mpVI 77-13-4]
  misc_feature (12)..(1176): NCBI GI: 256721517 Blast Desc: NECHADRAFT_39728 [Nectria haematococca mpVI 77-13-4]
  misc_feature (6)..(612): NCBI GI: 146322724 Blast Desc: NACHT domain protein [Aspergillus fumigatus Af293] gi|129556771|gb|EBA27303.1| NACHT domain protein [Aspergillus fumigatus Af293]
  misc_feature (190)..(524): NCBI GI: 171678653 Blast Desc: protein product [Podospora anserina] gi|170937396|emb|CAP62054.1| protein product [Podospora anserina]
  misc_feature (1)..(524): NCBI GI: 169597869 Blast Desc: SNOG_01726 [Phaeosphaeria nodorum SN15] gi|111070255|gb|EAT91375.1| SNOG_01726 [Phaeosphaeria nodorum SN15]
  misc_feature (14)..(869): NCBI GI: 171679325 Blast Desc: protein product [Podospora anserina] gi|170939288|emb|CAP64516.1| protein product [Podospora anserina]
  misc_feature (16)..(862): NCBI GI: 115384114 Blast Desc: [Aspergillus terreus NIH2624] gi|114196296|gb|EAU37996.1| [Aspergillus terreus NIH2624]
  misc_feature: Useful for introducing or modulating the production of volatile compounds
MASVASVPDPWLQAAFETAQAEFNAQFPEADRVDFSQYCSIEDVYDTTEAIQMRQSKSTMLVGLKRIQPFLDCMAQFKGVIEQFVSVKPEMLALIWAPIRLVLESASRLVKAFEVLVEVLETIGLSLPHFQQYAQLFRSNDKVRKTLSLFFQDILDFHVTLAKFFRKPKWELILVESLWPRTSRKVDLIVQQINKHKLMMTNEVTLENISQEVAARQRAYDEFERVQEHEALQNFRSLLNELAPCLYDKELRNISRNITPGSGEWLIQRQEYLAWANTNNKTHRCLWVHGIPGAGKTFLTGTIIQEIQKADRPVVFAFMTYKDAAQSSTIKLLQSFIFQILVENKALQPILHEAYLSSYRQLIGDERFLTQLLVNILEGCGTIFVVIDGLDEVDEDEQSIMMKVLLDILRQCQGVKMLVSSRSEPPIFRGIGRAAFSLRIDKHNADDIASYVDVARSEVIEKLKQWGADDDVCSNVITAMDQVKTRAGGMFLYADLMIRILQGLDNPDDIEREMQDLPTGLDQAYDRILDKIAKNPVKKEREAARKILRWVACARRPLSQEELLQVLVIQPGMSKFASSRKAFRDLQQTCGPIIEISENRVGFVHFTARDYLFKGKHRVFEENDSNLELGSICTTYLTFENHDGICTPSLVANERPNIVSGDFIMFEYAAREWLSHVRLGSQARKGPEVEELSEQLERMFDRRTDKSKEKSSRTHLPKGEYRSFRRHPELVSHLAEAERFSRAFSSGALEESDKEWFRKDPTQISAGLARLRTELEHSICDSLKHEQDCYCEKIKQLYGDAIFKCTNTACVYFTQGFTTRTARDEHATVHSRPYKCADLGCLFAKLGFRTAYDRSRHEAAVHRGHGGLQLSNMSRGSSANLAAQDFDAVLEDAIAQDQADVVNDVLISYHASLKGKNGVDVEMALEDIVEVFYGALKTGSAAVVDAFLRARQTAANEPKRKRWPVNWDVALGNAIGSENVSALELLMTERVTLDCEVFVPSTSADFPGDWEGLYDDTLWPFELALGMANATMMGILQQNGASASVRTTNLEPIFALSGQRRLLTKDDIETRTRLKALKRFHLSANVHQFALFVAVRAGAVHYARFSLEMGADVNGIVKKHKQARPLLYMAARSGNAEMARLLLQNGADIQVATECEDLAGVRKIEQHFEMTWDEIVTQYGVAERSEDDQD

SEQ ID NO: 15094 - DNA, 3758 bp, Muscodor strobelii
  misc_feature: SGI EST ID NO. CUFF.35936.2
  misc_feature: Variant of the nucleotide sequence at SEQ ID NO 15092
tgatcttggtcgagagtctatggccgaggacttcgcgcaaggtggacttgatagtgcagcagatcaacaagcataaactgatgatgacaaatgaggtgacgctagagaacatctcacaagaagtggcagcgaggcaacgggcctatgatgagtttgaacgggttcaagagcacgaggcgttgcagaacttccgatccttgctgaatgagcttgcgccatgtctatatgataaagagctgcgcaatatttcgaggaatatcacccctggctccggggagtggcttatacagaggcaggagtatttggcatgggcgaacacgaataataagactcacagatgcctttgggttcacgggattccgggagctgggaagacttttcttaccggaacaatcatccaagagatacagaaagccgacaggcctgtggtgtttgcattcatgacgtacaaagatgcggcacagagcagcacaatcaaactgctccaaagtttcatattccagatcctggttgaaaacaaggccttacaacccattctacacgaagcctacttgtctagctatcggcagttaatcggcgacgagaggttcctcacgcaattgctggtcaacattttagagggctgcgggacgattttcgtcgtgatcgacggtttggatgaggtagatgaagatgagcagagtatcatgatgaaggttctgcttgatatcctacgtcagtgccagggtgtcaagatgcttgttagcagtcgctccgagccacccatattccggggtattgggcgagccgcattttcgttgcgtatcgacaaacacaatgcagacgacatcgcgtcttatgttgacgtggcgaggagcgaagtaatagaaaagctcaagcaatggggtgcagacgatgacgtctgctcgaacgtcataaccgcgatggatcaagtcaagacccgcgccggaggcatgtttctgtacgctgatctaatgattcggatcctccagggacttgataaccctgacgatatcgagagggagatgcaagatcttcctacaggcttggatcaggcatatgatcgcatactggataaaatcgcgaagaaccctgtaaagaaagaacgagaggcggctcggaagatccttcggtgggttgcctgcgctcgccgtccgctatctcaagaagagttactacaagtgctggttattcagccagggatgtcaaaatttgcgtcgtcgcgcaaggcttttcgagatttacagcagacttgtggtccaatcattgagattagcgagaaccgggtgggttttgttcacttcacagctagggactatctattcaagggcaaacatcgagtgtttgaagagaatgacagcaatcttgaactcggctccatatgcacgacgtacctcacttttgagaatcatgatgggatctgtacacccagtcttgtcgccaacgaaagaccaaatattgtctccggagacttcatcatgttcgagtacgctgccagggagtggttgtcgcatgtcagactgggaagccaggctaggaaagggccagaggtagaagagctgtctgagcaactcgaacggatgtttgatcgccgaacagacaagtcaaaagaaaaatctagccgcacacacctcccgaagggcgaatatcgttcctttcggagacatcccgagctggtatcgcatttggcggaagcggaaagattcagtcgcgcattctcgtccggcgcactcgaagaaagtgataaagaatggtttcgtaaagatcccactcagatttcagccggtctggctcgactacgaacagagctcgagcactcgatctgcgattctctgaaacacgagcaagattgctactgcgaaaagatcaaacaactgtatggcgacgccatcttcaagtgcacgaacacagcctgtgtatactttacgcaaggtttcacgacacggaccgcccgcgacgaacacgcaacagtacacagtcgaccgtataaatgcgctgatctcggctgtctgttcgccaagctcggcttcagaaccgcatacgaccgatcccgacacgaagcagccgtgcatcgaggccacggcggcttgcagttgagcaacatgtcgcgcggctcgagtgcgaacctcgcggctcaagactttgatgcggtactggaagatgcgatcgcgcaggatcaggccgacgttgtgaatgacgtcttaatcagctatcatgcaagtctgaagggcaagaatggagtggatgtagaaatggctctagaggacattgtagaagtcttctacggggcgctaaaaacaggctcggcggcggtcgtagatgcgttcctccgcgctcgtcaaacggcagcgaacgaaccgaagcggaagagatggcccgtgaactgggacgtcgcattgggtaacgcgatagggagcgaaaacgtgtcggcgcttgaactcctgatgaccgagcgagtgaccctcgactgcgaggtgttcgtcccttccacgagcgctgatttcccgggagactgggaaggtttatacgacgacaccctttggccgttcgagcttgcgcttggcatggccaacgcgaccatgatgggcatccttcaacagaacggcgcatccgcttcggtacggactactaaccttgagcccattttcgccttgtctggccagcgccggctactcaccaaggacgatattgagaccaggactcggctgaaggccctcaaacgatttcatctctctgcgaacgtccatcagtttgcactatttgtggccgtccgggctggcgcggtacactatgcccgcttttcactcgagatgggtgctgacgtgaatggtatagtcaagaaacacaaacaggcacggccactgctctatatggcagccaggtcaggcaacgccgagatggcaaggctgctcttacagaacggcgctgacatccaagttgcgactgagtgtgaagacctggcgggagtgagaaagattgagcagcattttgaaatgacgtgggacgaaattgttacacagtatggggttgcggagcgctcggaagatgaccaggattgacgatgaccatccggggtttctcacgggcttattatgatatctaaacctgttgttttcatatttttgtaaatggttatttgaggccgatagtcgatcctttgggcggtccgttaactaatctcttgtacctaggtacttaaagtacagcacctgtaggcaatcaaagcaccagttgactttacgcatacaaattgagaaacctgcagtgtccaatcctatctctctgatgcactaatcaatccactttcttttaatgaaattgcaaactcaatcagcaagaagctttctaggttaagactttgcgctacggctgcatgagcagtaggctactcttctcttttgtgaactgcatcgatcccagaagtaaggaccgctgccccaccaaggctctggggcgcggtcgacaagtaatggagcgatgaaggaggtagatgggagtggcatcggcatgctggacggggaggaatggaagagcctaaacttcgatattggttgaacaagctaaataccttaggttggaaccaagccgatgccgtcattgaaatgccaacatccaaaaggaggcctcttggtgtgggagcgagccgtggcgatggctgagtccgcgaacgaagagggccgctcagctgaggcgggcggcaagcaaaatacgcctcgtcgcagccaaaaggacccctcttttgtcgaagatagtgggtc

SEQ ID NO: 15095 - DNA, 3645 bp, Muscodor strobelii
  misc_feature: SGI cDNA ID NO. 564990
  misc_feature: Encodes the peptide sequence at SEQ ID NO 15096
atggctagtgtcgcgtcagtgcccgacccatggctgcaagccgccttcgaaacggcacaggccgaattcaatgcccagtttcccgaggctgatagggttgacttctcgcaatattgctctatcgaagatgtctacgatacgacggaagccatccagatgcggcaatccaagtctacgatgcttgtcggcttgaagaggatccaaccattcctcgactgtatggcacagttcaagggtgtcatagagcaatttgtgtcagtcaagccggagatgctcgctttgatctgggccccaatcagacttgtacttgagagcgcaagtcgtctagtgaaggcgttcgaagtattagttgaggtattggagacgatcggactcagtctgccgcatttccagcaatacgcccagctcttccggagcaacgataaggttcggaagacattaagtctcttctttcaggatatactagactttcacgtcacacttgcgaagttctttcggaaaccaaaatgggaactgatcttggtcgagagtctatggccgaggacttcgcgcaaggtggacttgatagtgcagcagatcaacaagcataaactgatgatgacaaatgaggtgacgctagagaacatctcacaagaagtggcagcgaggcaacgggcctatgatgagtttgaacgggttcaagagcacgaggcgttgcagaacttccgatccttgctgaatgagcttgcgccatgtctatatgataaagagctgcgcaatatttcgaggaatatcacccctggctccggggagtggcttatacagaggcaggagtatttggcatgggcgaacacgaataataagactcacagatgcctttgggttcacgggattccgggagctgggaagacttttcttaccggaacaatcatccaagagatacagaaagccgacaggcctgtggtgtttgcattcatgacgtacaaagatgcggcacagagcagcacaatcaaactgctccaaagtttcatattccagatcctggttgaaaacaaggccttacaacccattctacacgaagcctacttgtctagctatcggcagttaatcggcgacgagaggttcctcacgcaattgctggtcaacattttagagggctgcgggacgattttcgtcgtgatcgacggtttggatgaggtagatgaagatgagcagagtatcatgatgaaggttctgcttgatatcctacgtcagtgccagggtgtcaagatgcttgttagcagtcgctccgagccacccatattccggggtattgggcgagccgcattttcgttgcgtatcgacaaacacaatgcagacgacatcgcgtcttatgttgacgtggcgaggagcgaagtaatagaaaagctcaagcaatggggtgcagacgatgacgtctgctcgaacgtcataaccgcgatggatcaagtcaagacccgcgccggaggcatgtttctgtacgctgatctaatgattcggatcctccagggacttgataaccctgacgatatcgagagggagatgcaagatcttcctacaggcttggatcaggcatatgatcgcatactggataaaatcgcgaagaaccctgtaaagaaagaacgagaggcggctcggaagatccttcggtgggttgcctgcgctcgccgtccgctatctcaagaagagttactacaagtgctggttattcagccagggatgtcaaaatttgcgtcgtcgcgcaaggcttttcgagatttacagcagacttgtggtccaatcattgagattagcgagaaccgggtgggttttgttcacttcacagctagggactatctattcaagggcaaacatcgagtgtttgaagagaatgacagcaatcttgaactcggctccatatgcacgacgtacctcacttttgagaatcatgatgggatctgtacacccagtcttgtcgccaacgaaagaccaaatattgtctccggagacttcatcatgttcgagtacgctgccagggagtggttgtcgcatgtcagactgggaagccaggctaggaaagggccagaggtagaagagctgtctgagcaactcgaacggatgtttgatcgccgaacagacaagtcaaaagaaaaatctagccgcacacacctcccgaagggcgaatatcgttcctttcggagacatcccgagctggtatcgcatttggcggaagcggaaagattcagtcgcgcattctcgtccggcgcactcgaagaaagtgataaagaatggtttcgtaaagatcccactcagatttcagccggtctggctcgactacgaacagagctcgagcactcgatctgcgattctctgaaacacgagcaagattgctactgcgaaaagatcaaacaactgtatggcgacgccatcttcaagtgcacgaacacagcctgtgtatactttacgcaaggtttcacgacacggaccgcccgcgacgaacacgcaacagtacacagtcgaccgtataaatgcgctgatctcggctgtctgttcgccaagctcggcttcagaaccgcatacgaccgatcccgacacgaagcagccgtgcatcgaggccacggcggcttgcagttgagcaacatgtcgcgcggctcgagtgcgaacctcgcggctcaagactttgatgcggtactggaagatgcgatcgcgcaggatcaggccgacgttgtgaatgacgtcttaatcagctatcatgcaagtctgaagggcaagaatggagtggatgtagaaatggctctagaggacattgtagaagtcttctacggggcgctaaaaacaggctcggcggcggtcgtagatgcgttcctccgcgctcgtcaaacggcagcgaacgaaccgaagcggaagagatggcccgtgaactgggacgtcgcattgggtaacgcgatagggagcgaaaacgtgtcggcgcttgaactcctgatgaccgagcgagtgaccctcgactgcgaggtgttcgtcccttccacgagcgctgatttcccgggagactgggaaggtttatacgacgacaccctttggccgttcgagcttgcgcttggcatggccaacgcgaccatgatgggcatccttcaacagaacggcgcatccgcttcggtacggactactaaccttgagcccattttcgccttgtctggccagcgccggctactcaccaaggacgatattgagaccaggactcggctgaaggccctcaaacgatttcatctctctgcgaacgtccatcagtttgcactatttgtggccgtccgggctggcgcggtacactatgcccgcttttcactcgagatgggtgctgacggtgagtttcgagccaacttcgtgatccattccgtcgcgaattcaaagaagactaattcgcggttcttggtagtgaatggtatagtcaagaaacacaaacaggcacggccactgctctatatggcagccaggtcaggcaacgccgagatggcaaggctgctcttacagaacggcgctgacatccaagttgcgactgagtgtgaagacctggcgggagtgagaaagattgagcagcattttgaaatgacgtgggacgaaattgttacacagtatggggttgcggagcgctcggaagatgaccaggattga

SEQ ID NO: 15096 - protein, 1214 aa, Muscodor strobelii
  misc_feature: SGI Peptide ID NO. 564990
  misc_feature (1146)..(1178): Pfam Id: PF00023 Pfam Desc: Ankyrin repeat
  misc_feature (1151)..(1178): Pfam Id: PF00023 Pfam Desc: Ankyrin repeat
  misc_feature (6)..(952): NCBI GI: 159128646 Blast Desc: NACHT domain protein [Aspergillus fumigatus A1163]
  misc_feature (6)..(952): NCBI GI: 119497799 Blast Desc: NFIA_033260 [Neosartorya fischeri NRRL 181] gi|119413821|gb|EAW23760.1| [Neosartorya fischeri NRRL 181]
  misc_feature (40)..(908): NCBI GI: 145235703 Blast Desc: An03g06250 [Aspergillus niger] gi|134058189|emb|CAK38381.1| protein product [Aspergillus niger]
  misc_feature (40)..(887): NCBI GI: 256724218 Blast Desc: NECHADRAFT_87481 [Nectria haematococca mpVI 77-13-4]
  misc_feature (12)..(989): NCBI GI: 256721517 Blast Desc: NECHADRAFT_39728 [Nectria haematococca mpVI 77-13-4]
  misc_feature (6)..(612): NCBI GI: 146322724 Blast Desc: NACHT domain protein [Aspergillus fumigatus Af293] gi|129556771|gb|EBA27303.1| NACHT domain protein [Aspergillus fumigatus Af293]
  misc_feature (190)..(524): NCBI GI: 171678653 Blast Desc: protein product [Podospora anserina] gi|170937396|emb|CAP62054.1| protein product [Podospora anserina]
  misc_feature (1)..(524): NCBI GI: 169597869 Blast Desc: SNOG_01726 [Phaeosphaeria nodorum SN15] gi|111070255|gb|EAT91375.1| SNOG_01726 [Phaeosphaeria nodorum SN15]
  misc_feature (14)..(869): NCBI GI: 171679325 Blast Desc: protein product [Podospora anserina] gi|170939288|emb|CAP64516.1| protein product [Podospora anserina]
  misc_feature (16)..(862): NCBI GI: 115384114 Blast Desc: [Aspergillus terreus NIH2624] gi|114196296|gb|EAU37996.1| [Aspergillus terreus NIH2624]
MASVASVPDPWLQAAFETAQAEFNAQFPEADRVDFSQYCSIEDVYDTTEAIQMRQSKSTMLVGLKRIQPFLDCMAQFKGVIEQFVSVKPEMLALIWAPIRLVLESASRLVKAFEVLVEVLETIGLSLPHFQQYAQLFRSNDKVRKTLSLFFQDILDFHVTLAKFFRKPKWELILVESLWPRTSRKVDLIVQQINKHKLMMTNEVTLENISQEVAARQRAYDEFERVQEHEALQNFRSLLNELAPCLYDKELRNISRNITPGSGEWLIQRQEYLAWANTNNKTHRCLWVHGIPGAGKTFLTGTIIQEIQKADRPVVFAFMTYKDAAQSSTIKLLQSFIFQILVENKALQPILHEAYLSSYRQLIGDERFLTQLLVNILEGCGTIFVVIDGLDEVDEDEQSIMMKVLLDILRQCQGVKMLVSSRSEPPIFRGIGRAAFSLRIDKHNADDIASYVDVARSEVIEKLKQWGADDDVCSNVITAMDQVKTRAGGMFLYADLMIRILQGLDNPDDIEREMQDLPTGLDQAYDRILDKIAKNPVKKEREAARKILRWVACARRPLSQEELLQVLVIQPGMSKFASSRKAFRDLQQTCGPIIEISENRVGFVHFTARDYLFKGKHRVFEENDSNLELGSICTTYLTFENHDGICTPSLVANERPNIVSGDFIMFEYAAREWLSHVRLGSQARKGPEVEELSEQLERMFDRRTDKSKEKSSRTHLPKGEYRSFRRHPELVSHLAEAERFSRAFSSGALEESDKEWFRKDPTQISAGLARLRTELEHSICDSLKHEQDCYCEKIKQLYGDAIFKCTNTACVYFTQGFTTRTARDEHATVHSRPYKCADLGCLFAKLGFRTAYDRSRHEAAVHRGHGGLQLSNMSRGSSANLAAQDFDAVLEDAIAQDQADVVNDVLISYHASLKGKNGVDVEMALEDIVEVFYGALKTGSAAVVDAFLRARQTAANEPKRKRWPVNWDVALGNAIGSENVSALELLMTERVTLDCEVFVPSTSADFPGDWEGLYDDTLWPFELALGMANATMMGILQQNGASASVRTTNLEPIFALSGQRRLLTKDDIETRTRLKALKRFHLSANVHQFALFVAVRAGAVHYARFSLEMGADGEFRANFVIHSVANSKKTNSRFLVVNGIVKKHKQARPLLYMAARSGNAEMARLLLQNGADIQVATECEDLAGVRKIEQHFEMTWDEIVTQYGVAERSEDDQD

SEQ ID NO: 15097 - DNA, 3758 bp, Muscodor strobelii; identical to SEQ ID NO: 15094
  misc_feature: SGI EST ID NO. CUFF.35936.2
  misc_feature: Variant of the nucleotide sequence at SEQ ID NO 15095

SEQ ID NO: 15098 - DNA, 2682 bp, Muscodor strobelii
  misc_feature: SGI cDNA ID NO. 564991
  misc_feature: Encodes the peptide sequence at SEQ ID NO 15099
atgagctcgggtctcaggcggagccatgctctcgatgtgccagagtctgaccgtccgctgaagcgcattcgtactacagaatccaagaaacccgacggcgcccatagcactcatcacttcgatggccgcttacaattgaaaagcgaccacgatgcaaggaaacaaatcgaagtcgttgcttcagatacaaagctcgatgagatatccctatcaactccacacgttcaggacgaggaggtttgcttcggagtagcgcaaatatcacttccaaacctccgatctgaagagtcatcgagcataaaaaatgtggtgcttaacgatatcggttcgacgtacgctctctacgaggaaaaggatgaaaagggtcggatgaaaagtagttatcgcggcttgcttgatggcgtcgcggccgcttcagtgcgacagatcttgagtatctcacaggtttctgtccgcagttccattacgcggaagccaaatagactgctgatgcggctttgcggctatgtctcggtcgccgatgaggtcgggagtcgtttgtccgcacacggcatcttcctacagccgcctggccagctgaacgatgcgccacattactataacccacagtatctggtccgacctggatcgacatttcaagaaatgctcgaaagagcctccgtgcagagggcgcatgttcttccggaggctaccaagtccgcgctctacgatctcttcgactctgctggtggaccgacttccttcaaggaagctcaagtcagccaactgctcaagacggagctgaagattcaccagcgccaggctttagctatgatggtcgagaaggaatcaggcaatttgaaagatccgcagttcccttgcctctgggccgaatcggagatcggcagctcaccatctggtaaaatgtattgcgacacagtgacgggtgtgacgcaccgccataatccggccttgtgtctcggggggatcctcgctgatgacatggggttaggcaaaagtctaacggctcttgcgctcatcgcgggttccatcgatccgtccatttgtgcgaaagagggatcgaatgaaccgagtgataacagcggttattcgcgatgcactttgattgtcactccattatctacgctatcgaattgggaagatcagatcaaacagcatttgaaacgaggagctatcaaatgggcgacgtatcacggccagaaccgcgcgaagctattgggttcgcttagagatcacgacgttattttcaccacctatgagaccctcagggtggattctatgacacatgaaaaaattcgtgactgtgaaggaagagagtccttgcagtgcatatcatggcgaagggtcgtcttagacgaagcgcacgtcatacgcaatcgcaattcagattctcatgaagccgtgcgccggctggaagctaagcatcgctggtgtctgacaggaactccggtgcagaacaatgtggatgacttgggctcactggtaggcttcctacgggtcgccccgttcgacgaccgaagtcagttcacacgggtctttaccgaccccgtcgggaaccgcgacgacgagggatacgagcgtcttcggcgtttattccgcgcaatcgccttgcgtcgcacgaaggatgggctgactttagacctgccgccgcgggaggagcgcgtcgagatggtccgctttgacccggccgaggaacaactgtacgagaccgtccggaaggccgcggcgcagctggtcggggatggaaacggcggtaacgacaccacgcacatacgcggcgcgctacagattatactccggctgagacaggtttcggatcatgggcgcgagctattaccggccgagctgcgtaaacgaatcgatcgcggcatgacgggcaagcagctcctatcgcttagttcgagcgtctgtgagatgtgcggcgagacgaggagaagttcagatattataggggaggacgaaatgccttgtcttcatcaagtctgtcggggctgcgttctagccgaccagctcagggacgagacagtccagagattatgcccgctctgctacacttccgacgggccgaaaacaccgaaaaagacacaggattcgcgtagagcaaggtcagatactctgtatcgcccgtcatcgaaagttaaggctctattagcaaatctagaccgcgatagaaaacaagcccagagtgcgggttgcgatacgcctaaaagtgtcgtttattcttgctggacaaagatgctggacctcgtcgaactggcttttgaccaagcaggaattcgatttgcgaggctcgacggtggtaaatcggacacacaacggagagcagcccttaagaaattcaggaatgaccctacgtgtaccgttttgctcgcgactctagggagtgctggagtgggacttgacctgacagtagcttgtcgagtacacatcatcgagctgcagtggaatcccatggtcgagcgccaggcattggatcgtgtgtaccgactgggacagcgcaacgctgtcacatgcttcacgtacgttacagagggaagcgattccattgagcagtatgtacggcgaatccagcagctcaagatagacctcatcaacagctccctcactggcgaaagcgctggaaaccccggtcttccaaagactgctttgttggatctcaccacaacactcaggagctcataa

SEQ ID NO: 15099 - protein, 893 aa, Muscodor strobelii
  misc_feature: SGI Peptide ID NO. 564991
  misc_feature (753)..(831): Pfam Id: PF00271 Pfam Desc: Helicase conserved C-terminal domain
  misc_feature (264)..(611): Pfam Id: PF00176 Pfam Desc: SNF2 family N-terminal domain
  misc_feature (162)..(874): NCBI GI: 145235701 Blast Desc: An03g06240 [Aspergillus niger] gi|134058188|emb|CAK38380.1| protein product [Aspergillus niger]
  misc_feature (164)..(874): NCBI GI: 85105641 Blast Desc: NCU05246 [Neurospora crassa OR74A] gi|28923601|gb|EAA32774.1| conserved [Neurospora crassa OR74A] gi|118496048|dbj|BAF37540.1| DNA repair and recombination protein
  misc_feature (164)..(850): NCBI GI: 256724319 Blast Desc: NECHADRAFT_87480 [Nectria haematococca mpVI 77-13-4]
  misc_feature (162)..(868): NCBI GI: 156062442 Blast Desc: SS1G_01337 [Sclerotinia sclerotiorum 1980] gi|154696673|gb|EDN96411.1| SS1G_01337 [Sclerotinia sclerotiorum 1980]
  misc_feature (79)..(868): NCBI GI: 256721542 Blast Desc: NECHADRAFT_79818 [Nectria haematococca mpVI 77-13-4]
  misc_feature (162)..(868): NCBI GI: 154302115 Blast Desc: BC1G_09738 [Botryotinia fuckeliana B05.10] gi|150855512|gb|EDN30704.1| BC1G_09738 [Botryotinia fuckeliana B05.10]
  misc_feature (161)..(869): NCBI GI: 119189989 Blast Desc: CIMG_05042 [Coccidioides immitis RS]
  misc_feature (161)..(868): NCBI GI: 240111018 Blast Desc: SNF2 family N-terminal domain containing protein [Coccidioides posadasii C735 delta SOWgp]
  misc_feature (166)..(863): NCBI GI: 169597871 Blast Desc: SNOG_01727 [Phaeosphaeria nodorum SN15] gi|111070256|gb|EAT91376.1| SNOG_01727 [Phaeosphaeria nodorum SN15]
  misc_feature (130)..(868): NCBI GI: 225557592 Blast Desc: transcription termination factor 2 [Ajellomyces capsulatus G186AR]
MSSGLRRSHALDVPESDRPLKRIRTTESKKPDGAHSTHHFDGRLQLKSDHDARKQIEVVASDTKLDEISLSTPHVQDEEVCFGVAQISLPNLRSEESSSIKNVVLNDIGSTYALYEEKDEKGRMKSSYRGLLDGVAAASVRQILSISQVSVRSSITRKPNRLLMRLCGYVSVADEVGSRLSAHGIFLQPPGQLNDAPHYYNPQYLVRPGSTFQEMLERASVQRAHVLPEATKSALYDLFDSAGGPTSFKEAQVSQLLKTELKIHQRQALAMMVEKESGNLKDPQFPCLWAESEIGSSPSGKMYCDTVTGVTHRHNPALCLGGILADDMGLGKSLTALALIAGSIDPSICAKEGSNEPSDNSGYSRCTLIVTPLSTLSNWEDQIKQHLKRGAIKWATYHGQNRAKLLGSLRDHDVIFTTYETLRVDSMTHEKIRDCEGRESLQCISWRRVVLDEAHVIRNRNSDSHEAVRRLEAKHRWCLTGTPVQNNVDDLGSLVGFLRVAPFDDRSQFTRVFTDPVGNRDDEGYERLRRLFRAIALRRTKDGLTLDLPPREERVEMVRFDPAEEQLYETVRKAAAQLVGDGNGGNDTTHIRGALQIILRLRQVSDHGRELLPAELRKRIDRGMTGKQLLSLSSSVCEMCGETRRSSDIIGEDEMPCLHQVCRGCVLADQLRDETVQRLCPLCYTSDGPKTPKKTQDSRRARSDTLYRPSSKVKALLANLDRDRKQAQSAGCDTPKSVVYSCWTKMLDLVELAFDQAGIRFARLDGGKSDTQRRAALKKFRNDPTCTVLLATLGSAGVGLDLTVACRVHIIELQWNPMVERQALDRVYRLGQRNAVTCFTYVTEGSDSIEQYVRRIQQLKIDLINSSLTGESAGNPGLPKTALLDLTTTLRSS

SEQ ID NO: 15100 - DNA, 4169 bp, Muscodor strobelii
  misc_feature: SGI EST ID NO. CUFF.35945.0
  misc_feature: Variant of the nucleotide sequence at SEQ ID NO 15098
gaaaagtcatgaaacccacggaagtctaaggacaacggcaacgctcggaaaggaacatcaatgttgagcgtcctcttaccaaatgaagttcttcaacgagacaccaatgtcatgagctcgggtctcaggcggagccatgctctcgatgtgccagagtctgaccgtccgctgaagcgcattcgtactacagaatccaagaaacccgacggcgcccatagcactcatcacttcgatggccgcttacaattgaaaagcgaccacgatgcaaggaaacaaatcgaagtcgttgcttcagatacaaagctcggtgagttaatcgtaagcagaacaacgaaggatctgcacaatccatctcaaagggtatcagatgagatatccctatcaactccacacgttcaggacgaggaggtttgcttcggagtagcgcaaatatcacttccaaacctccgatctgaagagtcatcgagcataaaaaatgtggtgcttaacgatatcggttcgacgtacgctctctacgaggaaaaggatgaaaagggtcggatgaaaagtagttatcgcggcttgcttgatggcgtcgcggccgcttcagtgcgacagatcttgagtatctcacaggtttctgtccgcagttccattacgcggaagccaaatagactgctgatgcggctttgcggctatgtctcggtcgccgatgaggtcgggagtcgtttgtccgcacacggcatcttcctacagccgcctggccagctgaacgatgcgccacattactataacccacagtatctggtccgacctggatcgacatttcaagaaatgctcgaaagagcctccgtgcagagggcgcatgttcttccggaggctaccaagtccgcgctctacgatctcttcgactctgctggtggaccgacttccttcaaggaagctcaagtcagccaactgctcaagacggagctgaagattcaccagcgccaggctttagctatgatggtcgagaaggaatcaggcaatttgaaagatccgcagttcccttgcctctgggccgaatcggagatcggcagctcaccatctggtaaaatgtattgcgacacagtgacgggtgtgacgcaccgccataatccggccttgtgtctcggggggatcctcgctgatgacatggggttaggcaaaagtctaacggctcttgcgctcatcgcgggttccatcgatccgtccatttgtgcgaaagagggatcgaatgaaccgagtgataacagcggttattcgcgatgcactttgattgtcactccattatctacgctatcgaattgggaagatcagatcaaacagcatttgaaacgaggagctatcaaatgggcgacgtatcacggccagaaccgcgcgaagctattgggttcgcttagagatcacgacgttattttcaccacctatgagaccctcagggtggattctatgacacatgaaaaaattcgtgactgtgaaggaagagagtccttgcagtgcatatcatggcgaagggtcgtcttagacgaagcgcacgtcatacgcaatcgcaattcagattctcatgaagccgtgcgccggctggaagctaagcatcgctggtgtctgacaggaactccggtgcagaacaatgtggatgacttgggctcactggtaggcttcctacgggtcgccccgttcgacgaccgaagtcagttcacacgggtctttaccgaccccgtcgggaaccgcgacgacgagggatacgagcgtcttcggcgtttattccgcgcaatcgccttgcgtcgcacgaaggatgggctgactttagacctgccgccgcgggaggagcgcgtcgagatggtccgctttgacccggccgaggaacaactgtacgagaccgtccggaaggccgcggcgcagctggtcggggatggaaacggcggtaacgacaccacgcacatacgcggcgcgctacagattatactccggctgagacaggtttcggatcatgggcgcgagctattaccggccgagctgcgtaaacgaatcgatcgcggcatgacgggcaagcagctcctatcgcttagttcgagcgtctgtgagatgtgcggcgagacgaggagaagttcagatattataggggaggacgaaatgccttgtcttcatcaagtctgtcggggctgcgttctagccgaccagctcagggacgagacagtccagagattatgcccgctctgctacacttccgacgggccgaaaacaccgaaaaagacacaggattcgcgtagagcaaggtcagatactctgtatcgcccgtcatcgaaagttaaggctctattagcaaatctagaccgcgatagaaaacaagcccagagtgcgggttgcgatacgcctaaaaggtacgtttggtacatacctaagaagtgacgctgcacagctataggacgcttgagtatctgaatgacattaaacttccagtgtcgtttattcttgctggacaaagatgctggacctcgtcgaactggcttttgaccaagcaggaattcgatttgcgaggctcgacggtggtaaatcggacacacaacggagagcagcccttaagaaattcaggaatgaccctacgtgtaccgttttgctcgcgactctagggagtgctggagtgggacttgacctgacagtagcttgtcgagtacacatcatcgagctgcagtggaatcccatggtcgagcgccaggcattggatcgtgtgtaccgactgggacagcgcaacgctgtcacatgcttcacgtacgttacagagggaagcgattccattgagcagtatgtacggcgaatccagcagctcaagatagacctcatcaacagctccctcactggcgaaagcgctggaaaccccggtcttccaaagactgctttgttggatctcaccacaacactcaggagctcataacaagcgtagaccgcatggacatcgagtccattgcttataatagggcgaacatctttcatccctctattatcgagtaagatgatgctcatggtgccatcacccactcatcctctgtggacataagcccataagtcctagggctagcatcagctcagtgcatctacccctcccggaagcacaagatttcatcatcgtcaactctgaaacacccccgcaagacaacatgaaagagatcttgggggctctgaaacggcagcgaccatcataaagtctcgctgaagaagactctaagcgtgacaaacgcggatagcacgtgtgtgatatcgtctgcgtcaacttctcgatttctgcctgagatggaaggagatgatcagtattcgctatgtgcagccaggtccctctcagaaatatcgatcacctattaaatgatgactcacttcgtatctccatgttgtgcgccgaataggagctgattaacaccacattgatgcaggtacatggacctgaacgcggccgatatgggacttcttcatagagcaagcagtgaaaggactcatttcgttcggattcgcaatcgccgatgcgcacttcgtcaacgtattactgaacggcgcacccaaccaaagaaatgcagcatcaaccacgctcatcccgaaatccgctggaccacaattgcaagctatctgtgccgcgtctgattgcacactttcacccaatgacacgtgttctgcttacggaactatcaaagttccagcagttgcaaataccactcttgtaggcaacttcactaaagacgcgaatggacagacgacatgctgcaagaccgggtagtaacgacaagacctcatgttcatgtaagaaagacatggtccttgcagtaaaaacatatcaagttttctgcgtgtttatactaaagtttttcgcccttttatgggagtttcttcgaaattgatctcattgctgctctttttacgtgagcgtctagaaattttcaatgagtttcctctatcactggtctctcgccttgatgaaacatgctgcattttagcttgaactggtcaaaatcgtcgcaattcctgttgcactctgcgaaagagttacgtgcttacttgcaagatgtctctggaaactcaattatatgttcaaaattgagcatcaaggtgcatatcacatttcaaacagcttcgagtattttgtgtatcatatttgaccaaattagcaaaagagcgttgcgata

SEQ ID NO: 15101 - DNA, 204 bp, Muscodor strobelii
  misc_feature: SGI cDNA ID NO. 564992
  misc_feature: Encodes the peptide sequence at SEQ ID NO 15102
atgggttacgcatatcccgtatacgactcaagcggccaaatcacgaagtatgagtatgcgcagactcgtggccagctcaactacaccgagaagtcttgtacggacaaggacaaaaaggacaagaaggacaagaaacattcatgttccaaagacaaagacaagcatcactcttcgagcagcaagaaaaaaagtagcaagcattaa

SEQ ID NO: 15102 - protein, 67 aa, Muscodor strobelii
  misc_feature: SGI Peptide ID NO. 564992
MGYAYPVYDSSGQITKYEYAQTRGQLNYTEKSCTDKDKKDKKDKKHSCSKDKDKHHSSSSKKKSSKH

SEQ ID NO: 15103 - DNA, 1179 bp, Muscodor strobelii
  misc_feature: SGI cDNA ID NO. 564993
  misc_feature: Reduced expression when VOC is produced
  misc_feature: Encodes the peptide sequence at SEQ ID NO 15104
atgctcttgcccagctctgctctctatccttcatcaaacggcaatccaatctaccttcgtcttacgagcatcacaacactcgataatataccaacaactattactccctcacatctagcgaagatgtctcaagttcctaccgagcagtgggcgcaggttattgagaagaccggtggcccacctgtctacaagaagatccctgtggccaagcctggcccagatgaagttctcgtcaacatcaaatactccggcgtttgccacacagatctccacgccatgaagggcgattggcctttgtcaactaagctaccacttgtgggcggccatgaaggtgctggtgtggtcgttgcgcgtggcgaactcgtgaaggatgttgaaatcggcgaccacgttggcatcaagtggttgaatggatcgtgtatgagttgcagtttctgcagagtctctgatgagccattgtgtggtgagccactgctttctggatacaccgtagacggtagcttccagcaatacgcgattggaaaagctgtgcacgtcgcacggatacccaaggaatgcgatctcgaggctatcgcaccagttttgtgcgctggtatcaccgtctacaaaggtctcaaggaatcaggagtgaagcctggccaggacattgcaattgtcggagctggtggtggtttgggaagtatggctctacaatacgccaaagccatgggcctccacacaatcgctatcgacggtggagcggagaagggagaagtctgcaagaagctcggcgccgctgcttatgtcgatttcatgagctcggagaacctcaccgaggaagtgaagaaggccagtctggagggccagggtccccatggcgtccttctcgtcgctgtaaacgagaagcctttccaacaggcaagcgaatacgtgcgtagcaggggtaccatcgtctgcattggcttgcctgcaaacgcttacctcaaggcacctgttttcgagacggtaatccggatgattaacatcaagggaagttatgtcggcaacagacaagatactgccgaagctatcgagttctttagacggggtgtaatcaaggccccatataagactgtcggattaagcaagctcgcagacatatacgaattgatggagaagggtcaaatttcggggcgttatgttgttgacaccagcaaataa

SEQ ID NO: 15104 - protein, 392 aa, Muscodor strobelii
  misc_feature: SGI Peptide ID NO. 564993
  misc_feature (73)..(182): Pfam Id: PF08240 Pfam Desc: Alcohol dehydrogenase GroES-like domain
  misc_feature (212)..(355): Pfam Id: PF00107 Pfam Desc: Zinc-binding dehydrogenase
  misc_feature (43)..(392): NCBI GI: 261357028 Blast Desc: alcohol dehydrogenase [Verticillium albo-atrum VaMs.102]
  misc_feature (44)..(392): NCBI GI: 226529167 Blast Desc: LOC100274539 [Zea mays] gi|194708462|gb|ACF88315.1| [Zea mays]
  misc_feature (42)..(392): NCBI GI: 88766407 Blast Desc: alcohol dehydrogenase I [Metarhizium anisopliae]
  misc_feature (44)..(392): NCBI GI: 85083747 Blast Desc: alcohol dehydrogenase I [Neurospora crassa OR74A] gi|14285342|sp|Q9P6C8.1|ADH1_NEUCR RecName: Full=Alcohol dehydrogenase 1; AltName: Full=Alcohol dehydrogenase I ALCOHOL I
  misc_feature (22)..(392): NCBI GI: 189205889 Blast Desc: alcohol dehydrogenase 1 [Pyrenophora tritici-repentis Pt-1C-BFP] gi|187975372|gb|EDU41998.1| alcohol dehydrogenase 1 [Pyrenophora tritici-repentis Pt-1C-BFP]
  misc_feature (44)..(392): NCBI GI: 116204603 Blast Desc: alcohol dehydrogenase I [Chaetomium globosum CBS 148.51] gi|88176313|gb|EAQ83781.1| alcohol dehydrogenase I [Chaetomium globosum CBS 148.51]
  misc_feature (42)..(392): NCBI GI: 118429501 Blast Desc: Can a 1 allergen-like [Cochliobolus lunatus]
  misc_feature (42)..(392): NCBI GI: 154310831 Blast Desc: BC1G_06394 [Botryotinia fuckeliana B05.10] gi|150851193|gb|EDN26386.1| BC1G_06394 [Botryotinia fuckeliana B05.10]
  misc_feature (42)..(392): NCBI GI: 86278351 Blast Desc: alcohol dehydrogenase [Cochliobolus lunatus]
  misc_feature (45)..(392): NCBI GI: 171689220 Blast Desc: protein product [Podospora anserina] gi|170944572|emb|CAP70683.1| protein product [Podospora anserina]
  misc_feature (44)..(392): SWISSPROT Homolog: EC 1.1.1.1 Alcohol dehydrogenase
  misc_feature: Useful for introducing or modulating the production of volatile compounds
MLLPSSALYPSSNGNPIYLRLTSITTLDNIPTTITPSHLAKMSQVPTEQWAQVIEKTGGPPVYKKIPVAKPGPDEVLVNIKYSGVCHTDLHAMKGDWPLSTKLPLVGGHEGAGVVVARGELVKDVEIGDHVGIKWLNGSCMSCSFCRVSDEPLCGEPLLSGYTVDGSFQQYAIGKAVHVARIPKECDLEAIAPVLCAGITVYKGLKESGVKPGQDIAIVGAGGGLGSMALQYAKAMGLHTIAIDGGAEKGEVCKKLGAAAYVDFMSSENLTEEVKKASLEGQGPHGVLLVAVNEKPFQQASEYVRSRGTIVCIGLPANAYLKAPVFETVIRMINIKGSYVGNRQDTAEAIEFFRRGVIKAPYKTVGLSKLADIYELMEKGQISGRYVVDTSK

SEQ ID NO: 15105 - DNA, 1847 bp, Muscodor strobelii
  misc_feature: SGI EST ID NO. CUFF.36008.0
  misc_feature: Variant of the nucleotide sequence at SEQ ID NO 15103
gcgttaccgaaccatggacaccaggatgtgtcgactgttggaatagcttcccacaatctcgttgtccaccaatggggccaccagtgaaggccatgaaatctgaatagcgatcgtcatgttcgcttaatgcccaattctcgaacctctagccttgaaccttactcgagacaagctggggttagctaaccgctaaaccgaactccgcgtggctttcatggagggataatacctaggcaggcttagtgagagaaaacgcctcccatgactccggaatagctatgatcctgtagagcggcaagctaggatgtacgcggggtcttgggaatgttcgagctgtcatgtagtctgatcaacgacatcgcatgaacgacatcgtaatgggtgatgacgccgactataatagggacacttgtcccgcatgctcttgcccagctctgctctctatccttcatcaaacggcaatccaatctaccttcgtcttacgagcatcacaacactcgataatataccaacaactattactccctcacatctagcgaagatgtctcaagttcctaccgagcagtgggcgcaggttattgagaagaccggtggcccacctgtctacaagaagatccctgtggccaagcctggcccagatgaagttctcgtcaacatcaaatactccggcgtttgccacacagatctccacgccatgaagggcgattggcctttgtcaactaagctaccacttgtgggcggccatgaaggtgctggtgtggtcgttgcgcgtggcgaactcgtgaaggatgttgaaatcggcgaccacgttggcatcaagtggttgaatggatcgtgtatgagttgcagtttctgcagagtctctgatgagccattgtgtggtgagccactgctttctggatacaccgtagacggtagcttccagcaatacgcgattggaaaagctgtgcacgtcgcacggatacccaaggaatgcgatctcgaggctatcgcaccagttttgtgcgctggtatcaccgtctacaaaggtctcaaggaatcaggagtgaagcctggccaggacattgcaattgtcggagctggtggtggtttgggaagtatggctctacaatacgccaaagccatgggcctccacacaatcgctatcgacggtggagcggagaagggagaagtctgcaagaagctcggcgccgctgcttatgtcgatttcatgagctcggagaacctcaccgaggaagtgaagaaggccagtctggagggccagggtccccatggcgtccttctcgtcgctgtaaacgagaagcctttccaacaggcaagcgaatacgtgcgtagcaggggtaccatcgtctgcattggcttgcctgcaaacgcttacctcaaggcacctgttttcgagacggtaatccggatgattaacatcaagggaagttatgtcggcaacagacaagatactgccgaagctatcgagttctttagacggggtgtaatcaaggccccatataagactgtcggattaagcaagctcgcagacatatacgaattgatggagaagggtcaaatttcggggcgttatgttgttgacaccagcaaataaacttgtaataacataatttatagattttatagtggcgatatctataagcttatgaattgaagcttattcttgtctgaaaggatccgactattattattgatgcgacaactcgatttatcgctctgcgataacagagttgggtagcacctgaaagattacaagcgctgtgtataagaaaagaaagatatcaaagaacggctttgataatgtcttgtactgtcatctgatctattggcttgttcaacaccca

SEQ ID NO: 15106 - DNA, 1371 bp, Muscodor strobelii
  misc_feature: SGI cDNA ID NO. 564994
  misc_feature: Elevated expression when VOC is produced
  misc_feature: Encodes the peptide sequence at SEQ ID NO 15107
atgcggtttctcaacacaacgagtttcaaagtggaaatccccgaccgtcagccagattcatatgcaatactctcacatcgctgggaaggagccgagattaagttacaagagatcgaccggtacaccgatgagttgatatcaggaagacgtcccttgaggtcgcctcaagttgaaaagatctacggagcttgtcagatcgctcgaagcaaaggctttgaatggctatggatggacacttgttgcatagacaagacggatgcgcgcgaatatgccgaggccatcaactccatgtttgcctggtatcgtaggtcgaagttgtgtatcacatatctgagcgatgtgaagaagtcggagaatggctccgcttctagttccgaggtcttcaagagtgtaaaacgcaatgacaagagtgtaacacacaaggacgcgtcagaatggttctcgagaggttggactctacaagagttgctggcgccaggagacttggagttttacgatatggattggaactacattggcaacaagacggggctggccgctgtcattgcagacgtcactggtatcgatgcgcgatttcttactggagaaaaccccatcagagaagcttgcattgccgtgaagatgagctggatggcaaagcgccagactacctatcccgaggacataacctacagtatgatcggtatcttcaatataaacatgcctcttttgtacggcgagtccgggccacgcgcgttccgtcggctgcaagaaaccctgctcgccagcccgtatatggaagaatcgttgtttgcatggaagatgcccggcttggatgccggagaaggctgcaacgttttaaaagcggattgggaacctggccaatgggggctgttggctggttctcctgagtggttcgaagactccggagacattcaaatccgtagcggcagatccgcgcagtttcgcggctttagactcagctccaagggcctcgaggctccgatacgcattaacgtcaataagggtgctgatgttagaatcacgaaagctgcatctctagttctgtgcttcagcctcttgggcctgcctcttggtggcattggcctcttcataatgaggcatttgatgaaaaagaaaggagaacaggattatgcatacacgttgaactgtttccgaaccggggcagatggaaggtcaaagaatgtcgagatatatcttcggccagtccattttggaaaggttcatgtgctgcgcggacagcgtttgcatgtcaaaatcactccggagatcgagtgtaagagaatacggtgcaatgaggttggcttgacctcaaagaagataaaggactacggagaaggcaccgtctttcaacctcagcccggatattag

SEQ ID NO: 15107 - protein, 456 aa, Muscodor strobelii
  misc_feature: SGI Peptide ID NO. 564994
  misc_feature (21)..(155): Pfam Id: PF06985 Pfam Desc: Heterokaryon incompatibility protein (HET)
  misc_feature (1)..(403): NCBI GI: 46119876 Blast Desc: FG04807.1 [Gibberella zeae PH-1]
  misc_feature (1)..(341): NCBI GI: 261360908 Blast Desc: HET domain-containing protein [Verticillium albo-atrum VaMs.102]
  misc_feature (1)..(325): NCBI GI: 256728051 Blast Desc: NECHADRAFT_83471 [Nectria haematococca mpVI 77-13-4]
  misc_feature (1)..(284): NCBI GI: 261354085 Blast Desc: HET domain-containing protein [Verticillium albo-atrum VaMs.102]
  misc_feature (1)..(305): NCBI GI: 238493477 Blast Desc: conserved [Aspergillus flavus NRRL3357] gi|220696469|gb|EED52811.1| conserved [Aspergillus flavus NRRL3357]
  misc_feature (1)..(443): NCBI GI: 7981344 Blast Desc: related to beta transducin-like protein [Neurospora crassa]
  misc_feature (1)..(269): NCBI GI: 256733553 Blast Desc: [Nectria haematococca mpVI 77-13-4]
  misc_feature (1)..(325): NCBI GI: 85092369 Blast Desc: NCU04912 [Neurospora crassa OR74A] gi|28920765|gb|EAA30124.1| [Neurospora crassa OR74A]
  misc_feature (1)..(351): NCBI GI: 46107392 Blast Desc: FG00579.1 [Gibberella zeae PH-1]
  misc_feature (1)..(305): NCBI GI: 171680418 Blast Desc: protein product [Podospora anserina] gi|170939836|emb|CAP65061.1| protein product [Podospora anserina]
  misc_feature: Useful for introducing or modulating the production of volatile compounds
MRFLNTTSFKVEIPDRQPDSYAILSHRWEGAEIKLQEIDRYTDELISGRRPLRSPQVEKIYGACQIARSKGFEWLWMDTCCIDKTDAREYAEAINSMFAWYRRSKLCITYLSDVKKSENGSASSSEVFKSVKRNDKSVTHKDASEWFSRGWTLQELLAPGDLEFYDMDWNYIGNKTGLAAVIADVTGIDARFLTGENPIREACIAVKMSWMAKRQTTYPEDITYSMIGIFNINMPLLYGESGPRAFRRLQETLLASPYMEESLFAWKMPGLDAGEGCNVLKADWEPGQWGLLAGSPEWFEDSGDIQIRSGRSAQFRGFRLSSKGLEAPIRINVNKGADVRITKAASLVLCFSLLGLPLGGIGLFIMRHLMKKKGEQDYAYTLNCFRTGADGRSKNVEIYLRPVHFGKVHVLRGQRLHVKITPEIECKRIRCNEVGLTSKKIKDYGEGTVFQPQPGY

SEQ ID NO: 15108 - DNA, 2159 bp, Muscodor strobelii
  misc_feature: SGI EST ID NO. CUFF.36017.0
  misc_feature: Variant of the nucleotide sequence at SEQ ID NO 15106
aaattcttggcgccactttgtttaggcagcttagaatgcttccatcatattgtcgccatcgcagctagtagcctcgaaaatgagtatgcgaagggtatgaaaagaacaaatacctcaaagccaatatgcataagatttgattactacgctggtctgcgtacttctttatgccactacatctacgacagtgcctcgttgtatcaccagaaaattcggttcgaccgttgagttcaaaggctccggctctctactccagcctcattggtcgaactaccacgatattgaagttacgaaacacgaaccaagatttctaattatgtagtattatctacataggatctaatcaaatgaaaaagaggccaggcgctttctgaaccccttctactaagcaaatttgggggccagatctctaattgacatcgcttcctaggactagttcagaatgaaaaagcaacacaaggctggcgaatataaatagagacttcttggctggcagtcatgcacgacgctatcatcattatcaataatctcgtcctgaacatcgattcatctcacttacttctctccctcatcaatttcgtgtcgtaaatcatcctcatccaatatgcggtttctcaacacaacgagtttcaaagtggaaatccccgaccgtcagccagattcatatgcaatactctcacatcgctgggaaggagccgagattaagttacaagagatcgaccggtacaccgatgagttgatatcaggaagacgtcccttgaggtcgcctcaagttgaaaagatctacggagcttgtcagatcgctcgaagcaaaggctttgaatggctatggatggacacttgttgcatagacaagacggatgcgcgcgaatatgccgaggccatcaactccatgtttgcctggtatcgtaggtcgaagttgtgtatcacatatctgagcgatgtgaagaagtcggagaatggctccgcttctagttccgaggtcttcaagagtgtaaaacgcaatgacaagagtgtaacacacaaggacgcgtcagaatggttctcgagaggttggactctacaagagttgctggcgccaggagacttggagttttacgatatggattggaactacattggcaacaagacggggctggccgctgtcattgcagacgtcactggtatcgatgcgcgatttcttactggagaaaaccccatcagagaagcttgcattgccgtgaagatgagctggatggcaaagcgccagactacctatcccgaggacataacctacagtatgatcggtatcttcaatataaacatgcctcttttgtacggcgagtccgggccacgcgcgttccgtcggctgcaagaaaccctgctcgccagcccgtatatggaagaatcgttgtttgcatggaagatgcccggcttggatgccggagaaggctgcaacgttttaaaagcggattgggaacctggccaatgggggctgttggctggttctcctgagtggttcgaagactccggagacattcaaatccgtagcggcagatccgcgcagtttcgcggctttagactcagctccaagggcctcgaggctccgatacgcattaacgtcaataagggtgctgatgttagaatcacgaaagctgcatctctagttctgtgcttcagcctcttgggcctgcctcttggtggcattggcctcttcataatgaggcatttgatgaaaaagaaaggagaacaggattatgcatacacgttgaactgtttccgaaccggggcagatggaaggtcaaagaatgtcgagatatatcttcggccagtccattttggaaaggttcatgtgctgcgcggacagcgtttgcatgtcaaaatcactccggagatcgagtgtaagagaatacggtgcaatgaggttggcttgacctcaaagaagataaaggactacggagaaggcaccgtctttcaacctcagcccggatattagttctgtcgcaacgcctgacataaacatttcatgctttatggctcttgaagcctgactcccatttgtattaatagtttttcttaatgttgccagagtattatgtacatccataaatggtgtgttcgaataactgaatgatattccatagaaaacgcaccagacaatacgaattctgacatttgca

SEQ ID NO: 15109 - DNA, 2286 bp, Muscodor strobelii
  misc_feature: SGI cDNA ID NO. 564995
  misc_feature: Reduced expression when VOC is produced
  misc_feature: Encodes the peptide sequence at SEQ ID NO 15110
atgcagtacgttcgaaacatcagcgactccgtttccaccgcctggaactcgatcaacccggcgaccctcagcggcgccatcgatgtcatcgtggtcgagaacgaggagggcgagctgttctgctcgcccttccacgtgcgcttcggcaagttctcgctgctgcgcccctacgagaagaaggtcgagttccgggtcaatggcgtcaaacaggactacgccatgaagctcggcgagggcggcgaggccttcttcgtcatggaaacaaacgacgacatcccccagagcttgcagacatcgccgctcgtctcccccgccgccagcccgtccctcagccccgagctgcccatgcagtccaacaatctgtccgaacccgacctcctgcagctcgacagtgacgatgcgaagcggaagacagtaaacatctcgcgcccggggcccagtgttcttgctgcccaacattttcgcttaggcgcggcggggcctgccctttcatcacctgagctggagtcagggcggccaagctctcgagactggaacgatgccacactacggcatgctccctccagcgacgatgtcttggccccatcggcgaggatcactaccgaaaacgactattctaatgacgaagacgacgacgaggacagcccgtatgggtctcagcgatcccgtagtccgccccccttagcccctcgcgaagctatagtacgggccatgacgctgtcggaacatctccaagctgctaacatctccacgagagtcactaagagtggtgacctaatgctcgatatggcatcgtacaaaaatagtgaagaagactctatcaaggccgagattttggcacgcaagattctgtccgaggaattacagggagattatgatattggtgctctgataggcatggatgaggaaggcaacctctggatctacagtagcgaggaagcaaaagaggccgcaatgcagaaaatgatgggatcacttcggccctcaccaacgatgaacatcgatgccgcttcggatcccggttatgcgagtgacgattcagctacctcttctcgcgatcccatgcatcgccgcagcgaatccgacgtgggccatggctctgtacacacaccgcccaccaccccgggctcggcttccactactggccaccaccatcaacataagcagacgaattacgcaaagaccctccggctgaggagtcaccagctcaaagcccttgaactgaagcccggggagaacacgatgagttttaccgtcaacaaagcgacgtgcagcgcccagatgttcctgtggcgccacgatacgcctgttgtgatctcggacatcgacggcaccatcaccaagtccgatgcccttggccatttgctcaacttcgtgggccgcgactggacacacgccggcgtcgctaagctatactgcgatatcgtagcgaatgggtataacatcatgtaccttactagccgatcagtcggccaatctgacggcacacgtgcctacctcaacggtgtcctgcaagacggatacagattacccaagggcccgacgatcctctcgcctgatcgaaccatggcggccttgcgacgtgaagtgtatcttaggaagccgcacgtttttaagatggccacgctgcgagatatccgatccttattcggacccgagaaccactgtttctacgctggatttggcaaccgacttacagatcagatctcgtacaggacggtcgatgtgccgcaaacaagaatcttcaccatcaactcgaacgccgaggtctcgcttgacttgcttagtttgaacaagctgaaacttagctacgtgaatatgggcgaggttgtcgatcactatttcccaccggtcagcacgctggtgaaaggcggtggtgcggaatacactgatttcacgtattggcgggatacaccactggaactcgatgcgttctccgcgagtgagtcggaagagggatatgcagaggacgaagaagaggacgaggatgtgggagagatgggagatagctatctatccagaggtgacgatgacgatgttgatggaggggagagtgtcttgagtggtgactatgaagtagaggggaatatgcttgattctaggattttggatcaaatcgaggatgcagatgatgaagacgaggacgatcttgacagtgaggacgcggacgatacgcaggatcttagaccggtacagaagagggctgggtcgaaggacgcggtgagggacctggatgcggaaatcattaccggggtcaagaatttgggtgttacagccgagaaataa

SEQ ID NO: 15110 - protein, 761 aa, Muscodor strobelii
  misc_feature: SGI Peptide ID NO. 564995
  misc_feature (1)..(107): Pfam Id: PF04571 Pfam Desc: lipin, N-terminal conserved region
  misc_feature (437)..(593): Pfam Id: PF08235 Pfam Desc: LNS2 (Lipin/Ned1/Smp2)
  misc_feature (1)..(757): NCBI GI: 116180504 Blast Desc: CHGG_00880 [Chaetomium globosum CBS 148.51] gi|88185177|gb|EAQ92645.1| CHGG_00880 [Chaetomium globosum CBS 148.51]
  misc_feature (1)..(760): NCBI GI: 39951337 Blast Desc: MGG_01311 [Magnaporthe grisea 70-15] gi|145020875|gb|EDK05004.1| MGG_01311 [Magnaporthe grisea 70-15]
  misc_feature (1)..(760): NCBI GI: 171687755 Blast Desc: protein product [Podospora anserina] gi|170943839|emb|CAP69491.1| protein product [Podospora anserina]
  misc_feature (1)..(757): NCBI GI: 256734730 Blast Desc: [Nectria haematococca mpVI 77-13-4]
  misc_feature (1)..(645): NCBI GI: 46107968 Blast Desc: FG00866.1 [Gibberella zeae PH-1]
  misc_feature (1)..(760): NCBI GI: 164427272 Blast Desc: nuclear elongation and deformation protein 1 [Neurospora crassa OR74A] gi|157071676|gb|EAA34950.2| nuclear elongation and deformation protein 1 [Neurospora crassa OR74A]
  misc_feature (1)..(761): NCBI GI: 261358695 Blast Desc: nuclear elongation and deformation protein [Verticillium albo-atrum VaMs.102]
  misc_feature (1)..(760): NCBI GI: 156054654 Blast Desc: SS1G_06175 [Sclerotinia sclerotiorum 1980] gi|154703955|gb|EDO03694.1| SS1G_06175 [Sclerotinia sclerotiorum 1980]
  misc_feature (1)..(760): NCBI GI: 154296366 Blast Desc: BC1G_13009 [Botryotinia fuckeliana B05.10] gi|150843370|gb|EDN18563.1| BC1G_13009 [Botryotinia fuckeliana B05.10]
  misc_feature (1)..(680): NCBI GI: 67517043 Blast Desc: AN0802.2 [Aspergillus nidulans FGSC A4] gi|40746476|gb|EAA65632.1| AN0802.2 [Aspergillus nidulans FGSC A4] gi|259488916|tpe|CBF88754.1| TPA: lipin Smp2, AFUA_1G14610)
  misc_feature: Useful for introducing or modulating the production of volatile compounds
MQYVRNISDSVSTAWNSINPATLSGAIDVIVVENEEGELFCSPFHVRFGKFSLLRPYEKKVEFRVNGVKQDYAMKLGEGGEAFFVMETNDDIPQSLQTSPLVSPAASPSLSPELPMQSNNLSEPDLLQLDSDDAKRKTVNISRPGPSVLAAQHFRLGAAGPALSSPELESGRPSSRDWNDATLRHAPSSDDVLAPSARITTENDYSNDEDDDEDSPYGSQRSRSPPPLAPREAIVRAMTLSEHLQAANISTRVTKSGDLMLDMASYKNSEEDSIKAEILARKILSEELQGDYDIGALIGMDEEGNLWIYSSEEAKEAAMQKMMGSLRPSPTMNIDAASDPGYASDDSATSSRDPMHRRSESDVGHGSVHTPPTTPGSASTTGHHHQHKQTNYAKTLRLRSHQLKALELKPGENTMSFTVNKATCSAQMFLWRHDTPVVISDIDGTITKSDALGHLLNFVGRDWTHAGVAKLYCDIVANGYNIMYLTSRSVGQSDGTRAYLNGVLQDGYRLPKGPTILSPDRTMAALRREVYLRKPHVFKMATLRDIRSLFGPENHCFYAGFGNRLTDQISYRTVDVPQTRIFTINSNAEVSLDLLSLNKLKLSYVNMGEVVDHYFPPVSTLVKGGGAEYTDFTYWRDTPLELDAFSASESEEGYAEDEEEDEDVGEMGDSYLSRGDDDDVDGGESVLSGDYEVEGNMLDSRILDQIEDADDEDEDDLDSEDADDTQDLRPVQKRAGSKDAVRDLDAEIITGVKNLGVTAEK

SEQ ID NO: 15111 - DNA, 3131 bp, Muscodor strobelii
  misc_feature: SGI EST ID NO. CUFF.36026.0
  misc_feature: Variant of the nucleotide sequence at SEQ ID NO 15109
cgctattccgaggcagctgatgacggcggcgacagagaagctagcaggaactacgtcactagtggccagggtctctcagcaaaaagccacgccaaaacagtgcttaccagaagtcctttggtgagccctgcggcgaagatacatgacagccgtccagaggccgtccattactacggcaagcattctccattccagtccatacctctagtcgcagtacaatacgactcttcatccgtaaattcagctcttattgtgctcaattattcgactgactctcgtatcgcgatcaaaagtttagtcgctttattattcggtctcttgtgctttgcgctatgcggattggtctttagtctagtagcttaattcatgcagcgcagctgccagggaccctctcaacaacctgggaagtcatccccaacaaccacagctgccatcataagtggccattatataggcgaccaccactttcgtattttgcggtaccgggcgcctcgtctgcgctcgccagcacatttggtctgagggcctttcaacctcctttttttttttgcaagtttgacagtcacatcaccaccagacgatgcagtacgttcgaaacatcagcgactccgtttccaccgcctggaactcgatcaacccggcgaccctcagcggcgccatcgatgtcatcgtggtcgagaacgaggagggcgagctgttctgctcgcccttccacgtgcgcttcggcaagttctcgctgctgcgcccctacgagaagaaggtcgagttccgggtcaatggcgtcaaacaggactacgccatgaagctcggcgagggcggcgaggccttcttcgtcatggaaacaaacgacgacatcccccagagcttgcagacatcgccgctcgtctcccccgccgccagcccgtccctcagccccgagctgcccatgcagtccaacaatctgtccgaacccgacctcctgcagctcgacagtgacgatgcgaagcggaagacagtaaacatctcgcgcccggggcccagtgttcttgctgcccaacattttcgcttaggcgcggcggggcctgccctttcatcacctgagctggagtcagggcggccaagctctcgagactggaacgatgccacactacggcatgctccctccagcgacgatgtcttggccccatcggcgaggatcactaccgaaaacgactattctaatgacgaagacgacgacgaggacagcccgtatgggtctcagcgatcccgtagtccgccccccttagcccctcgcgaagctatagtacgggccatgacgctgtcggaacatctccaagctgctaacatctccacgagagtcactaagagtggtgacctaatgctcgatatggcatcgtacaaaaatagtgaagaagactctatcaaggccgagattttggcacgcaagattctgtccgaggaattacagggagattatgatattggtgctctgataggcatggatgaggaaggcaacctctggatctacagtagcgaggaagcaaaagaggccgcaatgcagaaaatgatgggatcacttcggccctcaccaacgatgaacatcgatgccgcttcggatcccggttatgcgagtgacgattcagctacctcttctcgcgatcccatgcatcgccgcagcgaatccgacgtgggccatggctctgtacacacaccgcccaccaccccgggctcggcttccactactggccaccaccatcaacataagcagacgaattacgcaaagaccctccggctgaggagtcaccagctcaaagcccttgaactgaagcccggggagaacacgatgagttttaccgtcaacaaagcgacgtgcagcgcccagatgttcctgtggcgccacgatacgcctgttgtgatctcggacatcgacggcaccatcaccaagtccgatgcccttggccatttgctcaacttcgtgggccgcgactggacacacgccggcgtcgctaagctatactgcgatatcgtagcgaatgggtataacatcatgtaccttactagccgatcagtcggccaatctgacggcacacgtgcctacctcaacggtgtcctgcaagacggatacagattacccaagggcccgacgatcctctcgcctgatcgaaccatggcggccttgcgacgtgaagtgtatcttaggaagccgcacgtttttaagatggccacgctgcgagatatccgatccttattcggacccgagaaccactgtttctacgctggatttggcaaccgacttacagatcagatctcgtacaggacggtcgatgtgccgcaaacaagaatcttcaccatcaactcgaacgccgaggtctcgcttgacttgcttagtttgaacaagctgaaacttagctacgtgaatatgggcgaggttgtcgatcactatttcccaccggtcagcacgctggtgaaaggcggtggtgcggaatacactgatttcacgtattggcgggatacaccactggaactcgatgcgttctccgcgagtgagtcggaagagggatatgcagaggacgaagaagaggacgaggatgtgggagagatgggagatagctatctatccagaggtgacgatgacgatgttgatggaggggagagtgtcttgagtggtgactatgaagtagaggggaatatgcttgattctaggattttggatcaaatcgaggatgcagatgatgaagacgaggacgatcttgacagtgaggacgcggacgatacgcaggatcttagaccggtacagaagagggctgggtcgaaggacgcggtgagggacctggatgcggaaatcattaccggggtcaagaatttgggtgttacagccgagaaataagactggcgggagtaagaagggtgcatacttggattttcagcatagcgtggtgtttggggtcaggaatgctttttgtatgcacgggggcttcaacaaccggataacagttcgattaaacatctgatcatatcatgcgtaatcgtctgaatctatgtttgccttgtgctgtatcatataatggtacaaccttgaataagcagcattgttaattacggagtgttgccaatgtgatagggtaagagtagttgtatcacgcaatttggta

SEQ ID NO: 15112 - DNA, 831 bp, Muscodor strobelii
  misc_feature: SGI cDNA ID NO. 564996
  misc_feature: Encodes the peptide sequence at SEQ ID NO 15113
atgtcgacggcctcgcaaccgaacggggtgccctcgtcctcggccggaccttcgcagtcgcaaaccatctcccagtctcagcccacgcagaccaccaccacgagcggcaccacgacggtccccaacacccagtccactatccctcctgctgctggcggtccgcccagcccgacatcacactcggccccgcgaccccgcgacgcccgcaccatcgagctcctgctcaccagccaaggcgtcacctccttcgaccagcgcgtccctcttctcctcctcgacttcgcctaccgacacacatcttccattctcaacgacgccctccatctctcaggtgatccctacaccacacatgccggcgccaagcctagtggctcctccggcgcagtcccccaggcccctcccggcggcgatgcaactgtcactaataatgccatcaacatcgccatctcctcacgccagtactaccaattccgcggcggtgctggtggctcgggcacaggcggtgtaggcggcggaggagtgagcaaagagtggctgcaggagatcgcccgcgagcgcaaccgcgtcgccttgcctcgtgtcctggccaacgaatggggtgtccgactgcccaacgagcgcttcgtcctcagcggccagagctggggtctcaaggaggagcttcccggtggtgagagcagcgacgaggacaacgacgatgacgacgcaatggaggggctggagaccacgacagccaaacctagcgacggcaagaaggacggcgaggaaggcggactggaggagttccttgacgatgacctcggggatgaggagatggagggtatggagtag

SEQ ID NO: 15113 - protein, 276 aa, Muscodor strobelii
  misc_feature: SGI Peptide ID NO. 564996
  misc_feature (54)..(218): Pfam Id: PF02291 Pfam Desc: Transcription initiation factor IID, 31kD subunit
  misc_feature (54)..(110): Pfam Id: PF02291 Pfam Desc: Transcription initiation factor IID, 31kD subunit
  misc_feature (176)..(218): Pfam Id: PF02291 Pfam Desc: Transcription initiation factor IID, 31kD subunit
  misc_feature (2)..(241): NCBI GI: 46107964 Blast Desc: FG00864.1 [Gibberella zeae PH-1]
  misc_feature (1)..(272): NCBI GI: 39951335 Blast Desc: MGG_01310 [Magnaporthe grisea 70-15] gi|145020876|gb|EDK05005.1| MGG_01310 [Magnaporthe grisea 70-15]
  misc_feature (63)..(258): NCBI GI: 85111959 Blast Desc: NCU03138 [Neurospora crassa OR74A] gi|28925958|gb|EAA34951.1| NCU03138 [Neurospora crassa OR74A] gi|38567266|emb|CAE76556.1| related to TFIID and SAGA subunit
  misc_feature (2)..(272): NCBI GI: 256734731 Blast Desc: NECHADRAFT_75277 [Nectria haematococca mpVI 77-13-4]
  misc_feature (61)..(226): NCBI GI: 171687753 Blast Desc: protein product [Podospora anserina] gi|170943838|emb|CAP69490.1| protein product [Podospora anserina]
  misc_feature (64)..(271): NCBI GI: 156040507 Blast Desc: SS1G_12270 [Sclerotinia sclerotiorum 1980] gi|154696326|gb|EDN96064.1| SS1G_12270 [Sclerotinia sclerotiorum 1980]
  misc_feature (64)..(218): NCBI GI: 154320816 Blast Desc: BC1G_01880 [Botryotinia fuckeliana B05.10] gi|150853569|gb|EDN28761.1| BC1G_01880 [Botryotinia fuckeliana B05.10]
  misc_feature (3)..(219): NCBI GI: 70996148 Blast Desc: transcription initiation factor TFIID, 31kD subunit [Aspergillus fumigatus Af293] gi|66850464|gb|EAL90791.1| transcription initiation factor TFIID, 31kD subunit, [Aspergillus
  misc_feature (27)..(241): NCBI GI: 67517027 Blast Desc: AN0794.2 [Aspergillus nidulans FGSC A4] gi|40746468|gb|EAA65624.1| AN0794.2 [Aspergillus nidulans FGSC A4] gi|259488924|tpe|CBF88768.1| TPA: transcription initiation
  misc_feature (3)..(122): NCBI GI: 261358697 Blast Desc: conserved [Verticillium albo-atrum VaMs.102]
MSTASQPNGVPSSSAGPSQSQTISQSQPTQTTTTSGTTTVPNTQSTIPPAAGGPPSPTSHSAPRPRDARTIELLLTSQGVTSFDQRVPLLLLDFAYRHTSSILNDALHLSGDPYTTHAGAKPSGSSGAVPQAPPGGDATVTNNAINIAISSRQYYQFRGGAGGSGTGGVGGGGVSKEWLQEIARERNRVALPRVLANEWGVRLPNERFVLSGQSWGLKEELPGGESSDEDNDDDDAMEGLETTTAKPSDGKKDGEEGGLEEFLDDDLGDEEMEGME

SEQ ID NO: 15114 - DNA, 2117 bp, Muscodor strobelii
  misc_feature: SGI EST ID NO. CUFF.36110.0
  misc_feature: Variant of the nucleotide sequence at SEQ ID NO 15112
cctgactgccccacatcacgttccccagtatcgataagatctcttgatccaaccccctgcgtgtgggagctccaagatggaagtcgcgactgtgaacttgagctgcaattgctctgtacaagatccagctccttccattctcaaactctcaaccccattcaccctccctcttgcctcgccgttgtgtcgcgcgcctttattccctctctttctcccatcgccaactgtcaagcattgggctggatagctttcacccaagtgggtgcatcacaggttgcactgactgatcgcatccatcgcatcccatcgcatccattgcacaattaagtcaacattcatattcactgccacacgagattccgcgcctgaggtaaacaaacgccgcgatcacgtctgatttgtcatgtctctaaacttactcgctgtgcaaagcattcaacagtagaccagtatcacaagctctcggccaagatgtcgacggcctcgcaaccgaacggggtgccctcgtcctcggccggaccttcgcagtcgcaaaccatctcccagtctcagcccacgcagaccaccaccacgagcggcaccacgacggtccccaacacccagtccactatccctcctgctgctggcggtccgcccagcccgacatcacactcggccccgcgaccccgcgacgcccgcaccatcgagctcctgctcaccagccaaggcgtcacctccttcgaccagcgcgtccctcttctcctcctcgacttcgcctaccgacacacatcttccattctcaacgacgccctccatctctcaggtgatccctacaccacacatgccggcgccaagcctagtggctcctccggcgcagtcccccaggcccctcccggcggcgatgcaactgtcactaataatgccatcaacatcgccatctcctcacgccagtactaccaattccgcggcggtgctggtggctcgggcacaggcggtgtaggcggcggaggagtgagcaaagagtggctgcaggagatcgcccgcgagcgcaaccgcgtcgccttgcctcgtgtcctggccaacgaatggggtgtccgactgcccaacgagcgcttcgtcctcagcggccagagctggggtctcaaggaggagcttcccggtggtgagagcagcgacgaggacaacgacgatgacgacgcaatggaggggctggagaccacgacagccaaacctagcgacggcaagaaggacggcgaggaaggcggactggaggagttccttgacgatgacctcggggatgaggagatggagggtatggagtagggctcagatgctcttcctcaggcttctctcacccacgcaaacgtgagcaatctgccgaccccgagcgatagggagacacaggttatggagtaggcatccgatcctcaagtcacatcgtactcccaagttccccctggaaatgatcatagtccccaggcatcctatttgcaaattggtccggaagatgccattgctccagaggactcgacttcccaagtacctaccgtggacgataccgatccacaggcaccatacgatcaagcagccccgggccacatttatgaaccgcaggcacctcatttccagaatcacccggcagctgaatatgctcatcgcactgaacccgtgtataacaggaggacgagtctcttttctcacatttatgaccaaccacctcccgcctggcctttgccgaggaacggagaggtagtgtacgatgccaatggtcaggttgtattcgaccccgatactggtctgcctgttgtaaagcggcagaacccagggcaacagggagaatggcaatagcgacgtttggggacggaacggcgaagtagttgattttcctcgattctgtgttatggctacgactcttccagcgctgatagctgtcgcagctggccgagtggatggatagctcggcttggctttagtatggcgtcaggagtagtagataatccaatatcgttctgtagcaaagatctctgatactcatgaaactgaacatcatagatgagtgtcggtttgtgatattacataccgccgggatcacaatgctaagtggtatatggcagtaagcaagtgataatggaataagc

SEQ ID NO: 15115 - DNA, 2631 bp, Muscodor strobelii
  misc_feature: SGI cDNA ID NO. 564997
  misc_feature: Reduced expression when VOC is produced
  misc_feature: Encodes the peptide sequence at SEQ ID NO 15116
atggaatccactctacctctgccctttctcatctctgtcgctgttcccccggggctagcaaacagcgagggactgagtcgagatgaagtctcatgtcttgggtgtgtcttctttgaagcttcctcgacgaatcttgagaagcttcttaagctattgacacaacacaatgccgagtttcacaccttctttgacgccaccgccttagagtcacgagacgatatagtgtcgcttctggatcatggcgcaagaaaagtcttcatccagccggcaagactatcggagttttccgactttggcgagagagtcgccccggctgtcaccaagctcaatcagatcacgggctcggagaagacgttgctacttaaggatttcgatcagaggaactgtgatgttgccggcttcttagaatctagcactatcgaaaaacttccggccttgtatatcaaacctatatctgacaccatttatgagcatttcgtagatatctgctcacaagttaaagccactcctatcttgccgtcaacgcagttgacaaccaagaaggatgaggccgacaagaaactgttcattcctaagctcttttcaacggggtggaagaccgaccgggcagacaaattgttaccgaccgtagtatgcgatgagcgtggtatagccctaggcctggtttacagtagcgaagagagcgttgccgagtcactgagaacgcagacaggggtctaccagagccgcaaacgaggactttggtacaaaggtgcatcatcgggggatacgcaagagcttgtccggatatcaatggactgtgataatgatgcactgaagttcgtcgtccgacagactggaagattttgccatttagagcagttcggctgcttcggtgatctgaagggaatctcaaaactcgagcagactttggtgtcaagaaaggggtctgcgcccgaaggatcctacacgaaacggctgttctccgatgagaagttattacgagccaagattatggaggaggctcaggagctttgtgatgccaagacgcccgacgaagttgcattcgaggctgcggatttgatctactttgctttgacgaaagctatcggtgctggtgttagtcttgctgacatcgagaagaatctggatgcgaagagcctcaaggtgaagagacggccgggaaatgccaagggcgaatgggcgaagaaggaaggaataccgactggcccagctgaggaggcaaaggaggctgccaaggaatcagctgtaccattaacatcagctcccgcaaaggaggccgacaccgcaccaaacgcagagaaaatcgtaatgaggcgagtagatgtcagcaaagtcagtgctacggaggtttcagatgcgttgagacggccatcccagaagtctgcagagactattatgggcattgtgacaccaatcatcaacgacatccgccaaaatggcgacaaagctcttctctcttacactcacaagtttgagaaagctacctcattaacatcaccagttctaaaagccccattcccggaatctctcatgaaactcgcgcccgaaactatcaaagctattgatacctctttcgataacattcgaaagtttcacgcggcacagaaagaggagaagcccctccaggtagagaccatgcctggtgtggtgtgcagcagattctcgcgccccatcgagcgtgtcggtctatacgttccaggtggcaccgcagtgctaccaagcactgcgctgatgttaggcgtccctgcgatggttgccggttgcaagaaaatcgtgctagcttcacctcctcgctctgacggaagtatcacacctgagattgtatatgctgctcacaaggtcggcgcagaaagcatagtcttggctggtggtgcgcaagctgttgcggccatggcgtatggcactgagagtgtgagcaaggttgacaagattcttggccctggaaaccagttcgtgactgctgccaagatgtttgtgagcaatgataccaatgccggtgtcagcatcgatatgcctgctggaccgtctgaagtcctcgtcatcgcagacaaggacgcgaatcctgcttttgtcgcctcagacctcttgtcgcaagctgagcatggtgttgatagtcaagtcgtcttgatcgctgtcaatcttgatgaggctggtctgaaggcaatcgaggatgaagttcacaagcaagcgatggctcttccgcgtgttgacattgttcgtggggcgattaaccactccgttactgttatcgtgaaggatgtggaggaagctatgaggattagcaatgactacgcgcccgagcacttgatcttacagcttcaagacgcagagaaggttgtggacctggtcatgaatgccggaagtgtttttattggacagtggacacctgagagcgttggtgattattcggccggtgtcaatcattccctaccaacatacggttacgccaagcaatactcaggtgtgaacctgggttcgttcgttaagcacattacgagttcgaacttgacggctgagggtctgaggaatgttagcggcgcagtcatgcagttggcaaaggtggaagagctagaggcccacaggcgcgccgtcgagattaggttagcaactctggatgggaaggcttga

SEQ ID NO: 15116 - protein, 876 aa, Muscodor strobelii
  misc_feature: SGI Peptide ID NO. 564997
  misc_feature (451)..(870): Pfam Id: PF00815 Pfam Desc: Histidinol dehydrogenase
  misc_feature (220)..(293): Pfam Id: PF01502 Pfam Desc: Phosphoribosyl-AMP cyclohydrolase
  misc_feature (297)..(381): Pfam Id: PF01503 Pfam Desc: Phosphoribosyl-ATP pyrophosphohydrolase
  misc_feature (1)..(873): NCBI GI: 171687751 Blast Desc: protein product [Podospora anserina] gi|170943837|emb|CAP69489.1| protein product [Podospora anserina]
  misc_feature (1)..(869): NCBI GI: 85111961 Blast Desc: histidine biosynthesis trifunctional protein [Neurospora crassa OR74A] gi|67476485|sp|P07685.3|HIS2_NEUCR RecName: Full=Histidine biosynthesis trifunctional protein;
  misc_feature (1)..(869): NCBI GI: 2853025 Blast Desc: histidine-3 protein [Neurospora crassa]
  misc_feature (1)..(869): NCBI GI: 2853023 Blast Desc: histidine-3 protein [Neurospora crassa]
  misc_feature (1)..(876): NCBI GI: 39951333 Blast Desc: MGG_01309 [Magnaporthe grisea 70-15] gi|145020877|gb|EDK05006.1| MGG_01309 [Magnaporthe grisea 70-15]
  misc_feature (1)..(873): NCBI GI: 256735435 Blast Desc: [Nectria haematococca mpVI 77-13-4]
  misc_feature (1)..(872): NCBI GI: 46107966 Blast Desc: FG00865.1 [Gibberella zeae PH-1]
  misc_feature (1)..(873): NCBI GI: 154320814 Blast Desc: BC1G_01879 [Botryotinia fuckeliana B05.10] gi|150853568|gb|EDN28760.1| BC1G_01879 [Botryotinia fuckeliana B05.10]
  misc_feature (1)..(875): NCBI GI: 156040505 Blast Desc: SS1G_12269 [Sclerotinia sclerotiorum 1980] gi|154696325|gb|EDN96063.1| SS1G_12269 [Sclerotinia sclerotiorum 1980]
  misc_feature (1)..(873): NCBI GI: 116180508 Blast Desc: CHGG_00882 [Chaetomium globosum CBS 148.51] gi|88185179|gb|EAQ92647.1| CHGG_00882 [Chaetomium globosum CBS 148.51]
  misc_feature (1)..(869): SWISSPROT Homolog: EC 1.1.1.23 Histidinol dehydrogenase
  misc_feature (1)..(869): SWISSPROT Homolog: EC 3.6.1.31 Phosphoribosyl-ATP diphosphatase
  misc_feature (1)..(869): SWISSPROT Homolog: EC 3.5.4.19 Phosphoribosyl-AMP cyclohydrolase
  misc_feature: Useful for introducing or modulating the production of volatile compounds
MESTLPLPFLISVAVPPGLANSEGLSRDEVSCLGCVFFEASSTNLEKLLKLLTQHNAEFHTFFDATALESRDDIVSLLDHGARKVFIQPARLSEFSDFGERVAPAVTKLNQITGSEKTLLLKDFDQRNCDVAGFLESSTIEKLPALYIKPISDTIYEHFVDICSQVKATPILPSTQLTTKKDEADKKLFIPKLFSTGWKTDRADKLLPTVVCDERGIALGLVYSSEESVAESLRTQTGVYQSRKRGLWYKGASSGDTQELVRISMDCDNDALKFVVRQTGRFCHLEQFGCFGDLKGISKLEQTLVSRKGSAPEGSYTKRLFSDEKLLRAKIMEEAQELCDAKTPDEVAFEAADLIYFALTKAIGAGVSLADIEKNLDAKSLKVKRRPGNAKGEWAKKEGIPTGPAEEAKEAAKESAVPLTSAPAKEADTAPNAEKIVMRRVDVSKVSATEVSDALRRPSQKSAETIMGIVTPIINDIRQNGDKALLSYTHKFEKATSLTSPVLKAPFPESLMKLAPETIKAIDTSFDNIRKFHAAQKEEKPLQVETMPGVVCSRFSRPIERVGLYVPGGTAVLPSTALMLGVPAMVAGCKKIVLASPPRSDGSITPEIVYAAHKVGAESIVLAGGAQAVAAMAYGTESVSKVDKILGPGNQFVTAAKMFVSNDTNAGVSIDMPAGPSEVLVIADKDANPAFVASDLLSQAEHGVDSQVVLIAVNLDEAGLKAIEDEVHKQAMALPRVDIVRGAINHSVTVIVKDVEEAMRISNDYAPEHLILQLQDAEKVVDLVMNAGSVFIGQWTPESVGDYSAGVNHSLPTYGYAKQYSGVNLGSFVKHITSSNLTAEGLRNVSGAVMQLAKVEELEAHRRAVEIRLATLDGKA

SEQ ID NO: 15117 - DNA, 2935 bp, Muscodor strobelii
  misc_feature: SGI EST ID NO. CUFF.35948.0
  misc_feature: Variant of the nucleotide sequence at SEQ ID NO 15115
cattgacccagccgaatgaaaaagctgcaggccgatgtaggaaccgtctgtgacgctgcctctatgtcataattgatactagtcaaatctcatctatgctcgttctgttctatctgttttatttcgattgcaacctttattccaatcggaagtgagagtttgtgacaacacgacccctcctgggccaattggacatggaatccactctacctctgccctttctcatctctgtcgctgttcccccggggctagcaaacagcgagggactgagtcgagatgaagtctcatgtcttgggtgtgtcttctttgaagcttcctcgacgaatcttgagaagcttcttaagctattgacacaacacaatgccgagtttcacaccttctttgacgccaccgccttagagtcacgagacgatatagtgtcgcttctggatcatggcgcaagaaaagtcttcatccagccggcaagactatcggagttttccgactttggcgagagagtcgccccggctgtcaccaagctcaatcagatcacgggctcggagaagacgttgctacttaaggatttcgatcagaggaactgtgatgttgccggcttcttagaatctagcactatcgaaaaacttccggccttgtatatcaaacctatatctgacaccatttatgagcatttcgtagatatctgctcacaagttaaagccactcctatcttgccgtcaacgcagttgacaaccaagaaggatgaggccgacaagaaactgttcattcctaagctcttttcaacggggtggaagaccgaccgggcagacaaattgttaccgaccgtagtatgcgatgagcgtggtatagccctaggcctggtttacagtagcgaagagagcgttgccgagtcactgagaacgcagacaggggtctaccagagccgcaaacgaggactttggtacaaaggtgcatcatcgggggatacgcaagagcttgtccggatatcaatggactgtgataatgatgcactgaagttcgtcgtccgacagactggaagattttgccatttagagcagttcggctgcttcggtgatctgaagggaatctcaaaactcgagcagactttggtgtcaagaaaggggtctgcgcccgaaggatcctacacgaaacggctgttctccgatgagaagttattacgagccaagattatggaggaggctcaggagctttgtgatgccaagacgcccgacgaagttgcattcgaggctgcggatttgatctactttgctttgacgaaagctatcggtgctggtgttagtcttgctgacatcgagaagaatctggatgcgaagagcctcaaggtgaagagacggccgggaaatgccaagggcgaatgggcgaagaaggaaggaataccgactggcccagctgaggaggcaaaggaggctgccaaggaatcagctgtaccattaacatcagctcccgcaaaggaggccgacaccgcaccaaacgcagagaaaatcgtaatgaggcgagtagatgtcagcaaagtcagtgctacggaggtttcagatgcgttgagacggccatcccagaagtctgcagagactattatgggcattgtgacaccaatcatcaacgacatccgccaaaatggcgacaaagctcttctctcttacactcacaagtttgagaaagctacctcattaacatcaccagttctaaaagccccattcccggaatctctcatgaaactcgcgcccgaaactatcaaagctattgatacctctttcgataacattcgaaagtttcacgcggcacagaaagaggagaagcccctccaggtagagaccatgcctggtgtggtgtgcagcagattctcgcgccccatcgagcgtgtcggtctatacgttccaggtggcaccgcagtgctaccaagcactgcgctgatgttaggcgtccctgcgatggttgccggttgcaagaaaatcgtgctagcttcacctcctcgctctgacggaagtatcacacctgagattgtatatgctgctcacaaggtcggcgcagaaagcatagtcttggctggtggtgcgcaagctgttgcggccatggcgtatggcactgagagtgtgagcaaggttgacaagattcttggccctggaaaccagttcgtgactgctgccaagatgtttgtgagcaatgataccaatgccggtgtcagcatcgatatgcctgctggaccgtctgaagtcctcgtcatcgcagacaaggacgcgaatcctgcttttgtcgcctcagacctcttgtcgcaagctgagcatggtgttgatagtcaagtcgtcttgatcgctgtcaatcttgatgaggctggtctgaaggcaatcgaggatgaagttcacaagcaagcgatggctcttccgcgtgttgacattgttcgtggggcgattaaccactccgttactgttatcgtgaaggatgtggaggaagctatgaggattagcaatgactacgcgcccgagcacttgatcttacagcttcaagacgcagagaaggttgtggacctggtcatgaatgccggaagtgtttttattggacagtggacacctgagagcgttggtgattattcggccggtgtcaatcattccctaccaacatacggttacgccaagcaatactcaggtgtgaacctgggttcgttcgttaagcacattacgagttcgaacttgacggctgagggtctgaggaatgttagcggcgcagtcatgcagttggcaaaggtggaagagctagaggcccacaggcgcgccgtcgagattaggttagcaactctggatgggaaggcttgaggatagacaaaataatggcgccaaaaggaaaatgtattcttgtcagttgagtccgctagatataatataatgcttgaaatgtatacaccaagttatttgtatgacttaac

SEQ ID NO: 15118 - DNA, 1464 bp, Muscodor strobelii
  misc_feature: SGI cDNA ID NO. 564998
  misc_feature: Reduced expression when VOC is produced
  misc_feature: Encodes the peptide sequence at SEQ ID NO 15119
atggcagaatcaattaaccaccgcggggtcaactcatttctcccagtacccaaccctactactccttactggcgcaccgaacttcattttttagactcgtatcgctcaactaaggatcttcctggggaatgtgatatcatcataatcggagctgggatgtctggcgtctcggtgttataccacctttgtcaagcagcggatagtgagtcgccaccatcgatcgtaatgctcgaggcacgtcaagtttgttctggtgctacaggccgcaacggtggccacgtcaagatgaaaacctcctcagcacttgagattgcaaagaaaaggagtgtagaagatacgaacaacatggccgcgttcgtagaagcgcacattagcgcactgcaggcatgtataaaaagatgccgcgcgataagtaatctgaactatcagatatcaaaaaccagccctttggaggttgtcgaacgggagaacctcgattgtgagtttgagctgcgtcgcagttatgacgtgttcacaaccactagagatgccgagttcatgcatcaagcatggagcaaatctcggggcaacggggatgagtggacaaaagggcgtcagctactaggtacaaagatggctgaggctgtatctagcgtcaaagacgcgcaactcgtgttcagttctccggcgtgttcgatgtggccctacaagtttgtgacccagctattagagcggacaatgcaaagaaacccaaatgtgaacctgcaaacggagaccgctgcgctacggattgaatacattcaagatggctcgagtgcggtcccccagacacttgttcataccgcacgaggctgcatccgtgccagaaaggttttattcgcgacgaatgcatacaccgcgggcctgctccctgaataccggaataccatcacgccctacaaagggacatgctctcatctcgcgccgcctcccggaaggaatgcagtattcccccacttgagtcatacctataacttggagtggggactacggagagacttgaacgaagatactgttgactatctcaacccccgtcctgatggtggcgtcgtagtaggcggtgcaaactggctctttaaagaacatcgccatttatggtacggaaacatagatgactcaacattgtttgagtctgtcaccgaggcaaattactttgaagactacatgcaacgtcatttcagaggctgggagcatagtgggactgtagtcgacaaagtttggacaggaataatggcttcgacaccggatgggttaccgcatgttggcgaagtaccggaacgtaagaaccaatgggtcatggcaggctacaacggaggtggtatgcctttgatctttctcttggcgaaggaactcgcgaaaatggtgttgcatgaaacatcatttgaaaatctggacccgattattccacgattctttaagaccacgtcggaaagacttgccaaatga

SEQ ID NO: 15119 - protein, 487 aa, Muscodor strobelii
  misc_feature: SGI Peptide ID NO. 564998
  misc_feature (45)..(460): Pfam Id: PF01266 Pfam Desc: FAD dependent oxidoreductase
  misc_feature (14)..(487): NCBI GI: 67523549 Blast Desc: AN2230.2 [Aspergillus nidulans FGSC A4] gi|40744759|gb|EAA63915.1| AN2230.2 [Aspergillus nidulans FGSC A4] gi|259487617|tpe|CBF86428.1| TPA: FAD dependent superfamily
  misc_feature (13)..(470): NCBI GI: 169610723 Blast Desc: SNOG_08469 [Phaeosphaeria nodorum SN15] gi|111063625|gb|EAT84745.1| SNOG_08469 [Phaeosphaeria nodorum SN15]
  misc_feature (7)..(485): NCBI GI: 238494404 Blast Desc: conserved [Aspergillus flavus NRRL3357] gi|220695088|gb|EED51431.1| conserved [Aspergillus flavus NRRL3357]
  misc_feature (11)..(487): NCBI GI: 145253565 Blast Desc: An17g00660 [Aspergillus niger] gi|134083863|emb|CAK42994.1| protein product [Aspergillus niger]
  misc_feature (14)..(485): NCBI GI: 242767481 Blast Desc: conserved [Talaromyces stipitatus ATCC 10500] gi|218724573|gb|EED23990.1| conserved [Talaromyces stipitatus ATCC 10500]
  misc_feature (14)..(485): NCBI GI: 255946399 Blast Desc: Pc20g14920 [Penicillium chrysogenum Wisconsin 54-1255] gi|211588702|emb|CAP86821.1| Pc20g14920 [Penicillium chrysogenum Wisconsin 54-1255]
  misc_feature (13)..(485): NCBI GI: 242812294 Blast Desc: conserved [Talaromyces stipitatus ATCC 10500] gi|218714267|gb|EED13690.1| conserved [Talaromyces stipitatus ATCC 10500]
  misc_feature (15)..(484): NCBI GI: 256729005 Blast Desc: NECHADRAFT_93191 [Nectria haematococca mpVI 77-13-4]
  misc_feature (15)..(487): NCBI GI: 255949718 Blast Desc: Pc22g17130 [Penicillium chrysogenum Wisconsin 54-1255] gi|211592643|emb|CAP99001.1| Pc22g17130 [Penicillium chrysogenum Wisconsin 54-1255]
  misc_feature (9)..(485): NCBI GI: 115438002 Blast Desc: conserved [Aspergillus terreus NIH2624] gi|114188769|gb|EAU30469.1| conserved [Aspergillus terreus NIH2624]
  misc_feature: Useful for introducing or modulating the production of volatile compounds
MAESINHRGVNSFLPVPNPTTPYWRTELHFLDSYRSTKDLPGECDIIIIGAGMSGVSVLYHLCQAADSESPPSIVMLEARQVCSGATGRNGGHVKMKTSSALEIAKKRSVEDTNNMAAFVEAHISALQACIKRCRAISNLNYQISKTSPLEVVERENLDCEFELRRSYDVFTTTRDAEFMHQAWSKSRGNGDEWTKGRQLLGTKMAEAVSSVKDAQLVFSSPACSMWPYKFVTQLLERTMQRNPNVNLQTETAALRIEYIQDGSSAVPQTLVHTARGCIRARKVLFATNAYTAGLLPEYRNTITPYKGTCSHLAPPPGRNAVFPHLSHTYNLEWGLRRDLNEDTVDYLNPRPDGGVVVGGANWLFKEHRHLWYGNIDDSTLFESVTEANYFEDYMQRHFRGWEHSGTVVDKVWTGIMASTPDGLPHVGEVPERKNQWVMAGYNGGGMPLIFLLAKELAKMVLHETSFENLDPIIPRFFKTTSERLAK

SEQ ID NO: 15120 - DNA, 1735 bp, Muscodor strobelii
  misc_feature: SGI EST ID NO. CUFF.35970.0
  misc_feature: Variant of the nucleotide sequence at SEQ ID NO 15118
tggctaccagggaggttgtcgaacgggagaacctcgattgtgagtttgagctgcgtcgcagttatgacgtgttcacaaccactagagatgccgagttcatgcatcaagcatggagcaaatctcggggcaacggggatgagtggacaaaagggcgtcagctactaggtacaaagatggctgaggctgtatctagcgtcaaagacgcgcaactcgtgttcagttctccggcgtgttcgatgtggccctacaagtttgtgacccagctattagagcggacaatgcaaagaaacccaaatgtgaacctgcaaacggagaccgctgcgctacggattgaatacattcaagatggctcgagtgcggtcccccagacacttgttcataccgcacgaggctgcatccgtgccagaaaggttttattcgcgacgaatgcatacaccgcgggcctgctccctgaataccggaataccatcacgccctacaaagggacatgctctcatctcgcgccgcctcccggaaggaatgcagtattcccccacttgagtcatacctataacttggagtggggactacggagagacttgaacgaagatactgttgactatctcaacccccgtcctgatggtggcgtcgtagtaggcggtgcaaactggctctttaaagaacatcgccatttatggtacggaaacatagatgactcaacattgtttgagtctgtcaccgaggcaaattactttgaagactacatgcaacgtcatttcagaggctgggagcatagtgggactgtagtcgacaaagtttggacaggaataatggcttcgacaccggatgggttaccgcatgttggcgaagtaccggaacgtaagaaccaatgggtcatggcaggctacaacggaggtggtatgcctttgatctttctcttggcgaaggaactcgcgaaaatggtgttgcatgaaacatcatttgaaaatctggacccgattattccacgattctttaagaccacgtcggaaagacttgccaaatgatgtatgaaagagagaaatgcaccaaaccacatgagctacgcgtagtaatgtaacgagtttccgatagcacagctatagtattaccgttgcgagactcaatacatacaccaatagggccggctcgagtttcactaggtcgaaattcaatgaagcgcctgcatcgagtcttaagatccgattattattacgcatataaatgcattcgaggtggcaaaaaactcgtgatacaaccgagctcatgttgcgaagtagtatatcctcaattgtatatgaacgatcttcttttctattttgctttggagcccgagacgtcaatatctatatagcacaactcgtgactatagttccgtgcaatcttgcacccgaaatataataggtgaagagaaaaagatggacatgctatagaaaagacagctattttccatggatggatcgggtgggatgttgattagccaccatcatcaattcggacaccatcgccgtgcttaaacagtcgatgagcatcaactctcatacgaacattgcctggaccaggtcttgaccgtcttgcgtccatcttcgatttgctccatcccagcgaacgaagttgagtgggtcgtagtctggaatttggaatgtccaagtaggagcccaggtaggtgcccatcgtggaatttcgttcacttcttgaaatctagcagaccactgcagcagtttaagttaattctaag

SEQ ID NO: 15121 - DNA, 1149 bp, Muscodor strobelii
  misc_feature: SGI cDNA ID NO. 564999
  misc_feature: Reduced expression when VOC is produced
  misc_feature: Encodes the peptide sequence at SEQ ID NO 15122
atgtcgctcttttccgaaattctcactcggcatagcccagagctcggcgagtatgtcgatctctacaagtacttacatgctaaccccgagctctctaatcacgaaaagaaactgcgggagcaatatactaaattcatgacaataccggactattcatcttcaggacgctccgaatccgaagagctagtaaggaaaccagtcatgcatgcctgcggtcatgacatgcatatgacaacgctccttgcagcagcaaagactttggtctcggcgcggagccaatgggctggtactctgatccttgcattccagcccgccgaagagcgtggtaccggcgcgcaggccatggttgatgatggtctctattctcctcatcgccacgcagttccggttccagatattgtgatcgccggccatgtcacgcctttgcgtgctggtacaatcgggacttgtcgaggtgtggccgcggcttctgctgacagtatgcgagttacactcaagggaagaggagcacatgctagcatgccgcatgccgcaatcgacccagttgttctcgctgcacacacgatattgaggctgcagaacgtcgtgagtagggaatcagaccctgctgatacgacttgcgtcacagtggcaagcataaaggcaggagaagcagagaacgtgatcccagacactgctatgcttgcattagactggagagccggagatcctggtcgaacgaagagatcagattggcaacctgattttgaaatcacccgtgcctttcccctgactgttagtgacgatgccgccctaacaatccttgaaacccatttgcgcgatcatttcggcgcctatcccgattacgcaactggcaaagcgagtcctccagaggtggattatcgatatgacgcagacaccccacgttttgctgccagcgaagacttcagtatcctcgcgtccgctgttggtaagccctattgctttttcgtctacggcggtacggatcctgcactctatgacgtcgccgaaaaaagagggaagattgcagaagatattcccaaaaatcactctgccaagtttgctcctgctattatgcccacactgagggccgggatggaggcctatgttgtcggagcattatcgttcctcaatgtcgctatatcgtag

SEQ ID NO: 15122 - protein, 382 aa, Muscodor strobelii
  misc_feature: SGI Peptide ID NO. 564999
  misc_feature (153)..(280): Pfam Id: PF07687 Pfam Desc: Peptidase dimerisation domain
  misc_feature (47)..(375): Pfam Id: PF01546 Pfam Desc: Peptidase family M20/M25/M40
  misc_feature (153)..(233): Pfam Id: PF07687 Pfam Desc: Peptidase dimerisation domain
  misc_feature (67)..(329): Pfam Id: PF01546 Pfam Desc: Peptidase family M20/M25/M40
  misc_feature (1)..(377): NCBI GI: 46133997 Blast Desc: FG09138.1 [Gibberella zeae PH-1]
  misc_feature (1)..(377): NCBI GI: 189202600 Blast Desc: hippurate hydrolase [Pyrenophora tritici-repentis Pt-1C-BFP] gi|187984735|gb|EDU50223.1| hippurate hydrolase [Pyrenophora tritici-repentis Pt-1C-BFP]
  misc_feature (2)..(377): NCBI GI: 67524733 Blast Desc: AN2824.2 [Aspergillus nidulans FGSC A4] gi|40744219|gb|EAA63395.1| AN2824.2 [Aspergillus nidulans FGSC A4] gi|259486247|tpe|CBF83935.1| TPA: glycosyl hydrolase, FGSC
  misc_feature (4)..(378): NCBI GI: 154293250 Blast Desc: BC1G_14422 [Botryotinia fuckeliana B05.10] gi|150845567|gb|EDN20760.1| BC1G_14422 [Botryotinia fuckeliana B05.10]
  misc_feature (2)..(378): NCBI GI: 169775295 Blast Desc: [Aspergillus oryzae RIB40] gi|83769978|dbj|BAE60113.1| protein product [Aspergillus oryzae]
  misc_feature (2)..(378): NCBI GI: 238496077 Blast Desc: amidohydrolase, [Aspergillus flavus NRRL3357] gi|220694154|gb|EED50498.1| amidohydrolase, [Aspergillus flavus NRRL3357]
  misc_feature (1)..(378): NCBI GI: 169594906 Blast Desc: SNOG_00183 [Phaeosphaeria nodorum SN15] gi|111070558|gb|EAT91678.1| SNOG_00183 [Phaeosphaeria nodorum SN15]
  misc_feature (4)..(377): NCBI GI: 70995470 Blast Desc: amidohydrolase [Aspergillus fumigatus Af293] gi|41581202|emb|CAE47851.1| peptidase, [Aspergillus fumigatus] gi|66850125|gb|EAL90452.1| amidohydrolase, [Aspergillus fumigatus
  misc_feature (4)..(377): NCBI GI: 119495725 Blast Desc: amidohydrolase, [Neosartorya fischeri NRRL 181] gi|119412803|gb|EAW22744.1| amidohydrolase, [Neosartorya fischeri NRRL 181]
  misc_feature (4)..(378): NCBI GI: 115395904 Blast Desc: ATEG_04413 [Aspergillus terreus NIH2624] gi|114193160|gb|EAU34860.1| ATEG_04413 [Aspergillus terreus NIH2624]
  misc_feature (1)..(323): SWISSPROT Homolog: EC 3.5.1.32 Hippurate hydrolase
  misc_feature: Useful for introducing or modulating the production of volatile compounds
MSLFSEILTRHSPELGEYVDLYKYLHANPELSNHEKKLREQYTKFMTIPDYSSSGRSESEELVRKPVMHACGHDMHMTTLLAAAKTLVSARSQWAGTLILAFQPAEERGTGAQAMVDDGLYSPHRHAVPVPDIVIAGHVTPLRAGTIGTCRGVAAASADSMRVTLKGRGAHASMPHAAIDPVVLAAHTILRLQNVVSRESDPADTTCVTVASIKAGEAENVIPDTAMLALDWRAGDPGRTKRSDWQPDFEITRAFPLTVSDDAALTILETHLRDHFGAYPDYATGKASPPEVDYRYDADTPRFAASEDFSILASAVGKPYCFFVYGGTDPALYDVAEKRGKIAEDIPKNHSAKFAPAIMPTLRAGMEAYVVGALSFLNVAIS

SEQ ID NO: 15123 - DNA, 1035 bp, Muscodor strobelii
  misc_feature: SGI cDNA ID NO. 565000
  misc_feature: Encodes the peptide sequence at SEQ ID NO 15124
atggcgtcgtctacatacccccagccaccctatccgctccacagttccgtcaaagatcgtattgacccagaatatgttgaattctataacaaatacttgatcgatgcgcagcaagttcattttcagcctgtggcttcttccagagtgggcggaaggattataccaggcggcacggatcccgttccggtcggcaagactgttgattttcaattgcctcggaaagaatcttctgggccagaagtgcttgtcagggcatttgtgcccccgggcacagcccctacaagtggctggccggtattcttgtggtaccatggaggtggttgggtgctcgggaatatcgattccgagaatagtctgtgcagtaatctgtgtacgaaagccaagtgtgttgtcatcacaactgattatagacttgcgccggagaacccatttcccgctgccgtccatgatgcatgggaaactgttctttggcttgtatcaggagctgccagcacagagttagggctcagccttgattcgtcgaaattcactattggtggctccagcgcaggcgcaaacttagctgccatcgtgacacaaagagccctcacacattcggcatttgccggtaagccaggcttcaaattccagatactagtagtgccagttacggataatacggctaccacggagtcgagcgcaagctacaaatctaatgaacacacgccggctttaccagcagctaagatgctgtggtacagacggcactatttgccaaatgaagcggattgggcaactgttgagagttcccccctgcttgcagcagatgacgtttttgccaagctcccgccagcattggttgtcgtcgctggaatggatgtattaaaatgggaaggcgagcaatacgcgaaaaagttggagaaggcgggtgtcaaggccgaattcgttgaaattgaaggtgtgcctcatcctttcatcgtgatggatgcggtattgcagaaaggtcgtgacggtgtcaagttggtgtgcgataagctagcggaggcgctccaatga

SEQ ID NO: 15124 - protein, 344 aa, Muscodor strobelii
  misc_feature: SGI Peptide ID NO. 565000
  misc_feature (100)..(320): Pfam Id: PF07859 Pfam Desc: alpha/beta hydrolase fold
  misc_feature (3)..(343): NCBI GI: 39940746 Blast Desc: MGG_04867 [Magnaporthe grisea 70-15] gi|145010906|gb|EDJ95562.1| MGG_04867 [Magnaporthe grisea 70-15]
  misc_feature (7)..(343): NCBI GI: 145242760 Blast Desc: An09g06390 [Aspergillus niger] gi|134078509|emb|CAK40431.1| protein product [Aspergillus niger]
  misc_feature (3)..(339): NCBI GI: 70984922 Blast Desc: lipase [Aspergillus fumigatus Af293] gi|66845595|gb|EAL85929.1| lipase, [Aspergillus fumigatus Af293] gi|159126108|gb|EDP51224.1| lipase, [Aspergillus fumigatus A1163]
  misc_feature (3)..(339): NCBI GI: 119498801 Blast Desc: lipase, [Neosartorya fischeri NRRL 181] gi|119414322|gb|EAW24261.1| lipase, [Neosartorya fischeri NRRL 181]
  misc_feature (3)..(343): NCBI GI: 121718260 Blast Desc: lipase, [Aspergillus clavatus NRRL 1] gi|119404349|gb|EAW14725.1| lipase, [Aspergillus clavatus NRRL 1]
  misc_feature (1)..(343): NCBI GI: 169776543 Blast Desc: [Aspergillus oryzae RIB40] gi|83771473|dbj|BAE61605.1| protein product [Aspergillus oryzae]
  misc_feature (1)..(343): NCBI GI: 238503251 Blast Desc: lipase, [Aspergillus flavus NRRL3357] gi|220691669|gb|EED48017.1| lipase, [Aspergillus flavus NRRL3357]
  misc_feature (8)..(344): NCBI GI: 46117801 Blast Desc: FG04657.1 [Gibberella zeae PH-1]
  misc_feature (9)..(343): NCBI GI: 67902510 Blast Desc: AN8242.2 [Aspergillus nidulans FGSC A4] gi|40739790|gb|EAA58980.1| AN8242.2 [Aspergillus nidulans FGSC A4] gi|259481027|tpe|CBF74187.1| TPA: lipase, (AFU_orthologue;
  misc_feature (8)..(343): NCBI GI: 255949072 Blast Desc: Pc22g13790 [Penicillium chrysogenum Wisconsin 54-1255] gi|211592320|emb|CAP98667.1| Pc22g13790 [Penicillium chrysogenum Wisconsin 54-1255]
  misc_feature (100)..(344): SWISSPROT Homolog: EC 3.1.1.3 Triacylglycerol lipase
MASSTYPQPPYPLHSSVKDRIDPEYVEFYNKYLIDAQQVHFQPVASSRVGGRIIPGGTDPVPVGKTVDFQLPRKESSGPEVLVRAFVPPGTAPTSGWPVFLWYHGGGWVLGNIDSENSLCSNLCTKAKCVVITTDYRLAPENPFPAAVHDAWETVLWLVSGAASTELGLSLDSSKFTIGGSSAGANLAAIVTQRALTHSAFAGKPGFKFQILVVPVTDNTATTESSASYKSNEHTPALPAAKMLWYRRHYLPNEADWATVESSPLLAADDVFAKLPPALVVVAGMDVLKWEGEQYAKKLEKAGVKAEFVEIEGVPHPFIVMDAVLQKGRDGVKLVCDKLAEALQ

SEQ ID NO: 15125 - DNA, 1017 bp, Muscodor strobelii
  misc_feature: SGI cDNA ID NO. 565001
  misc_feature: Encodes the peptide sequence at SEQ ID NO 15126
atggctggtctagaagctaccgatggaggcaagccattttattactgtgagccgccgatggttctaggtgaagcgcccatctatcgagaacgcgattcaactcttcattgggtagactgcctcgcaaatcccgctgagcttcatattttgaaagtggatcctgaatcgggtgatgcggttggtcgcgcacgagttttgcaattatcggacagtgttacagttcagttctttcgtagaaacaagcccggaagctatatttgtgcctattaccagggagtggcattcatggacgaagagactggtactctggaggtgctgaaagagatcataccttctgaagaccgaggcatacgacgctttaacgacggcagtgtagatgccaaaggccgtttctggctagcagagattgatgtcaaaggaatggcttttgggccaaacaaacttcccgagagccacggaaaacctatcggacgtctgtggagatacgacccggatgggagcctgcaccagatggaagacggcctcatatgcggaaatgggttagcatggagccctgacgataagtatagtccgtctaacctaagtctaacacgtcttacacgagctgacccattagtgtacttaaatgactctgtcgcaatgatggttttccgctatgactttgacctggagactggagctatcacaaacaaaaaactgttcattgatcggagagatagctttggtgaacctgatggtatggttgtcgacacggatggaaatctgtggatagcaatgtttgattcaaatcgcgtcatggtgttctcgccggaggggagacatttgaaagatatcgtctacccggctagaaatatggcttgcacaacttggggtggcaaagatttgaacatactgttcatcgcagcagccaaggatcgaaaacccacagcaaaggctaatgacgagggaggtcacatgttcagatactacgccccagcaggaacgaaaggtacagtcaagcatgaattcctcggctaa

SEQ ID NO: 15126 - protein, 338 aa, Muscodor strobelii
  misc_feature: SGI Peptide ID NO. 565001
  misc_feature (241)..(268): Pfam Id: PF01436 Pfam Desc: NHL repeat
  misc_feature (15)..(304): Pfam Id: PF08450 Pfam Desc: SMP-30/Gluconolaconase/LRE-like region
  misc_feature (205)..(304): Pfam Id: PF08450 Pfam Desc: SMP-30/Gluconolaconase/LRE-like region
  misc_feature (15)..(189): Pfam Id: PF08450 Pfam Desc: SMP-30/Gluconolaconase/LRE-like region
  misc_feature (1)..(338): NCBI GI: 242814108 Blast Desc: anterior fat body protein, [Talaromyces stipitatus ATCC 10500] gi|218714643|gb|EED14066.1| anterior fat body protein, [Talaromyces stipitatus ATCC 10500]
  misc_feature (8)..(338): NCBI GI: 240278903 Blast Desc: SMP-30/CGR1 family protein [Ajellomyces capsulatus H143]
  misc_feature (8)..(338): NCBI GI: 225560156 Blast Desc: RNA polymerase subunit RPO26 [Ajellomyces capsulatus G186AR]
  misc_feature (12)..(338): NCBI GI: 239608299 Blast Desc: SMP-30/gluconolaconase/LRE domain-containing protein [Ajellomyces dermatitidis ER-3]
  misc_feature (12)..(338): NCBI GI: 261203329 Blast Desc: gluconolactonase [Ajellomyces dermatitidis SLH14081] gi|239586663|gb|EEQ69306.1| gluconolactonase [Ajellomyces dermatitidis SLH14081]
  misc_feature (11)..(338): NCBI GI: 146415827 Blast Desc: PGUG_03264 [Pichia guilliermondii ATCC 6260] gi|146391008|gb|EDK39166.1| PGUG_03264 [Pichia guilliermondii ATCC 6260]
  misc_feature (2)..(250): NCBI GI: 145602486 Blast Desc: MGG_04866 [Magnaporthe grisea 70-15] gi|145010907|gb|EDJ95563.1| MGG_04866 [Magnaporthe grisea 70-15]
  misc_feature (1)..(278): NCBI GI: 238588564 Blast Desc: MPER_08763 [Moniliophthora perniciosa FA553] gi|215456876|gb|EEB92692.1| MPER_08763 [Moniliophthora perniciosa FA553]
  misc_feature (21)..(304): NCBI GI: 270159658 Blast Desc: SMP-30/Gluconolaconase/LRE domain protein [Legionella longbeachae D-4968] gi|269987997|gb|EEZ94252.1| SMP-30/Gluconolaconase/LRE domain protein [Legionella longbeachae
  misc_feature (22)..(304): NCBI GI: 37522438 Blast Desc: gll2869 [Gloeobacter violaceus PCC 7421] gi|35213439|dbj|BAC90810.1| gll2869 [Gloeobacter violaceus PCC 7421]
MAGLEATDGGKPFYYCEPPMVLGEAPIYRERDSTLHWVDCLANPAELHILKVDPESGDAVGRARVLQLSDSVTVQFFRRNKPGSYICAYYQGVAFMDEETGTLEVLKEIIPSEDRGIRRFNDGSVDAKGRFWLAEIDVKGMAFGPNKLPESHGKPIGRLWRYDPDGSLHQMEDGLICGNGLAWSPDDKYSPSNLSLTRLTRADPLVYLNDSVAMMVFRYDFDLETGAITNKKLFIDRRDSFGEPDGMVVDTDGNLWIAMFDSNRVMVFSPEGRHLKDIVYPARNMACTTWGGKDLNILFIAAAKDRKPTAKANDEGGHMFRYYAPAGTKGTVKHEFLG

SEQ ID NO: 15127 - DNA, 792 bp, Muscodor strobelii
  misc_feature: SGI cDNA ID NO. 565002
  misc_feature: Encodes the peptide sequence at SEQ ID NO 15128
atgacttataggaactcgggaggatactcaacgagtggtttgccaggcacgattgctccaggggaagaacctcagagcctcatgccggtagttgaggcgggctccgcatcagcacttgttttgcgcgggcatgggccatcactcgagccccagtctcaacacgaactagcgagccacgtggatgccaatgtcaataacatgctaggtcccgttggcgggaatcctataccagttatggcacctgagtctaggtcgaacgtgcgcccggacttggatcatcttatcttctttgaaggagcaaacgatggtaacggactcacagaagatctggactggctgttcgactcggccagtccttgggaggcaccagcggtggtcactcatccaccatactcggacgtttcggcgatatcgcctatgtctgaagcctctatcgcattatctcaactgtcacatctcgagagcacgtattctgtgccccgagaacgcatcttatctgctctgattggattccctccggatgtgctaacctcgtcttttttcgaagctcagaacctagagttgttcatgcagaactactggaataaatacaatccgcacttttcactgctccacaagccgaccttctcagtgacagatgcaccaccgctcttattggtcgcattgctaactctaggcgcaacactgtcaccgaatccagaccattacgcaattgctgagcaaatccatcagaatctccgatggctgatattcacagtaagccaagacccgacggacaatctagcatcgtag

SEQ ID NO: 15128 - protein, 263 aa, Muscodor strobelii
  misc_feature: SGI Peptide ID NO. 565002
  misc_feature (1)..(253): NCBI GI: 145602488 Blast Desc: MGG_04865 [Magnaporthe grisea 70-15] gi|145010908|gb|EDJ95564.1| MGG_04865 [Magnaporthe grisea 70-15]
  misc_feature (161)..(251): NCBI GI: 242814139 Blast Desc: zinc finger protein, [Talaromyces stipitatus ATCC 10500] gi|218714650|gb|EED14073.1| zinc finger protein, [Talaromyces stipitatus ATCC 10500]
  misc_feature (107)..(255): NCBI GI: 50421611 Blast Desc: DEHA0E00935g [Debaryomyces hansenii CBS767]
  misc_feature (129)..(234): NCBI GI: 115442632 Blast Desc: [Aspergillus terreus NIH2624] gi|114187992|gb|EAU29692.1| [Aspergillus terreus NIH2624]
  misc_feature (162)..(251): NCBI GI: 150864454 Blast Desc: C2H2 zinc finger protein Ribonuc_L-PSP Endoribonuclease L-PSP [Pichia stipitis CBS 6054] gi|149385710|gb|ABN65248.2| C2H2 zinc finger protein L-PSP CBS
  misc_feature (96)..(255): NCBI GI: 255714679 Blast Desc: KLTH0E03124p [Lachancea thermotolerans] gi|238935003|emb|CAR23184.1| KLTH0E03124p [Lachancea thermotolerans]
  misc_feature (42)..(254): NCBI GI: 190346984 Blast Desc: PGUG_03281 [Pichia guilliermondii ATCC 6260]
  misc_feature (107)..(255): NCBI GI: 199432411 Blast Desc: DEHA2E00704p [Debaryomyces hansenii]
  misc_feature (161)..(251): NCBI GI: 212544920 Blast Desc: krueppel c2h2-type zinc finger protein, [Penicillium marneffei ATCC 18224] gi|210065583|gb|EEA19677.1| krueppel c2h2-type zinc finger protein, [Penicillium marneffei ATCC 18224]
  misc_feature (42)..(254): NCBI GI: 146415861 Blast Desc: PGUG_03281 [Pichia guilliermondii ATCC 6260]
MTYRNSGGYSTSGLPGTIAPGEEPQSLMPVVEAGSASALVLRGHGPSLEPQSQHELASHVDANVNNMLGPVGGNPIPVMAPESRSNVRPDLDHLIFFEGANDGNGLTEDLDWLFDSASPWEAPAVVTHPPYSDVSAISPMSEASIALSQLSHLESTYSVPRERILSALIGFPPDVLTSSFFEAQNLELFMQNYWNKYNPHFSLLHKPTFSVTDAPPLLLVALLTLGATLSPNPDHYAIAEQIHQNLRWLIFTVSQDPTDNLAS

SEQ ID NO: 15129 - DNA, 1192 bp, Muscodor strobelii
  misc_feature: SGI EST ID NO. CUFF.35988.0
  misc_feature: Variant of the nucleotide sequence at SEQ ID NO 15127
ttttgataaatcagtcctcgatagaccccgttacgcgggcaatcgcggagaatttccccatgctagcatccgggagaagcagacatgcagccgttgagattgtatggcatgtctcgcgcatacttaacttggaccgcccgcacagcccacgctgtccctcgtctctaccaaatacacatgtcccacacagcaccacgacagtaccagcaagactactgaattagaacgagacgatctgtcacgaaaacgcggaaagcatcatagaggcttaattatgcacccttgcaccgagccaggctgcacaaggtcgttcaaaagaccagaacatttgagtcgccatagactaaatcaccggccgcggaagatcttgaaatgtgacatatgttcaaaggattttgtccgtctcgaccttctccagcgccatatcagaagacatgatagaggtatgacttataggaactcgggaggatactcaacgagtggtttgccaggcacgattgctccaggggaagaacctcagagcctcatgccggtagttgaggcgggctccgcatcagcacttgttttgcgcgggcatgggccatcactcgagccccagtctcaacacgaactagcgagccacgtggatgccaatgtcaataacatgctaggtcccgttggcgggaatcctataccagttatggcacctgagtctaggtcgaacgtgcgcccggacttggatcatcttatcttctttgaaggagcaaacgatggtaacggactcacagaagatctggactggctgttcgactcggccagtccttgggaggcaccagcggtggtcactcatccaccatactcggacgtttcggcgatatcgcctatgtctgaagcctctatcgcattatctcaactgtcacatctcgagagcacgtattctgtgccccgagaacgcatcttatctgctctgattggattccctccggatgtgctaacctcgtcttttttcgaagctcagaacctagagttgttcatgcagaactactggaataaatacaatccgcacttttcactgctccacaagccgaccttctcagtgacagatgcaccaccgctcttattggtcgcattgctaactctaggcgcaacactgtcaccgaatccagaccattacgcaattgctgagcaaatccatcagaatctccgatggctg

SEQ ID NO: 15130 - DNA, 1764 bp, Muscodor strobelii
  misc_feature: SGI cDNA ID NO. 565003
  misc_feature: Encodes the peptide sequence at SEQ ID NO 15131
atggaattcggtcagccggcagacgctgctcccactcaaagccgagtgcaaaagctgaagcatgctttcagctcgccccgagctttccgtgacgcaatcgtgttgaagagttcgacatcgtctctggtgaacgaggatcttttaggtatgcgcgttgcacaatccccatccggccccgttgagaaacaagctgacctcccgtcgcctccgagcaggcaaacgtggacgacgttgagtttcctggcgtactggtggagtgagagctggaatgtcacgacgtggagtatcggctctgctttggttgctgtcggcgcctcagttcgagatgctctgctcgtagtatttttcgccaatttgttatcggcttcagttatggtattgaacgggtttgccccatcacgttaccacatcggctacccggttctgtcacgcgtcagcttcggcatttatggccattactttgtggttgtcctacggtcaatattaggcatcatctggggaggcgttcaactgtacttcgaaggccagttcatcagcatttgcctgcgttgcatttttccatcgtggtccaagataccgaatggcatccctgccgatcaattcatcaccacgcagacgcttgttggcttcctcctagctttcttgttcaccatccctttcctgtttgttcatacttcgcggatccagcacttgttccacgtgaaatcagtcatacttccccttgcggggttgggcctggtcatctggtctaccaagaacaatggtggcgtcggtgctgcagctattgatgctcaggcccagtctgtgagaaccacgattcccgcactcgcttggggcattgttgcgcagttcaactcggtcatgggctcaaactcggcactgctcgttacaatccctgacatcgcccgttattcgaaaactcgcaaagcgcaagtctggggccagctgatcgcactccccgtcggtcagactttgtgcgcagcatttggtgtcattaccactgctgccgtctttaatatgtggggaatcgcatattggaacccctacgacctactaaacggtatcctcgacgagtcgtatacttcttcctcccgagcaggtgtattcttcgctgctgcaagttttgcatttgccacgctgggcacctctatcgcgtgtaacatcattccgttcgcggcagatgttacctgcctactcccgaagtatatcaacatcattcgcggccagtttctgtgtctcattattgcttttgccattgtcccctggcgaattctgacctctgcggccggctttcttaatttcctaggcggctactctattttccagggtcctgtagttgcaatcatgatcgtggactatctcattttgcgaaatggcaatatctacatccctgatgtttttacgaagtcttctgccggtcgttactattttttccatggagtcaattgtagagcatacgccgcgtttgtaatcgggtttctattgccacttcccggcttcatcggcagcttcggtacaacgactgtgtccagtgctgcaacacacatgtaccaactgggttgggagctgagcttcgtagtgggtgctcttgcttatcttgttctagggctcatatggcgagtaccaggcgacgataagtgtcacggttttgagcaagctccaatagctgacgtcaaccctgatgattcttcggccttcgaaggcattgacggagacgactcgaagagatccgacccaggagcggaaaaaaactatatcgtatga

SEQ ID NO: 15131 - protein, 587 aa, Muscodor strobelii
  misc_feature: SGI Peptide ID NO. 565003
  misc_feature (67)..(524): Pfam Id: PF02133 Pfam Desc: Permease for cytosine/purines, uracil, thiamine, allantoin
  misc_feature (10)..(567): NCBI GI: 39940752 Blast Desc: MGG_04864 [Magnaporthe grisea 70-15] gi|145010910|gb|EDJ95566.1| MGG_04864 [Magnaporthe grisea 70-15]
  misc_feature (14)..(579): NCBI GI: 238845056 Blast Desc: allantoin transport [Microsporum canis CBS 113480]
  misc_feature (14)..(584): NCBI GI: 242814110 Blast Desc: allantoin permease, [Talaromyces stipitatus ATCC 10500] gi|218714644|gb|EED14067.1| allantoin permease, [Talaromyces stipitatus ATCC 10500]
  misc_feature (45)..(568): NCBI GI: 145603777 Blast Desc: MGG_05830 [Magnaporthe grisea 70-15] gi|145011928|gb|EDJ96584.1| MGG_05830 [Magnaporthe grisea 70-15]
  misc_feature (14)..(573): NCBI GI: 212541618 Blast Desc: uracil permease, [Penicillium marneffei ATCC 18224] gi|210068263|gb|EEA22355.1| uracil permease, [Penicillium marneffei ATCC 18224]
  misc_feature (14)..(584): NCBI GI: 242798224 Blast Desc: allantoin permease, [Talaromyces stipitatus ATCC 10500] gi|218716471|gb|EED15892.1| allantoin permease, [Talaromyces stipitatus ATCC 10500]
  misc_feature (7)..(539): NCBI GI: 154290095 Blast Desc: BC1G_15827 [Botryotinia fuckeliana B05.10] gi|150848461|gb|EDN23654.1| BC1G_15827 [Botryotinia fuckeliana B05.10]
  misc_feature (60)..(540): NCBI GI: 126133775 Blast Desc: allantoin transport [Pichia stipitis CBS 6054] gi|126095561|gb|ABN65383.1| allantoin transport [Pichia stipitis CBS 6054]
  misc_feature (10)..(586): NCBI GI: 212538135 Blast Desc: allantoin permease, [Penicillium marneffei ATCC 18224] gi|210068965|gb|EEA23056.1| allantoin permease, [Penicillium marneffei ATCC 18224]
  misc_feature (67)..(535): NCBI GI: 259488163 Blast Desc: TPA: conserved [Aspergillus nidulans FGSC A4]
MEFGQPADAAPTQSRVQKLKHAFSSPRAFRDAIVLKSSTSSLVNEDLLGMRVAQSPSGPVEKQADLPSPPSRQTWTTLSFLAYWWSESWNVTTWSIGSALVAVGASVRDALLVVFFANLLSASVMVLNGFAPSRYHIGYPVLSRVSFGIYGHYFVVVLRSILGIIWGGVQLYFEGQFISICLRCIFPSWSKIPNGIPADQFITTQTLVGFLLAFLFTIPFLFVHTSRIQHLFHVKSVILPLAGLGLVIWSTKNNGGVGAAAIDAQAQSVRTTIPALAWGIVAQFNSVMGSNSALLVTIPDIARYSKTRKAQVWGQLIALPVGQTLCAAFGVITTAAVFNMWGIAYWNPYDLLNGILDESYTSSSRAGVFFAAASFAFATLGTSIACNIIPFAADVTCLLPKYINIIRGQFLCLIIAFAIVPWRILTSAAGFLNFLGGYSIFQGPVVAIMIVDYLILRNGNIYIPDVFTKSSAGRYYFFHGVNCRAYAAFVIGFLLPLPGFIGSFGTTTVSSAATHMYQLGWELSFVVGALAYLVLGLIWRVPGDDKCHGFEQAPIADVNPDDSSAFEGIDGDDSKRSDPGAEKNYIV

SEQ ID NO: 15132 - DNA, 2108 bp, Muscodor strobelii
  misc_feature: SGI EST ID NO. CUFF.35990.0
  misc_feature: Variant of the nucleotide sequence at SEQ ID NO 15130
ccgatggctggtactccaatatgcgatcgacaagggctgaccagatgtgtattaaggcgtcaacatcatgacgtctcgaaattttcactcgtcctcagaggtttgatctgagcaaatggccaatggtcagcaaaatcgaggcgaaaatggaattcggtcagccggcagacgctgctcccactcaaagccgagtgcaaaagctgaagcatgctttcagctcgccccgagctttccgtgacgcaatcgtgttgaagagttcgacatcgtctctggtgaacgaggatcttttaggtatgcgcgttgcacaatccccatccggccccgttgagaaacaagctgacctcgtccagtaagtgtgattcgcgtggttctttgccggcggagcacagacctcccaatttctgacatgctctagccgtcgcctccgagcaggcaaacgtggacgacgttgagtttcctggcgtactggtggagtgagagctggaatgtcacgacgtggagtatcggctctgctttggttgctgtcggcgcctcagttcgagatgctctgctcgtagtatttttcgccaatttgttatcggcttcagttatggtattgaacgggtttgccccatcacgttaccacatcggctacccggttctgtcacgcgtcagcttcggcatttatggccattactttgtggttgtcctacggtcaatattaggcatcatctggggaggcgttcaactgtacttcgaaggccagttcatcagcatttgcctgcgttgcatttttccatcgtggtccaagataccgaatggcatccctgccgatcaattcatcaccacgcagacgcttgttggcttcctcctagctttcttgttcaccatccctttcctgtttgttcatacttcgcggatccagcacttgttccacgtgaaatcagtcatacttccccttgcggggttgggcctggtcatctggtctaccaagaacaatggtggcgtcggtgctgcagctattgatgctcaggcccagtctgtgagaaccacgattcccgcactcgcttggggcattgttgcgcagttcaactcggtcatgggctcaaactcggcactgctcgttacaatccctgacatcgcccgttattcgaaaactcgcaaagcgcaagtctggggccagctgatcgcactccccgtcggtcagactttgtgcgcagcatttggtgtcattaccactgctgccgtctttaatatgtggggaatcgcatattggaacccctacgacctactaaacggtatcctcgacgagtcgtatacttcttcctcccgagcaggtgtattcttcgctgctgcaagttttgcatttgccacgctgggcacctctatcgcgtgtaacatcattccgttcgcggcagatgttacctgcctactcccgaagtatatcaacatcattcgcggccagtttctgtgtctcattattgcttttgccattgtcccctggcgaattctgacctctgcggccggctttcttaatttcctaggcggctactctattttccagggtcctgtagttgcaatcatgatcgtggactatctcattttgcgaaatggcaatatctacatccctgatgtttttacgaagtcttctgccggtcgttactattttttccatggagtcaattgtagagcatacgccgcgtttgtaatcgggtttctattgccacttcccggcttcatcggcagcttcggtacaacgactgtgtccagtgctgcaacacacatgtaccaactgggttgggagctgagcttcgtagtgggtgctcttgcttatcttgttctagggctcatatggcgagtaccaggcgacgataagtgtcacggttttgagcaagctccaatagctgacgtcaaccctgatgattcttcggccttcgaaggcattgacggagacgactcgaagagatccgacccaggagcggaaaaaaactatatcgtatgaagagagaactggttgatttgatttggaaggctcagactttggattactgagaatattacttctacctaattgaactctttgcggtctgcatactgcacgccgacgatgctgtaaacattaagctcca

SEQ ID NO: 15133 - DNA, 2712 bp, Muscodor strobelii
  misc_feature: SGI cDNA ID NO. 565004
  misc_feature: Encodes the peptide sequence at SEQ ID NO 15134
atgtcttctacaacaagccccccaggcactcgagaaaagagccgcaaatctccgatcgtcgttaggaacttcatgacaacccaacaagatggatacgcattagttacgaaagaaccaaagacaccagaatttccaaccccgaagagaccagaacatggatctcaaggaaagacagtcgatctctggacgaatttttttaggataaaatcgggcgaaaccttggagctgcacttgggacacgaacagagctcggcagccaatggacaacaacacaaagccggagcgaaattcacgaagtccttgaaactacatgctctggtcgattacttgaaattgatgccagacggggcaattattggcagaaaagatgacgcacttcaagctttgaaagctctactcgctcattacccgaatgcatcgtttttggcacgcaacacatctggtaatcgacacttttgtgcagatggcgtggatcagactgggaaggacgggtcatcgaagctgaattttatccgaggcttccttgcgaccctcacaattgcaccaaccgggggtatatcggtcagcgtacacgcaaagaacatggtatgcaatgagattggtcaacttgacaagataatgaccaagttcatacggcaaaccaaagaaatagagaacaccaagcgcatggccatgctattggaactggtaaagggactaactattcaagtgaaacctcgtaccagtactcggaacaatggcgaggtgaacgcagagaaggacacaaatcagcagactggtccacaacttgagaagatacgaggctttgcaatgattgacgacggtctcaagctgaagaatccaccagtggtgtcaaggttcggtgccggagcggacggtgtgcggttctgccgctgccaaaagcgtcgctgccctagatccactgatgttaggacacctccgaagcgttcaactgatgaaaatggaaaggcgattactgatggatcggactcgtccaaggaggagtacatcagcgtccgcgaacacttcaagcagacatacccgggtgtcgagctcaatgtgtcgctacctgttatcaacgttggccggccagacagaccacggtactaccctgctgaggtttgcactgtcaaaccaacacagattgcagggaccaagttaagcggtatcgaaacgagcacgatgatgaatacggcgcaaccgaatcatgacgctcggacaattgcgcaagctattcaccagccaggagaaccagacttcagaactcagactgtggaacacgaagtaggggctgcttcaaggttcatcagcgtcacagggagagtgctagatcctcccacggtgaagtatcaatcagaaaacggcactaaagtgccaaaaggcggcaactggaatctcgagtcgatcaagatgaccgacaccaagaccgtttcgtcgtcgacgtatctgcgaatttctcttggacccagagaggacacacagcaaaatgataagcagttcgctagccagctcagaaagttacacgagagcctgaaagtgctaggcatctcagtgaccagccgatcagagggcaagcacattattacaagctctgagaatttcgagtctgatactgatgaagcccttcgccaaatcgcatcgatgagaccaaagccagatcttgtcgttgtgatcatcccgaacgtggggaagattaccagggacaaactgtataaccgtatcaagtacagactggacattgaggagggtatcgtcaatgtttgtgccatcgacagcatcttccacgaagcgaaagcgagagatctgtctagtatcggcttgaaaatcaacttgaagttaggcagacccaaccaatcgctgagcgatcctgacctaccattgatgaaagacaagaagacgatggtgatcggtatagacgtttttcatccgcctagagggtcgtcatcatctaaggagttgagtatcatcggaatggtccggtctaccgatcatcgtcttgcccactggccggctgtcatcagcgcacaaccgattaacctggagcgtgctgatttaatcaaggtctttcaaacgctcttcgagtcgtgtctgacgtcatggaagaagaaaaacaaaggctggccatcgaagattctcatctaccgaaacggagtatcgaatagtcaatacgacactgtgcttgagactgagcgtcttgctctcggtaacgccttgcgtgccctagttccggttgaggatgcaaagacccgcgatcacaatgagcaacgacgagttaccattgtcattgttggcaaaggcggtactacccgattttatgctaggaagtcaggcgaggaaatcgatgtagagaagcctaagaatggtattgtcgtcgacgacgtcgtcacagaggactgtgcatgggacttctatctccaatctcataataccggtcaaggtgatgcaaaggctgctcattatttcgtcgttcacgacgaaatcttcagtaattccaaattatttccgaagtcttcaggtcaggatgcactcgaaaagctgacgcacaacatgtgctatcttgctggccagacaactagggctgtcagcgtctgtgctcctgcatactacgcaaacctcgtttgcaagagggctcggaagtatgtggaagaatgtaccgatacaggcactctgaagatacatgaaaacctgaaagattcgatgttttatgtttga

SEQ ID NO: 15134 - protein, 903 aa, Muscodor strobelii
  misc_feature: SGI Peptide ID NO. 565004
  misc_feature (291)..(402): Pfam Id: PF02170 Pfam Desc: PAZ domain
  misc_feature (554)..(882): Pfam Id: PF02171 Pfam Desc: Piwi domain
  misc_feature (327)..(377): Pfam Id: PF02170 Pfam Desc: PAZ domain
  misc_feature (100)..(903): NCBI GI: 226286102 Blast Desc: RNA interference and gene silencing protein [Paracoccidioides brasiliensis Pb01]
  misc_feature (100)..(903): NCBI GI: 240281741 Blast Desc: QDE2 protein [Ajellomyces capsulatus H143]
  misc_feature (81)..(903): NCBI GI: 258577557 Blast Desc: [Uncinocarpus reesii 1704] gi|237903226|gb|EEP77627.1| [Uncinocarpus reesii 1704]
  misc_feature (91)..(903): NCBI GI: 255931339 Blast Desc: Pc12g03410 [Penicillium chrysogenum Wisconsin 54-1255] gi|211581845|emb|CAP79968.1| Pc12g03410 [Penicillium chrysogenum Wisconsin 54-1255]
  misc_feature (33)..(903): NCBI GI: 115396604 Blast Desc: conserved [Aspergillus terreus NIH2624] gi|114193510|gb|EAU35210.1| conserved [Aspergillus terreus NIH2624]
  misc_feature (80)..(903): NCBI GI: 70983606 Blast Desc: RNA interference and gene silencing protein (Qde2) [Aspergillus fumigatus Af293] gi|66844956|gb|EAL85292.1| RNA interference and gene silencing protein (Qde2), [Aspergillus
  misc_feature (80)..(903): NCBI GI: 159123664 Blast Desc: RNA interference and gene silencing protein (Qde2), [Aspergillus fumigatus A1163]
  misc_feature (80)..(903): NCBI GI: 119484584 Blast Desc: RNA interference and gene silencing protein (Qde2), [Neosartorya fischeri NRRL 181] gi|119410227|gb|EAW20174.1| RNA interference and gene silencing protein (Qde2), [Neosartorya NRRL
  misc_feature (91)..(903): NCBI GI: 121719874 Blast Desc: RNA interference and gene silencing protein (Qde2), [Aspergillus clavatus NRRL 1] gi|119404847|gb|EAW15209.1| RNA interference and gene silencing protein (Qde2), [Aspergillus NRRL
  misc_feature (80)..(903): NCBI GI: 119178995 Blast Desc: CIMG_08295 [Coccidioides immitis RS]
MSSTTSPPGTREKSRKSPIVVRNFMTTQQDGYALVTKEPKTPEFPTPKRPEHGSQGKTVDLWTNFFRIKSGETLELHLGHEQSSAANGQQHKAGAKFTKSLKLHALVDYLKLMPDGAIIGRKDDALQALKALLAHYPNASFLARNTSGNRHFCADGVDQTGKDGSSKLNFIRGFLATLTIAPTGGISVSVHAKNMVCNEIGQLDKIMTKFIRQTKEIENTKRMAMLLELVKGLTIQVKPRTSTRNNGEVNAEKDTNQQTGPQLEKIRGFAMIDDGLKLKNPPVVSRFGAGADGVRFCRCQKRRCPRSTDVRTPPKRSTDENGKAITDGSDSSKEEYISVREHFKQTYPGVELNVSLPVINVGRPDRPRYYPAEVCTVKPTQIAGTKLSGIETSTMMNTAQPNHDARTIAQAIHQPGEPDFRTQTVEHEVGAASRFISVTGRVLDPPTVKYQSENGTKVPKGGNWNLESIKMTDTKTVSSSTYLRISLGPREDTQQNDKQFASQLRKLHESLKVLGISVTSRSEGKHIITSSENFESDTDEALRQIASMRPKPDLVVVIIPNVGKITRDKLYNRIKYRLDIEEGIVNVCAIDSIFHEAKARDLSSIGLKINLKLGRPNQSLSDPDLPLMKDKKTMVIGIDVFHPPRGSSSSKELSIIGMVRSTDHRLAHWPAVISAQPINLERADLIKVFQTLFESCLTSWKKKNKGWPSKILIYRNGVSNSQYDTVLETERLALGNALRALVPVEDAKTRDHNEQRRVTIVIVGKGGTTRFYARKSGEEIDVEKPKNGIVVDDVVTEDCAWDFYLQSHNTGQGDAKAAHYFVVHDEIFSNSKLFPKSSGQDALEKLTHNMCYLAGQTTRAVSVCAPAYYANLVCKRARKYVEECTDTGTLKIHENLKDSMFYV

SEQ ID NO: 15135 - DNA, 1512 bp, Muscodor strobelii
  misc_feature: SGI cDNA ID NO. 565005
  misc_feature: Elevated expression when VOC is produced
  misc_feature: Encodes the peptide sequence at SEQ ID NO 15136
atggaggtggcaacagcaattttcgcttgggctctcacttctgcctgtcgaagcctctctccttctaataatttatggggcctctgctcgcaatctaacagcacgagcgatctcttggaaagactctcgccaagcgcagaagtctacctaccaggaacgagtggattcaacaatgccacgacccgttggtcggtgctggatgagcctggtatcaaccttgtggtggtccccggtaccgaggatgacgtagccgtgactgttaaatatgccaatgaccgagacataccctatattgcgcttagtggcggacacggcgcaatcaccactgttggcaggctgaagaacggcattgagatctggctccaccagcttagcagtgcacaagtggcaagcgacggaaagtctgtaaagatcggtggcggaacgctcactaagaccgttatcgactctctctgggccgagcgcaagcagactgtcaacggcggatgcgagtgcgtcagtttccttggacctgccctgggcggcggccacggctggctccaaggtcgtcatggactcattgcggatcaattcatgtcaatgaatatcgtgatggcggatggcaaactacatactattgacgcagaatctgctccggacctttggtgggctatgaaaggcgccggacataacttcggcatcgtaacctcagtcacatctaaagtgttcgacatcacacgccctgaatgggcatacgcaagtttcatcttcactggagacaagatcgaacgcctgtatgatgctactaacaagtacatcctgaaaaatgggacgcagccagttgacatccttaacttctcggtcttcgtcaatatgcccagcttagatccatctaggccggttatagtatgttatatattgcaagaaggtgtgagagtagtcgactcggcttggaccaagccattccaagagctaggaccaatctacgcggaggccaatggtggtacgtacccagatctagccgcctggactggcaactcaaacaaagatcctccttgccaaaaggctgacctcgtgaatcttcgttttcctgtcgacgtaatggagtacgatactgcagcgcagcgagaagtctacgacatgttcgcgcaagctacacacgacacacctgctctaaacgggtctctctttctattcgaaggatactcactgcagggagtgcaagccattccgagtgagagcactgcgttcccgtttaggggagaccgcctgttattcaccccgctgctcacatatcccccgggtgggcctgagctcgacaaaagagccgcggaccttggcaatagccttcgccaggtgctctacaaagctagtggccgccaggaactgcatacatatgtgaattacgcatttggcgatgaatctcctaagaattggtacggatatgaacaatggcgtcaggatcgattgcaggccttgaagcacaaatacgatccgcgtggcaaattcagctactacgcgccgatcatttga

SEQ ID NO: 15136 - protein, 503 aa, Muscodor strobelii
  misc_feature: SGI Peptide ID NO. 565005
  misc_feature (458)..(503): Pfam Id: PF08031 Pfam Desc: Berberine and berberine like
  misc_feature (71)..(207): Pfam Id: PF01565 Pfam Desc: FAD binding domain
  misc_feature (16)..(502): NCBI GI: 119473675 Blast Desc: FAD binding domain protein [Neosartorya fischeri NRRL 181] gi|119406866|gb|EAW16816.1| FAD binding domain protein [Neosartorya fischeri NRRL 181]
  misc_feature (1)..(502): NCBI GI: 169786187 Blast Desc: [Aspergillus oryzae RIB40] gi|83776302|dbj|BAE66421.1| protein product [Aspergillus oryzae]
  misc_feature (16)..(502): NCBI GI: 70985799 Blast Desc: FAD-dependent oxygenase [Aspergillus fumigatus Af293] gi|66846034|gb|EAL86367.1| FAD-dependent oxygenase, [Aspergillus fumigatus Af293] gi|159128459|gb|EDP53574.1| FAD-dependent A1163]
  misc_feature (1)..(502): NCBI GI: 238491442 Blast Desc: FAD-dependent oxygenase, [Aspergillus flavus NRRL3357] gi|220697371|gb|EED53712.1| FAD-dependent oxygenase, [Aspergillus flavus NRRL3357]
  misc_feature (1)..(502): NCBI GI: 169773459 Blast Desc: [Aspergillus oryzae RIB40] gi|83769059|dbj|BAE59196.1| protein product [Aspergillus oryzae]
  misc_feature (1)..(502): NCBI GI: 240107435 Blast Desc: FAD binding domain containing protein [Coccidioides posadasii C735 delta SOWgp]
  misc_feature (1)..(502): NCBI GI: 238846125 Blast Desc: FAD binding domain-containing protein [Microsporum canis CBS 113480]
  misc_feature (27)..(502): NCBI GI: 119191099 Blast Desc: CIMG_05597 [Coccidioides immitis RS]
  misc_feature (3)..(502): NCBI GI: 238842487 Blast Desc: FAD binding domain-containing protein [Microsporum canis CBS 113480]
  misc_feature (16)..(502): NCBI GI: 255955067 Blast Desc: Pc21g12590 [Penicillium chrysogenum Wisconsin 54-1255] gi|211589997|emb|CAP96156.1| Pc21g12590 [Penicillium chrysogenum Wisconsin 54-1255]
  misc_feature: Useful for introducing or modulating the production of volatile compounds
MEVATAIFAWALTSACRSLSPSNNLWGLCSQSNSTSDLLERLSPSAEVYLPGTSGFNNATTRWSVLDEPGINLVVVPGTEDDVAVTVKYANDRDIPYIALSGGHGAITTVGRLKNGIEIWLHQLSSAQVASDGKSVKIGGGTLTKTVIDSLWAERKQTVNGGCECVSFLGPALGGGHGWLQGRHGLIADQFMSMNIVMADGKLHTIDAESAPDLWWAMKGAGHNFGIVTSVTSKVFDITRPEWAYASFIFTGDKIERLYDATNKYILKNGTQPVDILNFSVFVNMPSLDPSRPVIVCYILQEGVRVVDSAWTKPFQELGPIYAEANGGTYPDLAAWTGNSNKDPPCQKADLVNLRFPVDVMEYDTAAQREVYDMFAQATHDTPALNGSLFLFEGYSLQGVQAIPSESTAFPFRGDRLLFTPLLTYPPGGPELDKRAADLGNSLRQVLYKASGRQELHTYVNYAFGDESPKNWYGYEQWRQDRLQALKHKYDPRGKFSYYAPII

SEQ ID NO: 15137 - DNA, 2804 bp, Muscodor strobelii
  misc_feature: SGI EST ID NO. CUFF.36035.0
  misc_feature: Variant of the nucleotide sequence at SEQ ID NO 15135
gtcaaagataatgataccttgtgtcctcttcgtcgattttggtgtgtgtaattgacgccgtccatctcgcaaaccaacgggaacaagcaatgtatcttttcaagaacttagtgactgtatttgatactatcatggaatcccgagcttgatgagagcgtattgatgttgaaactaaactgcactaaaggatcgatatctggtgcaaatcgctaagagacaggcggcggccattgccgtgcggactggaatagcagctcctctaagtgacagtcgacgagccatggctgctatcatgcatgctcccgtgggcgcatggtcgtattgagcccgccttgcatgtcccttgcctggatcattccctcaccgcataacgggcgtgcgttgacaggccttattggctcaattcctcgaaagggatggcatgccgacgtctaagttgtccagacatttccatgagttctcaactgtcctctttgtcttagtcatgggcgattgattacagactcgggggcagccgaaccgtatgacggcccccaatgaaggctacatgcagactccgatgcccgtaatgtaccagagggtggtttctaacgatttcgagttttgtttctaatattatgtccacctcgcacttggtaacacaaatacacgtaacgtttatccgctgctagagctttcattgatagcttccacgtctctcgcacttcgagttccccgcccgtgtatgtcgcacgtcgaatcaagatggaggtggcaacagcaattttcgcttgggctctcacttctgcctgtcgaagcctctctccttctaataatttatggggcctctgctcgcaatctaacagcacgagcgatctcttggaaagactctcgccaagcgcagaagtctacctaccaggaacgagtggattcaacaatgccacgacccgttggtcggtgctggatgagcctggtatcaaccttgtggtggtccccggtaccgaggatgacgtagccgtgactgttaaatatgccaatgaccgagacataccctatattgcgcttagtggcggacacggcgcaatcaccactgttggcaggctgaagaacggcattgagatctggctccaccagcttagcagtgcacaagtggcaagcgacggaaagtctgtaaagatcggtggcggaacgctcactaagaccgttatcgactctctctgggccgagcgcaagcagactgtcaacggcggatgcgagtgcgtcagtttccttggacctgccctgggcggcggccacggctggctccaaggtcgtcatggactcattgcggatcaattcatgtcaatgaatatcgtgatggcggatggcaaactacatactattgacgcagaatctgctccggacctttggtgggctatgaaaggcgccggacataacttcggcatcgtaacctcagtcacatctaaagtgttcgacatcacacgccctgaatgggcatacgcaagtttcatcttcactggagacaagatcgaacgcctgtatgatgctactaacaagtacatcctgaaaaatgggacgcagccagttgacatccttaacttctcggtcttcgtcaatatgcccagcttagatccatctaggccggttatagtatgttatatattgcaagaaggtgtgagagtagtcgactcggcttggaccaagccattccaagagctaggaccaatctacgcggaggccaatggtggtacgtacccagatctagccgcctggactggcaactcaaacaaagatcctccttgccaaaaggctgacctcgtgaatcttcgttttcctgtcgacgtaatggagtacgatactgcagcgcagcgagaagtctacgacatgttcgcgcaagctacacacgacacacctgctctaaacgggtctctctttctattcgaaggatactcactgcagggagtgcaagccattccgagtgagagcactgcgttcccgtttaggggagaccgcctgttattcaccccgctgctcacatatcccccgggtgggcctgagctcgacaaaagagccgcggaccttggcaatagccttcgccaggtgctctacaaagctagtggccgccaggaactgcatacatatgtgaattacgcatttggcgatgaatctcctaagaattggtacggatatgaacaatggcgtcaggatcgattgcaggccttgaagcacaaatacgatccgcgtggcaaattcagctactacgcgccgatcatttgatcatccttttcgatattctggtgatacttcgaaatgggctgcgcctagttaatcgggtgagcgactgaatatctgcagaagcaccagaatccctatttgttcacgttattagaacacaattatactacttcttctagatacgtggcaattgtgtaacagaaatcattgtctctcatttgggactatcttaaacgatgactttaccactgatgcgagcaaatctcatagaaatattttgtagctttacgtctctgtgccaaacacggtgtttgtgtagaaagttaggtgatctcacgatctggcggcatataaacactgtgaggttgatgagacaccgagtccttgtctgtccggtatggctgctgtgaactccaattgtagacttggccctcgaaactcgaaagaacaaggcaaagataccttctggtcgatacttcaattcacaattagttgcgagacatcacaaaatgattttctagatttcttcctacggagcctggccaggcgctaatgtagctacgaagctctgcaacaccaactgataattg

SEQ ID NO: 15138 - DNA, 1077 bp, Muscodor strobelii
  misc_feature: SGI cDNA ID NO. 565006
  misc_feature: Encodes the peptide sequence at SEQ ID NO 15139
atggtgccctccacatcaatcctcagcgtcttaacgctcatccacgcgacagtgacctctgccctcccaggatcgcgaacgatcccagaagcacgacaagaatcatgtgcccccgtcccctcagcagggaaatatccaacatggtctcaactccccttacaaaccaccatgcctgacccatttctccctctagcatgtcgtcaccaacgcgtccactacgagaataccactaacacacagctcaaagacacaacccccgacaacgcagcagacgtaatgaccggcaagggactcaaccgtatccaaacacccgaacaatggtacacatgtcgccaacccgagattctcaacatgctgcaagaataccaatacgggtactatccagaccactccctagaaaccgtctcagctacacggtcaggaaacacagtctccatctccgtgacagccgggggcaagactgggaagttcagcgccacgctcgcgctacccagtggcgcaagcgtcctaacagcatgggcctggggattccaccgcgtcctcgacgccctaaacagcaccgtcccagaaataaaccccaacctcgtagccgtaaccgggtgttcccgcctaggcaaaggggccctcgccgcgggactattcgacaaacgcataaccctaaccatgccgatgtcctcgggcgtccaaggcgcaggaccctaccggtaccacgcgatgtcaggccaagacgaaaccctcgagaactctaaacagggtgctccctggtggtccgacaacaccctaggtacattcgtgaaccacgctgagaatctgccgtacgatgcacataccgtcgttgcggccatcgcccccagagcggtggtgctggatcaggggactggtgatgcgtttacgaatagtaaggcgactgctgttgttgtttatcccgctgctaaggttgttacgagtgttttgccgtttgttcagcatattctgttgaatgccacgctgacgaagaattacaatgatctggggagttatggtgcgccgatgactacgacgtatccttgggctactgctgtgccgaagcctgcttga

SEQ ID NO: 15139 - protein, 358 aa, Muscodor strobelii
  misc_feature: SGI Peptide ID NO. 565006
  misc_feature (36)..(356): NCBI GI: 116182932 Blast Desc: CHGG_02094 [Chaetomium globosum CBS 148.51] gi|88186391|gb|EAQ93859.1| CHGG_02094 [Chaetomium globosum CBS 148.51]
  misc_feature (32)..(350): NCBI GI: 171694536 Blast Desc: protein product [Podospora anserina] gi|170947510|emb|CAP59671.1| protein product [Podospora anserina]
  misc_feature (46)..(337): NCBI GI: 169863469 Blast Desc: CC1G_04800 [Coprinopsis cinerea okayama7#130] gi|116500649|gb|EAU83544.1| CC1G_04800 [Coprinopsis cinerea okayama7#130]
  misc_feature (91)..(293): NCBI GI: 116200458 Blast Desc: CHGG_10774 [Chaetomium globosum CBS 148.51] gi|88175488|gb|EAQ82956.1| CHGG_10774 [Chaetomium globosum CBS 148.51]
  misc_feature (91)..(289): NCBI GI: 171676366 Blast Desc: protein product [Podospora anserina] gi|170936249|emb|CAP60908.1| protein product [Podospora anserina]
  misc_feature (108)..(289): NCBI GI: 171681567 Blast Desc: protein product [Podospora anserina] gi|170940742|emb|CAP65970.1| protein product [Podospora anserina]
  misc_feature (91)..(290): NCBI GI: 31747154 Blast Desc: Cip2 [Hypocrea jecorina]
  misc_feature (30)..(289): NCBI GI: 162449268 Blast Desc: sce0998 [Sorangium cellulosum 'So ce 56'] gi|161159850|emb|CAN91155.1| by Glimmer/Critica [Sorangium cellulosum 'So ce 56']
  misc_feature (108)..(294): NCBI GI: 169856114 Blast Desc: CC1G_05856 [Coprinopsis cinerea okayama7#130] gi|116504272|gb|EAU87167.1| CC1G_05856 [Coprinopsis cinerea okayama7#130]
  misc_feature (91)..(293): NCBI GI: 156036158 Blast Desc: SS1G_12765 [Sclerotinia sclerotiorum 1980] gi|154698173|gb|EDN97911.1| SS1G_12765 [Sclerotinia sclerotiorum 1980]
MVPSTSILSVLTLIHATVTSALPGSRTIPEARQESCAPVPSAGKYPTWSQLPLQTTMPDPFLPLACRHQRVHYENTTNTQLKDTTPDNAADVMTGKGLNRIQTPEQWYTCRQPEILNMLQEYQYGYYPDHSLETVSATRSGNTVSISVTAGGKTGKFSATLALPSGASVLTAWAWGFHRVLDALNSTVPEINPNLVAVTGCSRLGKGALAAGLFDKRITLTMPMSSGVQGAGPYRYHAMSGQDETLENSKQGAPWWSDNTLGTFVNHAENLPYDAHTVVAAIAPRAVVLDQGTGDAFTNSKATAVVVYPAAKVVTSVLPFVQHILLNATLTKNYNDLGSYGAPMTTTYPWATAVPKPA

SEQ ID NO: 15140 - DNA, 1356 bp, Muscodor strobelii
  misc_feature: SGI cDNA ID NO. 565007
  misc_feature: Encodes the peptide sequence at SEQ ID NO 15141
atggcatcgtcccagctggcacccgatgtctcgtggtcctccatccccagcgatatcctccgtgccgagctcgccagacgacaagacgacactccttccgcaaaacccgcctgcggctctggcgataagggctcctacgatacacctctgcacgtcttcgccctgctcctcatcctagccctcagcaccctcgcctgcggattccccttgttctcgcgccagacctccaagacgggcagccgacgcgccaacaccatcatcttcctcagccagcacttcggcaccggtgtcctcatcgccacggccttcgtccacctcctcccgaccgccttcgtctccctcaccgacccatgtctcccggacttcttctcctcgcagtaccagcccaccgcgggcctggtcgccatggtctccgccctcgtcgtcgtcgccctcgagtcctatctcaacaaccgtggcgccggccactcgcactcccatcaccacggctgggagtctgatgacgacgagcaggacgacatacctcatatcacaacgcagacgaacggtggactagcagccaagagaatcaccaaccaccgacccgcagacattgcccttgatgatgtaggcgcaagccgcgggctcatgacggacgtgtcgcctctacctggtgccactcccaccagcgcgcccccttatcaaaatggaaacagctcctataagaaagatgtagacgaagacgacgacgacgaagatctagaactgaacctcaacgaactcgaccccgccaccaacgacgactcccgacctctttccggcgcacccggcaagcgagacgtctccgacatgggacagccccaagccccattgacacccgaagaacagagacggcgcatgctgcagtgcgtactcctagaagccggcatcctcttccacagcgtcttcatcggcatggccgtctccgtcgccaccggtccccctttcgtcgtattcctcatcgccatcgccttccaccagaccttcgagggtctcgccctcggctcccgaatagctgctctacaattccctcgctcatccctccgcccctggctgatggtactcgcctacggtgtcacgacccccttcggacaagctatcggtctcggagttcacaccctatatgatccgaagagtcagactggtttgctgcttgtggggttcatgaacgctatttcgagtggtctgctgctcttcgccggccttgtgcaattacttgctgaagacttcctcagtgagaagagctacaagacgctgaagggcaagaagaggaggaatgccgggattgctgtttttgctggggctatgctcatggctcttgttggcgcttttgcttaa

SEQ ID NO: 15141 - protein, 451 aa, Muscodor strobelii
  misc_feature: SGI Peptide ID NO. 565007
  misc_feature (48)..(448): Pfam Id: PF02535 Pfam Desc: ZIP Zinc transporter
  misc_feature (298)..(448): Pfam Id: PF02535 Pfam Desc: ZIP Zinc transporter
  misc_feature (48)..(163): Pfam Id: PF02535 Pfam Desc: ZIP Zinc transporter
  misc_feature (7)..(451): NCBI GI: 116182930 Blast Desc: CHGG_02093 [Chaetomium globosum CBS 148.51] gi|88186390|gb|EAQ93858.1| CHGG_02093 [Chaetomium globosum CBS 148.51]
  misc_feature (11)..(451): NCBI GI: 256734784 Blast Desc: [Nectria haematococca mpVI 77-13-4]
  misc_feature (11)..(451): NCBI GI: 46107770 Blast Desc: FG00768.1 [Gibberella zeae PH-1]
  misc_feature (11)..(451): NCBI GI: 156053954 Blast Desc: SS1G_05825 [Sclerotinia sclerotiorum 1980] gi|154703605|gb|EDO03344.1| SS1G_05825 [Sclerotinia sclerotiorum 1980]
  misc_feature (9)..(451): NCBI GI: 171694522 Blast Desc: protein product [Podospora anserina] gi|170947503|emb|CAP59664.1| protein product [Podospora anserina]
  misc_feature (3)..(451): NCBI GI: 39942036 Blast Desc: MGG_10867 [Magnaporthe grisea 70-15] gi|145012159|gb|EDJ96815.1| MGG_10867 [Magnaporthe grisea 70-15]
  misc_feature (7)..(451): NCBI GI: 85114926 Blast Desc: NCU00860 [Neurospora crassa OR74A] gi|28926570|gb|EAA35540.1| conserved [Neurospora crassa OR74A]
  misc_feature (9)..(451): NCBI GI: 261361427 Blast Desc: zinc-regulated transporter 1 [Verticillium albo-atrum VaMs.102]
  misc_feature (11)..(451): NCBI GI: 154321471 Blast Desc: BC1G_01610 [Botryotinia fuckeliana B05.10] gi|150852148|gb|EDN27340.1| BC1G_01610 [Botryotinia fuckeliana B05.10]
  misc_feature (11)..(451): NCBI GI: 119195773 Blast Desc: CIMG_02261 [Coccidioides immitis RS]
MASSQLAPDVSWSSIPSDILRAELARRQDDTPSAKPACGSGDKGSYDTPLHVFALLLILALSTLACGFPLFSRQTSKTGSRRANTIIFLSQHFGTGVLIATAFVHLLPTAFVSLTDPCLPDFFSSQYQPTAGLVAMVSALVVVALESYLNNRGAGHSHSHHHGWESDDDEQDDIPHITTQTNGGLAAKRITNHRPADIALDDVGASRGLMTDVSPLPGATPTSAPPYQNGNSSYKKDVDEDDDDEDLELNLNELDPATNDDSRPLSGAPGKRDVSDMGQPQAPLTPEEQRRRMLQCVLLEAGILFHSVFIGMAVSVATGPPFVVFLIAIAFHQTFEGLALGSRIAALQFPRSSLRPWLMVLAYGVTTPFGQAIGLGVHTLYDPKSQTGLLLVGFMNAISSGLLLFAGLVQLLAEDFLSEKSYKTLKGKKRRNAGIAVFAGAMLMALVGAFA

SEQ ID NO: 15142 - DNA, 4504 bp, Muscodor strobelii
  misc_feature: SGI EST ID NO. CUFF.36063.0
  misc_feature: Variant of the nucleotide sequence at SEQ ID NO 15140
gtccggtcgatgtgttctacctcacagaggtcattcttgctcccattgctgccgtagtcgcaagtgaagctggaaagagctgtgatcttcgtttacatctcatgtctatcgtccggtcgattatcatccaaaccatcgtccggactactgagtgattctcccagtgatagccagcatgtaataattcactcatcctgttcacgatcttcccctccctctccccctccttagcatcacatagtccaccaaccaccaacataaggtatgcgctagttttctcgtcacaacaccagcatgtgattgtttgttgactaacactgctagcatccagtcatcctaagtacgatatccctctgcgctgtttccgtcgcatctttcccatcccatcagttcagtcgcattgttttcgtcgcatatctgctcgtcccatcgcttccaatcccgcatactccgtccaaagcagcgacacgatgcctaaccacctccgcactgtcggtgagcgcgctgtgcgcgccaattacgtccgagataccgtcgaggggcacgagcaacgcctcgtccgaagtggccaaggtatcagcagcgccaatgtcagccagggtgccgacgcaggagatattggacgaagcacctccgtcccatctcagtccattgtctctatgttccctcaatatcccgcagagagtgtcctccgaatggccggacatcccacggatcgcatcgttgataccccctccagccgcgttgccagtgacccctctgtccgcactaccggggatgcctccgtccgaaatgctgatgaaccttcccctcgcactgctggcggcccctccattcgcatcgccaacgatctctctgctcgcatcgctgggacccctacagccagccaaggccatcgaggtatgaacaacgccaacactaactctgggctcaaccctggagccctccaacgccatactgccatgccatcccagtcaactaggccacaggcgtcggagcagcttggctcccacccccatccagcttctggtatcctcgccacagtccgtaaaggctctcgagatgttggacgatacggcctcatgactgcctccccatcgcccgctcctggaccgtctcagcagcatgaagctcgcgaccgtcgcattgccggtaatgccagcgctggtcagggtccccagcctactggcaacatgagtatgcccccgccatcagccaactctggccacatcaagcaggctcagatgcactaccgccaagccgcagctgaagaggagcgacaccgacgcgccgtcgacaggcagagatatcgtcgtcaagccgagttcgagagacgagtccgcgcaaccagaaaagccgctgctcgtcccgacaaggcttacgccatgcgtgctggcaacccccctatccctctggcttggaatgcggagagcctgccccctgaccacgccaacatgacgctgttccagatccgcgtctggcaggccaacctccgccacgagaagctgcgcaatcttcgagaggaacgggaactccttcctatcaccctcgagaacaaggacgacgagagactgcgcaagttcagagcggaatcccttcctatcgccttcgagaagaacgatgagaagaaatccggtatgcaacctcctgatcttcatacctacccatacttgacaaggctctgactgaccaaacctgtgctcgtggatagagacagagggacagagctgggctcgcatgcgccaggaccgtgtctagttagcatggagcgccggcccgcttgacacagttttcacggatttcggcactgatatctggcgcaagatcgagaagcagatgaagaccaagaagggttatgtgtatgacccggatacgcccatgtcgcgcaccgctgcctatgctggcaggaagtacgagcatctcattccccttggaattgagagagagcctatggatgttgatgaggagagaaagtagatggattctcttcagctacatctagactggctcgctaaaacgaaagagcgaaagttgccgacacatttccatactggcttgcgtgataagctgtactattgcgagatgtaccagaggattgctcaacaaatactgaatcacgatggtcccggggacgtcatctggagaatatatcctactccatcattgcgcattttcctttcagcttacgcgagcttgtgcctggcctggatatcgattgtcatgatgtgttgagtaacgttgtcgttggatgaggattgatgatgcatcacagggctgaaggggggagcaatgagcactaagatgtgtcaatgtgggggatgagacttgcgcgttgcagaaaggataccgtcattccggcgctgtctctcgctaattctcaggtatacagggagtatgctgcatgtactataggacggatatggactatctcggtcgcaacggcagccggtccatttgaccttttactaaatcccacgtccaattccaaatcgggtgcatttccgtgacgaaggccactgtttcaagctgacaacgtatctatcttgccgtgtttctggagtggtagtattgtaaaatcaataaatcaatcaaatctctatatccaagaggatgcttatcgcatctgcagttgcaaacgattgattgactgtctaagtagatcaacctccctttgttctatacccgaaacaacccacggtgcgctttaacgatgctgctttcctccaaggctggttcttgaataatccacgcctctcgccattctgcgacatccactcatcgccatggcatcgtcccagctggcacccgatgtctcgtggtcctccatccccagcgatatcctccgtgccgagctcgccagacgacaagacgacactccttccgcaaaacccgcctgcggctctggcgataagggctcctacgatacacctctgcacgtcttcgccctgctcctcatcctagccctcagcaccctcgcctgcggattccccttgttctcgcgccagacctccaagacgggcagccgacgcgccaacaccatcatcttcctcagccagcacttcggcaccggtgtcctcatcgccacggccttcgtccacctcctcccgaccgccttcgtctccctcaccgacccatgtctcccggacttcttctcctcgcagtaccagcccaccgcgggcctggtcgccatggtctccgccctcgtcgtcgtcgccctcgagtcctatctcaacaaccgtggcgccggccactcgcactcccatcaccacggctgggagtctgatgacgacgagcaggacgacatacctcatatcacaacgcagacgaacggtggactagcagccaagagaatcaccaaccaccgacccgcagacattgcccttgatgatgtaggcgcaagccgcgggctcatgacggacgtgtcgcctctacctggtgccactcccaccagcgcgcccccttatcaaaatggaaacagctcctataagaaagatgtagacgaagacgacgacgacgaagatctagaactgaacctcaacgaactcgaccccgccaccaacgacgactcccgacctctttccggcgcacccggcaagcgagacgtctccgacatgggacagccccaagccccattgacacccgaagaacagagacggcgcatgctgcagtgcgtactcctagaagccggcatcctcttccacagcgtcttcatcggcatggccgtctccgtcgccaccggtccccctttcgtcgtattcctcatcgccatcgccttccaccagaccttcgagggtctcgccctcggctcccgaatagctgctctacaattccctcgctcatccctccgcccctggctgatggtactcgcctacggtgtcacgacccccttcggacaagctatcggtctcggagttcacaccctatatgatccgaagagtcagactggtttgctgcttgtggggttcatgaacgctatttcgagtggtctgctgctcttcgccggccttgtgcaattacttgctgaagacttcctcagtgagaagagctacaagacgctgaagggcaagaagaggaggaatgccgggattgctgtttttgctggggctatgctcatggctcttgttggcgcttttgcttaatgtattatctatttgggctttggctacggattcctcgggcaattgttctacgatgttatatgatggctggtgttctgggtttatttacgatcgtagatattggtctccctaaagcatgttataggcgttcaggtactactttaatggtagagaaaactttcagtgatatatttcttgacgtcttatctcaagctatgtattccctattctttattccattcctgtctccccgcaagccgatcaagcaggcttcggcacagcagtagcccaaggatacgtcgtagtcatcggcgcaccataactccccagatcattgtaattcttcgtcagcgtggcattcaacagaatatgctgaacaaacggca

SEQ ID NO: 15143 - DNA, 1965 bp, Muscodor strobelii
  misc_feature: SGI cDNA ID NO. 565008
  misc_feature: Encodes the peptide sequence at SEQ ID NO 15144
atgcctccgccgtctcatttcgtgacggtcatgacaaccggcaaagagcaactcctgaacactcgagacacacaaatcaaagccattgtcatgtttgaaatcgatttcattctctttaatcaatccgtcaacacggtcctcaatctattcactgccgtcgtcgcgtggtcaatcaacgaccaggataccaagtttcagaccgaagatggtcgagagggtgaaattggtgatggttccattctcctcaacgctcacgctgaagatggttcagactacgagactcacgatgagcaatatgatgcagatcgtgaatacatgtatgttagtacttgccctgtgacactgagaacccgggcaacactcgccatatggaagttcatgcgatcaaactccatggctgctgcggagttcaggcagtccaacccatcgagaagggtgatggaaagtcatcctaagtacgatatccctctgcgctgtttccgtcgcatctttcccatcccatcagttcagtcgcattgttttcgtcgcatatctgctcgtcccatcgcttccaatcccgcatactccgtccaaagcagcgacacgatgcctaaccacctccgcactgtcggtgagcgcgctgtgcgcgccaattacgtccgagataccgtcgaggggcacgagcaacgcctcgtccgaagtggccaaggtatcagcagcgccaatgtcagccagggtgccgacgcaggagatattggacgaagcacctccgtcccatctcagtccattgtctctatgttccctcaatatcccgcagagagtgtcctccgaatggccggacatcccacggatcgcatcgttgataccccctccagccgcgttgccagtgacccctctgtccgcactaccggggatgcctccgtccgaaatgctgatgaaccttcccctcgcactgctggcggcccctccattcgcatcgccaacgatctctctgctcgcatcgctgggacccctacagccagccaaggccatcgaggtatgaacaacgccaacactaactctgggctcaaccctggagccctccaacgccatactgccatgccatcccagtcaactaggccacaggcgtcggagcagcttggctcccacccccatccagcttctggtatcctcgccacagtccgtaaaggctctcgagatgttggacgatacggcctcatgactgcctccccatcgcccgctcctggaccgtctcagcagcatgaagctcgcgaccgtcgcattgccggtaatgccagcgctggtcagggtccccagcctactggcaacatgagtatgcccccgccatcagccaactctggccacatcaagcaggctcagatgcactaccgccaagccgcagctgaagaggagcgacaccgacgcgccgtcgacaggcagagatatcgtcgtcaagccgagttcgagagacgagtccgcgcaaccagaaaagccgctgctcgtcccgacaaggcttacgccatgcgtgctggcaacccccctatccctctggcttggaatgcggagagcctgccccctgaccacgccaacatgacgctgttccagatccgcgtctggcaggccaacctccgccacgagaagctgcgcaatcttcgagaggaacgggaactccttcctatcaccctcgagaacaaggacgacgagagactgcgcaagttcagagcggaatcccttcctatcgccttcgagaagaacgatgagaagaaatccgcatggagcgccggcccgcttgacacagttttcacggatttcggcactgatatctggcgcaagatcgagaagcagatgaagaccaagaagggttatgtgtatgacccggatacgcccatgtcgcgcaccgctgcctatgctggcaggaagtacgagcatctcattccccttggaattgagagagagcctatggatgttgatgaggagagaaagtag

SEQ ID NO: 15144 - protein, 654 aa, Muscodor strobelii
  misc_feature: SGI Peptide ID NO. 565008
MPPPSHFVTVMTTGKEQLLNTRDTQIKAIVMFEIDFILFNQSVNTVLNLFTAVVAWSINDQDTKFQTEDGREGEIGDGSILLNAHAEDGSDYETHDEQYDADREYMYVSTCPVTLRTRATLAIWKFMRSNSMAAAEFRQSNPSRRVMESHPKYDIPLRCFRRIFPIPSVQSHCFRRISARPIASNPAYSVQSSDTMPNHLRTVGERAVRANYVRDTVEGHEQRLVRSGQGISSANVSQGADAGDIGRSTSVPSQSIVSMFPQYPAESVLRMAGHPTDRIVDTPSSRVASDPSVRTTGDASVRNADEPSPRTAGGPSIRIANDLSARIAGTPTASQGHRGMNNANTNSGLNPGALQRHTAMPSQSTRPQASEQLGSHPHPASGILATVRKGSRDVGRYGLMTASPSPAPGPSQQHEARDRRIAGNASAGQGPQPTGNMSMPPPSANSGHIKQAQMHYRQAAAEEERHRRAVDRQRYRRQAEFERRVRATRKAAARPDKAYAMRAGNPPIPLAWNAESLPPDHANMTLFQIRVWQANLRHEKLRNLREERELLPITLENKDDERLRKFRAESLPIAFEKNDEKKSAWSAGPLDTVFTDFGTDIWRKIEKQMKTKKGYVYDPDTPMSRTAAYAGRKYEHLIPLGIEREPMDVDEERK

SEQ ID NO: 15145 - DNA, 888 bp, Muscodor strobelii
  misc_feature: SGI cDNA ID NO. 565009
  misc_feature: Encodes the peptide sequence at SEQ ID NO 15146
atgccatcccagtcaactaggccacaggcgtcggagcagcttggctcccacccccatccagcttctggtatcctcgccacagtccgtaaaggctctcgagatgttggacgatacggcctcatgactgcctccccatcgcccgctcctggaccgtctcagcagcatgaagctcgcgaccgtcgcattgccggtaatgccagcgctggtcagggtccccagcctactggcaacatgagtatgcccccgccatcagccaactctggccacatcaagcaggctcagatgcactaccgccaagccgcagctgaagaggagcgacaccgacgcgccgtcgacaggcagagatatcgtcgtcaagccgagttcgagagacgagtccgcgcaaccagaaaagccgctgctcgtcccgacaaggcttacgccatgcgtgctggcaacccccctatccctctggcttggaatgcggagagcctgccccctgaccacgccaacatgacgctgttccagatccgcgtctggcaggccaacctccgccacgagaagctgcgcaatcttcgagaggaacgggaactccttcctatcaccctcgagaacaaggacgacgagagactgcgcaagttcagagcggaatcccttcctatcgccttcgagaagaacgatgagaagaaatccgcatggagcgccggcccgcttgacacagttttcacggatttcggcactgatatctggcgcaagatcgagaagcagatgaagaccaagaagggttatgtgtatgacccggatacgcccatgtcgcgcaccgctgcctatgctggcaggaagtacgagcatctcattccccttggaattgagagagagcctatggatgttgatgaggagagaaagtag

SEQ ID NO: 15146 - protein, 295 aa, Muscodor strobelii
  misc_feature: SGI Peptide ID NO. 565009
MPSQSTRPQASEQLGSHPHPASGILATVRKGSRDVGRYGLMTASPSPAPGPSQQHEARDRRIAGNASAGQGPQPTGNMSMPPPSANSGHIKQAQMHYRQAAAEEERHRRAVDRQRYRRQAEFERRVRATRKAAARPDKAYAMRAGNPPIPLAWNAESLPPDHANMTLFQIRVWQANLRHEKLRNLREERELLPITLENKDDERLRKFRAESLPIAFEKNDEKKSAWSAGPLDTVFTDFGTDIWRKIEKQMKTKKGYVYDPDTPMSRTAAYAGRKYEHLIPLGIEREPMDVDEERK

SEQ ID NO: 15147 - DNA, 753 bp, Muscodor strobelii
  misc_feature: SGI cDNA ID NO. 565010
  misc_feature: Encodes the peptide sequence at SEQ ID NO 15148
atggaaagttctcatgatgaaatttccatcatgaagacagaacgagagcagatgagaggccgccaagtctatctccaagtcggcagtcgagaattcgtcactcatcgagccacactcacgagtgagagtttgtattttcgtgtcttgctttctggtggcggtgattcctatcggtttaatgtcggtgaagttgaagccgtgtatttcattgatgcagaccccgacttgtttacggatatacttcgctacttacgcactggcattcttcctctttatttcgatccaagcacgaagacatttgatcacgcaaagtacatggctcttcttggtgaagcaagatttctccgaatcaagaaactcgaggagtggattgagaagcaaggttaccaggaagccatcaaagtcgaacacagcatccacatatacgaggaatctgagcaagcggccatccccaagacacacaatatggatgagcaatctgaattctcatttgtatcaagagccaaaagaacatacctctgtcctcgccgaatccaagtacacaatggtcaaccagataagtgcggccgacaatgcaagaacgctcagggcgatgcagatcgggaatatgaggagactcgagagctcacaacaatcgtcgtcaaaactcgacatgtcttcaaccctcaagcttgtttgggtctgcttcaatcggaacccgacgctgtgccgcaggagatgggtgaagtcacaaacatccttaatgtcgattga

SEQ ID NO: 15148 - protein, 250 aa, Muscodor strobelii
  misc_feature: SGI Peptide ID NO. 565010
  misc_feature (23)..(124): Pfam Id: PF02214 Pfam Desc: K+ channel tetramerisation domain
  misc_feature (1)..(232): NCBI GI: 154292565 Blast Desc: BC1G_14806 [Botryotinia fuckeliana B05.10] gi|150845887|gb|EDN21080.1| BC1G_14806 [Botryotinia fuckeliana B05.10]
  misc_feature (8)..(227): NCBI GI: 116200826 Blast Desc: CHGG_10958 [Chaetomium globosum CBS 148.51] gi|88175672|gb|EAQ83140.1| CHGG_10958 [Chaetomium globosum CBS 148.51]
  misc_feature (11)..(204): NCBI GI: 238844541 Blast Desc: conserved [Microsporum canis CBS 113480]
  misc_feature (25)..(225): NCBI GI: 189194317 Blast Desc: [Pyrenophora tritici-repentis Pt-1C-BFP] gi|187979061|gb|EDU45687.1| [Pyrenophora tritici-repentis Pt-1C-BFP]
  misc_feature (22)..(222): NCBI GI: 119176975 Blast Desc: [Coccidioides immitis RS]
  misc_feature (21)..(225): NCBI GI: 169610922 Blast Desc: SNOG_08570 [Phaeosphaeria nodorum SN15] gi|160702183|gb|EAT83738.2| SNOG_08570 [Phaeosphaeria nodorum SN15]
  misc_feature (10)..(220): NCBI GI: 39948661 Blast Desc: [Magnaporthe grisea 70-15] gi|145009245|gb|EDJ93956.1| [Magnaporthe grisea 70-15]
  misc_feature (21)..(233): NCBI GI: 115437716 Blast Desc: [Aspergillus terreus NIH2624] gi|114188696|gb|EAU30396.1| [Aspergillus terreus NIH2624]
  misc_feature (22)..(141): NCBI GI: 238502757 Blast Desc: conserved [Aspergillus flavus NRRL3357] gi|220691422|gb|EED47770.1| conserved [Aspergillus flavus NRRL3357]
  misc_feature (33)..(226): NCBI GI: 156048855 Blast Desc: SS1G_08134 [Sclerotinia sclerotiorum 1980] gi|154692533|gb|EDN92271.1| SS1G_08134 [Sclerotinia sclerotiorum 1980]
MESSHDEISIMKTEREQMRGRQVYLQVGSREFVTHRATLTSESLYFRVLLSGGGDSYRFNVGEVEAVYFIDADPDLFTDILRYLRTGILPLYFDPSTKTFDHAKYMALLGEARFLRIKKLEEWIEKQGYQEAIKVEHSIHIYEESEQAAIPKTHNMDEQSEFSFVSRAKRTYLCPRRIQVHNGQPDKCGRQCKNAQGDADREYEETRELTTIVVKTRHVFNPQACLGLLQSEPDAVPQEMGEVTNILNVD

SEQ ID NO: 15149 - DNA, 3576 bp, Muscodor strobelii
  misc_feature: SGI cDNA ID NO. 565011
  misc_feature: Reduced expression when VOC is produced
  misc_feature: Encodes the peptide sequence at SEQ ID NO 15150
atggctaccacgctcccccagaacggggcagtggacactcccaaaatgggccagcctagccagatggatgttgcctccctcttcaaggagatgcaagatacactctctgagattaataatacgatcgaaggtcttaagactaataaacaagaagctcggctcgaggaacttgagcagaaaagagaggatcttcttgcagaactgaactcagacttcgaaaagaagatttccgatatcaaagacaagtatgagagggagcaaaagcagacagaagacaagagaaggaaagaggatgaggaaagggagttgagaaggaagcaagaagacgaggagctacagaagcagagacaaaaagaagatgattccaagaagcgagaattcgagtcaaaatctgacgacgtcgaaaaggagacagattcacagatggatgaagttgaggaagaggctcggaagtttttcgaagatggaagacaaaagctgaaagacctcgagaagaaaagacaggatatcaatcaccgtatcgaagaacaactccaagcgccatctactattcctgatatccccaagaggaagcgagccaacacgaaaaagggtggaaagagcaacaagcctagtagctcacagctgaaagatgaggccacagagcctggtgcttctgaggttgatgcttctcagcccgagacctccaagtcacagtcctcagaagagacttcgataaagaaagatgatgctaatcgggagagcctcgatggatctatgacacccaccactgagctcgaggctgcttctcatcaagagaagctcgtcgcgccttccgaagacatcaccaaagctacggatgaggaaaaggacgacgctcagatttcgacgggtgacgcttccaagtctcaaactaatggcatcggacatcaagaggaaaatccgaacgcagacgaaaagctatcgcaagaagccgagcgacccgcgaaagatgtaaaatcgggaaaaccagaagatgcggagaagaacgcatcagtccccaatgataagacagcgaaacattccgcgaaggcagacacctccgccgcagtcaatgatacgcgtgaagatgagacaaagtctgaaatgactgaccgtaatgcgaaggaggaaacggaagatactgccgcccatagcaagtctgagagaggagagcctaagcaagatgcaagcacgtcaaagaaggacgacggtgattcaaattccaaggctgcagacaaaccagacgcacaatcaagcgatgacatatcaaccaacgaacagcaagacagggcttctggatcgagagagaaatctgagacaccgaagaagcgatctgatgtgaagaaagatgcctcgcagagtcaagatggcaagaaggaggatgtacctgatgccgaacacgttaagaaatccgaaacaccgaagaaagagaagaaggataaggcagacggtcatgtgtcgaagaagaaagacaactttcaggaggagtccaaaaagcccgaaactcctaagaaacatgatgccaagggggcagaaacgccgaggtcaaagtcgagtacttcacgccgctcaaagaccccaagcgaggactacacagacggcgatgattacacagacagtgaagccgagtatacgctaaaatcctcgaaacatggtagtaaggaagatagttctgttccacgatccgcctcgcatcactcgtcatctgggcataagacaggtggatcgaagtcgagatcagacgacaagcaccgcatgttcgacgagaatgacttcagtagtcgcgcttcaagcccatcgtcacgcccggccgactcgcagacgcctcgaacctcgataagccatccacgatctccagattcccccaagagacaacgctcaggtctgataattgagaaagagaaacaagtgaaggttcaaacggaggaggacaatgaccacggtcccaatgagctgtcactgaaactcgacgggattcccatcgacgacgaagtgcaagatcatggttcagagcaaggcaactccgataatgcatcctcgcaaaatagcatacggaatgcgcttgtggccatagacaatgcactttcgagtgaccatccacataataatccttcagtggatgacgacaacatctcggctgaggattttttcacagcttcggaaaactccgctcaatcggaatcgtcgacagtgcaaattacatcacctaaagctgaaggcgaactctccatagacgatgtgagagacgcactcttagctatcaatagtagtgtaaggtctgacaacacacatggtgcggtcgctgcatctgaaggggattcatcagaaggtaaagtctatgaagctttgaaggctatcgaccaagctttgccatctgtgcaggaacaagttgagcctgtccacgatggtgacgatgagcccactatggagcaagtccgagaagcgctatttgctattgagcaaagcatgccgtccaaatcgagggaatatgatcagcctcctgtgacagagaacgcgacggaagcgaatataagagacgcgctcctcgctattgagaagactgcgccaagtcaagccgaagatcagtcgacatcaagtgacaaaatttgggacgcactacaagctattgaccagacattgtcatctacggagaagggtaatgcacccgggaaaagtgcagagacaccaatggaaaatgccggcgaagcgcacgtgcgagatgcgctacttgctattgagaagactgcaccaagtaaggtcgaagatgttgaaacgttgaatggaaaagttcgggacgcactgcaagctattgaacagacattatcggctacaaagaatgatgacgagtccagtccaactgtcaatgtcgctgcagagaagcatggcgaggccgacatgcgggacgtgctactcgctatcgaaaagactgcgccaagccgccttgaagacaaagatacttcaaacggcaagatcagcgaggcagatgtgcaagaggcgctagctgccatcgaaaagactgcgccaagtcgccttgaaggcgaaaacacatcggacggcaaaatccgaaatgcgctgctggctatagaagaggctttaccgtctacgcaacaagacgatacatccggtcatggtgtagagacatcagctgacaaagtacgagatgctctactcgccattgaacactccgcgccatctcaaagcaaagcagccgatgaaccatccagccccaactacaatgtgtcgacagaaacggttcaaaatgtgctccaatctgttgagagcagtgcgccatctaaagcctttgctcaagtcgcaagcagcctaggagacagtgcagtgccgagatcaatgagaactaccgcggatgacgatcaagttggtatttcacacgacctcctgtcccaccccccaagtcgctcactgctaactgacactccctcgtcacaaaagacgcggaacggccctcgatccatcagactccatttgtccagcgaaaaccaggggaaggtcacgaacagagtgatatccggagagaacattcagcaattacggattccgactcttcatccattctag

SEQ ID NO: 15150 - protein, 1191 aa, Muscodor strobelii
  misc_feature: SGI Peptide ID NO. 565011
  misc_feature (22)..(196): NCBI GI: 261359988 Blast Desc: conserved [Verticillium albo-atrum VaMs.102]
  misc_feature (16)..(193): NCBI GI: 116196986 Blast Desc: [Chaetomium globosum CBS 148.51] gi|88181004|gb|EAQ88472.1| [Chaetomium globosum CBS 148.51]
  misc_feature (23)..(168): NCBI GI: 145606597 Blast Desc: MGG_11995 [Magnaporthe grisea 70-15] gi|145014284|gb|EDJ98852.1| MGG_11995 [Magnaporthe grisea 70-15]
  misc_feature (22)..(192): NCBI GI: 156049055 Blast Desc: SS1G_08234 [Sclerotinia sclerotiorum 1980] gi|154692633|gb|EDN92371.1| SS1G_08234 [Sclerotinia sclerotiorum 1980]
  misc_feature (93)..(192): NCBI GI: 154317110 Blast Desc: BC1G_03457 [Botryotinia fuckeliana B05.10] gi|150844874|gb|EDN20067.1| BC1G_03457 [Botryotinia fuckeliana B05.10]
  misc_feature: Useful for introducing or modulating the production of volatile compounds
MATTLPQNGAVDTPKMGQPSQMDVASLFKEMQDTLSEINNTIEGLKTNKQEARLEELEQKREDLLAELNSDFEKKISDIKDKYEREQKQTEDKRRKEDEERELRRKQEDEELQKQRQKEDDSKKREFESKSDDVEKETDSQMDEVEEEARKFFEDGRQKLKDLEKKRQDINHRIEEQLQAPSTIPDIPKRKRANTKKGGKSNKPSSSQLKDEATEPGASEVDASQPETSKSQSSEETSIKKDDANRESLDGSMTPTTELEAASHQEKLVAPSEDITKATDEEKDDAQISTGDASKSQTNGIGHQEENPNADEKLSQEAERPAKDVKSGKPEDAEKNASVPNDKTAKHSAKADTSAAVNDTREDETKSEMTDRNAKEETEDTAAHSKSERGEPKQDASTSKKDDGDSNSKAADKPDAQSSDDISTNEQQDRASGSREKSETPKKRSDVKKDASQSQDGKKEDVPDAEHVKKSETPKKEKKDKADGHVSKKKDNFQEESKKPETPKKHDAKGAETPRSKSSTSRRSKTPSEDYTDGDDYTDSEAEYTLKSSKHGSKEDSSVPRSASHHSSSGHKTGGSKSRSDDKHRMFDENDFSSRASSPSSRPADSQTPRTSISHPRSPDSPKRQRSGLIIEKEKQVKVQTEEDNDHGPNELSLKLDGIPIDDEVQDHGSEQGNSDNASSQNSIRNALVAIDNALSSDHPHNNPSVDDDNISAEDFFTASENSAQSESSTVQITSPKAEGELSIDDVRDALLAINSSVRSDNTHGAVAASEGDSSEGKVYEALKAIDQALPSVQEQVEPVHDGDDEPTMEQVREALFAIEQSMPSKSREYDQPPVTENATEANIRDALLAIEKTAPSQAEDQSTSSDKIWDALQAIDQTLSSTEKGNAPGKSAETPMENAGEAHVRDALLAIEKTAPSKVEDVETLNGKVRDALQAIEQTLSATKNDDESSPTVNVAAEKHGEADMRDVLLAIEKTAPSRLEDKDTSNGKISEADVQEALAAIEKTAPSRLEGENTSDGKIRNALLAIEEALPSTQQDDTSGHGVETSADKVRDALLAIEHSAPSQSKAADEPSSPNYNVSTETVQNVLQSVESSAPSKAFAQVASSLGDSAVPRSMRTTADDDQVGISHDLLSHPPSRSLLTDTPSSQKTRNGPRSIRLHLSSENQGKVTNRVISGENIQQLRIPTLHPF

SEQ ID NO: 15151 - DNA, 6115 bp, Muscodor strobelii
  misc_feature: SGI EST ID NO. CUFF.36204.2
  misc_feature: Variant of the nucleotide sequence at SEQ ID NO 15149
gaaataccttgttgatcttgactcctgccgtcagcttctcgactacctcttcacgactatcatttgtcatcattcccttctctctttaaaaatccagaggtctctcgagacacattctcatgcaagggtcgcttctagccttatatgtcgcactccaccatggcgggccaatcttcatgctgctggctggtgaacatgatgtcgtcttgtgtagaggttgggatgtcaaagcgccgaggcgagagtggacaaggtctcaaataagatctcgcgtagggtaatcggccaatgggacactaggtgactagccaggagttgggagatagtagtcaagtgaatccaacagtttatctccagtctgagtctcagtagttaaagtcatcgtgggagttttctaaggagaaaatctgtcatgacgaagtgttactttcgcgaaacataagtaggttcagcacttgccccgccgaatttacattagtttgcagagagcagtgcagggaactccagctcgaacatcacattactttagttgcctggcacctgagacatcgatacaccgtgggaaacgaattatcgcatatatttctgtgcgtttgatgtgtaggccaaatgctgcccctatttctgccggactcattggattgtcgttcggagtcttcaacgttgtctggaatgacataattgctcaatgcatttcttgtctaggaccttgaaaaccagccgacgccagaatgcagagttgcgacagttttatccctacgagctgctgtgaaacacgagcaatcctatgggctagtgtacgctgatgatatagcgtcatagctgttttactactctcgctatgtgcaggctattgttgctcttgttgatgccccgcaataacggcgtcgtttgccaagaatgacgatcggagatcgcgtcggacattttccgccgtccggtcccatcaagatctggattgacgaatggatcggttcaaatcctacagggcgagaagtctgcggtcgctgcgatttggcaacggctcctctgacagctcattaaattgatacatggggatggaacgtttgcggcatgccgggtgcgcctcatgcatgaggggatggaaacaggttttgaggcttgagaggtgctgcgccatgacacgcttgtgtgagaccgttctcatcggatcgcagacggtggtggaagttccttgatatttaatggggcttttatgtaagtgtggcgtcctgcattcatggaaacaccgttcttgggcttatggctgcgacgagatcgtctccttagtcccctgatgcttgtaattgttagctaccagctggacgggatgatgccatcacttcatttatgtacagggcgtcttcgtatgcgcaggatgccgttcgtagctagaagagacgtcatcagtatcatcggtcgatgtaatattgtccttttggtacaaatcatggtgtcttaggtagacctcagactacaaaaattctacatatcgctcccattcattagtgtcatgctttgataccaagattctaagccagtgacacttcttttcgcctcatctgtatcgatatccttcgttcaatacacgtttgtctgtcccattcccatggctaccacgctcccccagaacggggcagtggacactcccaaaatgggccagcctagccagatggatgttgcctccctcttcaaggagatgcaagatacactctctgagattaataatacgatcgaaggtcttaagactaataaacaagaagctcggctcgaggaacttgagcagaaaagagaggatcttcttgcagaactgaactcagacttcgaaaagaagatttccgatatcaaagacaagtatgagagggagcaaaagcagacagaagacaagagaaggaaagaggatgaggaaagggagttgagaaggaagcaagaagacgaggagctacagaagcagagacaaaaagaagatgattccaagaagcgagaattcgagtcaaaatctgacgacgtcgaaaaggagacagattcacagatggatgaagttgaggaagaggctcggaagtttttcgaagatggaagacaaaagctgaaagacctcgagaagaaaagacaggatatcaatcaccgtatcgaagaacaactccaagcgccatctactattcctgatatccccaagaggaagcgagccaacacgaaaaagggtggaaagagcaacaagcctagtagctcacagctgaaagatgaggccacagagcctggtgcttctgaggttgatgcttctcagcccgagacctccaagtcacagtcctcagaagagacttcgataaagaaagatgatgctaatcgggagagcctcgatggatctatgacacccaccactgagctcgaggctgcttctcatcaagagaagctcgtcgcgccttccgaagacatcaccaaagctacggatgaggaaaaggacgacgctcagatttcgacgggtgacgcttccaagtctcaaactaatggcatcggacatcaagaggaaaatccgaacgcagacgaaaagctatcgcaagaagccgagcgacccgcgaaagatgtaaaatcgggaaaaccagaagatgcggagaagaacgcatcagtccccaatgataagacagcgaaacattccgcgaaggcagacacctccgccgcagtcaatgatacgcgtgaagatgagacaaagtctgaaatgactgaccgtaatgcgaaggaggaaacggaagatactgccgcccatagcaagtctgagagaggagagcctaagcaagatgcaagcacgtcaaagaaggacgacggtgattcaaattccaaggctgcagacaaaccagacgcacaatcaagcgatgacatatcaaccaacgaacagcaagacagggcttctggatcgagagagaaatctgagacaccgaagaagcgatctgatgtgaagaaagatgcctcgcagagtcaagatggcaagaaggaggatgtacctgatgccgaacacgttaagaaatccgaaacaccgaagaaagagaagaaggataaggcagacggtcatgtgtcgaagaagaaagacaactttcaggaggagtccaaaaagcccgaaactcctaagaaacatgatgccaagggggcagaaacgccgaggtcaaagtcgagtacttcacgccgctcaaagaccccaagcgaggactacacagacggcgatgattacacagacagtgaagccgagtatacgctaaaatcctcgaaacatggtagtaaggaagatagttctgttccacgatccgcctcgcatcactcgtcatctgggcataagacaggtggatcgaagtcgagatcagacgacaagcaccgcagtaagagctcccacaagagccgacacggcgttaagtcttaagagcgaggaagttcgttacgagtttccgaatcgaattgtttaaatcttttttgcgaatttggttatatggatctggtgggctgatagctgtgtatgtagtgcctgtatctgaaaatgagacgaacgattcccaaaacgtgagacggtgccattcctccaatgtgtcgaatcatcatccagatgagcatttgactttatcaacttgctactcggtagtgttcgacgagaatgacttcagtagtcgcgcttcaagcccatcgtcacgcccggccgactcgcagacgcctcgaacctcgataagccatccacgatctccagattcccccaagagacaacgctcaggtctgataattgagaaagagaaacaagtgaaggttcaaacggaggaggacaatgaccacggtcccaatgagctgtcactgaaactcgacgggattcccatcgacgacgaagtgcaagatcatggttcagagcaaggcaactccgataatgcatcctcgcaaaatagcatacggaatgcgcttgtggccatagacaatgcactttcgagtgaccatccacataataatccttcagtggatgacgacaacatctcggctgaggattttttcacagcttcggaaaactccgctcaatcggaatcgtcgacagtgcaaattacatcacctaaagctgaaggcgaactctccatagacgatgtgagagacgcactcttagctatcaatagtagtgtaaggtctgacaacacacatggtgcggtcgctgcatctgaaggggattcatcagaaggtaaagtctatgaagctttgaaggctatcgaccaagctttgccatctgtgcaggaacaagttgagcctgtccacgatggtgacgatgagcccactatggagcaagtccgagaagcgctatttgctattgagcaaagcatgccgtccaaatcgagggaatatgatcagcctcctgtgacagagaacgcgacggaagcgaatataagagacgcgctcctcgctattgagaagactgcgccaagtcaagccgaagatcagtcgacatcaagtgacaaaatttgggacgcactacaagctattgaccagacattgtcatctacggagaagggtaatgcacccgggaaaagtgcagagacaccaatggaaaatgccggcgaagcgcacgtgcgagatgcgctacttgctattgagaagactgcaccaagtaaggtcgaagatgttgaaacgttgaatggaaaagttcgggacgcactgcaagctattgaacagacattatcggctacaaagaatgatgacgagtccagtccaactgtcaatgtcgctgcagagaagcatggcgaggccgacatgcgggacgtgctactcgctatcgaaaagactgcgccaagccgccttgaagacaaagatacttcaaacggcaaggttcgaaatgcgctagtagctattgaagaggcgttgccatcttcgaaaaaacgataatgagcccagtacaggactttcgacagagaagatcagcgaggcagatgtgcaagaggcgctagctgccatcgaaaagactgcgccaagtcgccttgaaggcgaaaacacatcggacggcaaaatccgaaatgcgctgctggctatagaagaggctttaccgtctacgcaacaagacgatacatccggtcatggtgtagagacatcagctgacaaagtacgagatgctctactcgccattgaacactccgcgccatctcaaagcaaagcagccgatgaaccatccagccccaactacaatgtgtcgacagaaacggttcaaaatgtgctccaatctgttgagagcagtgcgccatctaaagcctttgctcaagtcgcaagcagcctaggagacagtgcagtgccgagatcaatgagaactaccgcggatgacgatcaagttggtatttcacacgacctcctgtcccaccccccaagtcgctcactgctaactgacactccctcgtcacaaaagacgcggaacggccctcgatccatcagactccatttgtccagcgaaaaccaggggaaggtcacgaacagagtgatatccggagagaacattcagcaattacggattccgactcttcatccattctagagagccttcagaataaaaccaatgatcaacaaggtgactatctaagtgcatcaccaagtcgcgcagcaggcctgccgacgtcattcccacatcagacacaaggtctattttccccactgcctgtagagaatgaaaccgtctgtggcgcggacgatctgtttgatgcaagccctgctcttttctgatggagcttcatcctgcctgcttgatcgcattcaacgggatcatacagatgtgcttatcttccttgagtctcaagtcgttcgctaagaggagaccatttattgctatgcattgtcaaaattttgtaattatcgacctatcaataggttcagaaactcagactttaggaacctaacatgaggctttggcgttatgctctgttcaaggggcattcttgcgttggcgtatgggctttgcgacaaagggcattttaccgcagttggtaatttcggagactggttgcaccattcatattcatggaggcaattgattttctcaagttgttcaagcgtcaaacatgtagtttaacatcgcactccgtgccttgaaatatacataatcggcataaaagccttctgtgtg

SEQ ID NO: 15152 - DNA, 1242 bp, Muscodor strobelii
  misc_feature: SGI cDNA ID NO. 565012
  misc_feature: Encodes the peptide sequence at SEQ ID NO 15153
atgacaaaactgttttcaattatcttgttcctcgggtttctgatcgtggctaccgcctctgctccaatcaatgatacgcggacggggcccgagctaattcccaatcaatatatcgtcgtcttaaggactggaatcagcacttccgaagttaatgatcatctccgttggatcagagacctaagcaatgtcaacacccgcgatcataaaagactgcagccaagattgaaagacacattcagcattgggaacttcaatgcctattctatgcttatggacgatgtgatgtttcaggtgatcaaacacagcccaatgacagcccatatagaacaagatcagatttggcgagtatcatatctgaattcgacagcaatggccaaacgcacaccgataaaacagatcagcgttccctggggtctcggaacaatttcccataggaaccctggatcatcggaatacatatatgatagtaccgcaggcgctggcacatttgcctacattatcgataccggtctcaacacgaatcaccatgaatttttcaatcgagcttcgtacggatttaatgctatcggcggccctaacgtcgatgataacggccacggtacacacgttgccggtacaattggcagcacgagttttggtgtagcaaagagcgcatctctcatctctgtcaaatgtttcgacaaaagcggtgccagttcatcgtctgttctcctgaagggttttcagtgggccgcaaaagacattgtcaacaacggtagacagaagaaggccgtcatcaacatgtcaattggcgggtatttctcggctgcgttcaatcaggccgtaaaagcagcattccaaacgggcgtcctctctgttgccgcggctggcaatgatggaacggatgcgggacatacctcgcccgcctcagcacctgaagcaattactgtatctgcaatagaccctaactggcagtttgctagcttctcgaattatgggagctttgtcgatattgctgcccctggtatcagtatactatcaacatggattggaagtgacacggcgacaaatacactatctgggacttctatggcagcacctcatgtctccgggttggctttgtacttcatgggctattactccggattgaatacaccggatgcggtcacggctcttatcaaatacttcacaacaaacaacaagatcggccatcttccagccaatactgtaaatagtgtggcgtataatggcaatggagcatag

SEQ ID NO: 15153 - protein, 413 aa, Muscodor strobelii
  misc_feature: SGI Peptide ID NO. 565012
  misc_feature (35)..(117): Pfam Id: PF05922 Pfam Desc: Subtilisin N-terminal Region
  misc_feature (141)..(405): Pfam Id: PF00082 Pfam Desc: Subtilase family
  misc_feature (141)..(392): Pfam Id: PF00082 Pfam Desc: Subtilase family
  misc_feature (1)..(411): NCBI GI: 119500190 Blast Desc: alkaline serine protease Alp1 [Neosartorya fischeri NRRL 181] gi|119415017|gb|EAW24955.1| alkaline serine protease Alp1 [Neosartorya fischeri NRRL 181]
  misc_feature (1)..(411): NCBI GI: 70993608 Blast Desc: alkaline serine protease Alp1 [Aspergillus fumigatus Af293] gi|83305202|sp|P28296.2|ORYZ_ASPFU RecName: Full=Oryzin; AltName: Full=Alkaline proteinase; Short=ALP; AltName: AltName:
  misc_feature (1)..(411): NCBI GI: 608573 Blast Desc: serine proteinase [Aspergillus fumigatus]
  misc_feature (1)..(411): NCBI GI: 2295 Blast Desc: uncleaved alkaline protease (ALP) [Aspergillus fumigatus]
  misc_feature (9)..(411): NCBI GI: 384177 Blast Desc: uncleaved alkaline protease (ALP) [Aspergillus fumigatus]
  misc_feature (1)..(411): NCBI GI: 169771349 Blast Desc: [Aspergillus oryzae RIB40] gi|238486106|ref|XP_002374291.1| alkaline serine protease Alp1 [Aspergillus flavus NRRL3357] gi|129235|sp|P12547.2|ORYZ_ASPOR B;
  misc_feature (1)..(411): NCBI GI: 4894167 Blast Desc: preproalkaline protease [Aspergillus oryzae]
  misc_feature (1)..(411): NCBI GI: 5702208 Blast Desc: AF137272_1 allergen Asp fl 1 [Aspergillus flavus]
  misc_feature (1)..(413): NCBI GI: 113658 Blast Desc: ALP_CEPAC RecName: Full=Alkaline proteinase; Short=ALP; Flags: Precursor gi|217796|dbj|BAA00765.1| alkaline protease [Acremonium chrysogenum]
  misc_feature (1)..(411): NCBI GI: 115391147 Blast Desc: oryzin precursor [Aspergillus terreus NIH2624] gi|114194002|gb|EAU35702.1| oryzin precursor [Aspergillus terreus NIH2624]
  misc_feature (21)..(411): SWISSPROT Homolog: EC 3.4.21.63 Oryzin
MTKLFSIILFLGFLIVATASAPINDTRTGPELIPNQYIVVLRTGISTSEVNDHLRWIRDLSNVNTRDHKRLQPRLKDTFSIGNFNAYSMLMDDVMFQVIKHSPMTAHIEQDQIWRVSYLNSTAMAKRTPIKQISVPWGLGTISHRNPGSSEYIYDSTAGAGTFAYIIDTGLNTNHHEFFNRASYGFNAIGGPNVDDNGHGTHVAGTIGSTSFGVAKSASLISVKCFDKSGASSSSVLLKGFQWAAKDIVNNGRQKKAVINMSIGGYFSAAFNQAVKAAFQTGVLSVAAAGNDGTDAGHTSPASAPEAITVSAIDPNWQFASFSNYGSFVDIAAPGISILSTWIGSDTATNTLSGTSMAAPHVSGLALYFMGYYSGLNTPDAVTALIKYFTTNNKIGHLPANTVNSVAYNGNGA

SEQ ID NO: 15154 - DNA, 1164 bp, Muscodor strobelii
  misc_feature: SGI cDNA ID NO. 565013
  misc_feature: Encodes the peptide sequence at SEQ ID NO 15155
atgatgcgcacatcgtggctggcggcctgtttggcagttttcctacctctcgcactggtaaccaacgcacacccaggagaggatctgagtaaacgccaagttttggaagaggcaggaaatgcgcatgtggtgtctgtgatcaatacgagagcactagaaagatgtcagaatgaccctgatgtgcttgcacggaaggagcgggcgatcgctcgccgtgctgcgactttcgctcggttacggaaagagagagaccttgaagatggtaagttactacgcagtgttgatcttgatgcagtaacttacgtttatctagctgcctggttacatcgacgagatgctgcctcgctgaggaagtgggcagcgctgaaacacgataagaccggcctcgtcaatctcacaaaggagtcctccaacgccgagatcttcgggtccaacacaagctgtgtacttacacctgacaatgctaacggaccgtacttcgtataccaggagcaaattcggtccgatcttgtcgaagcggtacctggagtcccgatgcatcttgagatacaattcatcgatgtaaacacctgcaagcctgcgactcaactgctcatcgacacttggtcttgcaacgcaacgggcgcttatagcggagtcagtgcagcaggcgaggggggattgaagactacatacttgcgcggagcgcagcctacagatgcagatggtgttgtatcatttgacaccatctttccgggtcattattccgggcgagcaactcatcaacatcttattgcacacgttggcgcaaccactttggataatggtacatacacgggaggtcgcgtagcgcacttgtctcaactgttctttgaccagactttacgcgacagtatcgaggcgacggccccttataacactaatcgcattgccaaaacgacgaacttgggcgatggatttacgagctacgctagcaaggcgacatatgatccctttccgaactatatcatgctaggcaatggatttgcggacggattattcgtctgggctgagcttgcactgaatacttcctccaattgggattactatgccccgtatgcttcaacttggaaagagggtggcggatatgacaacccaaatttcaacttcatggccgtcgtcaacccacctccaacgcacggttaa

SEQ ID NO: 15155 - protein, 387 aa, Muscodor strobelii
  misc_feature: SGI Peptide ID NO. 565013
  misc_feature (8)..(375): NCBI GI: 154299611 Blast Desc: BC1G_10768 [Botryotinia fuckeliana B05.10] gi|150857260|gb|EDN32452.1| BC1G_10768 [Botryotinia fuckeliana B05.10]
  misc_feature (1)..(367): NCBI GI: 156030764 Blast Desc: SS1G_14321 [Sclerotinia sclerotiorum 1980] gi|154700712|gb|EDO00451.1| SS1G_14321 [Sclerotinia sclerotiorum 1980]
  misc_feature (24)..(371): NCBI GI: 119473919 Blast Desc: GPI anchored dioxygenase, [Neosartorya fischeri NRRL 181] gi|119406988|gb|EAW16938.1| GPI anchored dioxygenase, [Neosartorya fischeri NRRL 181]
  misc_feature (24)..(371): NCBI GI: 67538316 Blast Desc: AN5328.2 [Aspergillus nidulans FGSC A4] gi|40743298|gb|EAA62488.1| AN5328.2 [Aspergillus nidulans FGSC A4] gi|259485231|tpe|CBF82093.1| TPA: GPI anchored dioxygenase,
  misc_feature (24)..(371): NCBI GI: 70985996 Blast Desc: GPI anchored dioxygenase [Aspergillus fumigatus Af293] gi|66846130|gb|EAL86463.1| GPI anchored dioxygenase, [Aspergillus fumigatus Af293] gi|159128367|gb|EDP53482.1| GPI anchored A1163]
  misc_feature (13)..(371): NCBI GI: 238482919 Blast Desc: GPI anchored dioxygenase, [Aspergillus flavus NRRL3357] gi|220700748|gb|EED57086.1| GPI anchored dioxygenase, [Aspergillus flavus NRRL3357]
  misc_feature (24)..(371): NCBI GI: 115399340 Blast Desc: conserved [Aspergillus terreus NIH2624] gi|114192142|gb|EAU33842.1| conserved [Aspergillus terreus NIH2624]
  misc_feature (13)..(371): NCBI GI: 169766220 Blast Desc: [Aspergillus oryzae RIB40] gi|83765436|dbj|BAE55579.1| protein product [Aspergillus oryzae]
  misc_feature (7)..(367): NCBI GI: 46118107 Blast Desc: FG04685.1 [Gibberella zeae PH-1]
  misc_feature (7)..(367): NCBI GI: 256721882 Blast Desc: NECHADRAFT_92188 [Nectria haematococca mpVI 77-13-4]
MMRTSWLAACLAVFLPLALVTNAHPGEDLSKRQVLEEAGNAHVVSVINTRALERCQNDPDVLARKERAIARRAATFARLRKERDLEDGKLLRSVDLDAVTYVYLAAWLHRRDAASLRKWAALKHDKTGLVNLTKESSNAEIFGSNTSCVLTPDNANGPYFVYQEQIRSDLVEAVPGVPMHLEIQFIDVNTCKPATQLLIDTWSCNATGAYSGVSAAGEGGLKTTYLRGAQPTDADGVVSFDTIFPGHYSGRATHQHLIAHVGATTLDNGTYTGGRVAHLSQLFFDQTLRDSIEATAPYNTNRIAKTTNLGDGFTSYASKATYDPFPNYIMLGNGFADGLFVWAELALNTSSNWDYYAPYASTWKEGGGYDNPNFNFMAVVNPPPTHG

SEQ ID NO: 15156 - DNA, 522 bp, Muscodor strobelii
  misc_feature: SGI EST ID NO. CUFF.36059.0
  misc_feature: Variant of the nucleotide sequence at SEQ ID NO 15154
cagcaggcgaggggggattgaagactacatacttgcgcggagcgcagcctacagatgcagatggtgttgtatcatttgacaccatctttccgggtcattattccgggcgagcaactcatcaacatcttattgcacacgttggcgcaaccactttggataatggtacatacacgggaggtcgcgtagcgcacttgtctcaactgttctttgaccagactttacgcgacagtatcgaggcgacggccccttataacactaatcgcattgccaaaacgacgaacttgggcgatggatttacgagctacgctagcaaggcgacatatgatccctttccgaactatatcatgctaggcaatggatttgcggacggattattcgtctgggctgagcttgcactgaatacttcctccaattgggattactatgccccgtatgcttcaacttggaaagagggtggcggatatgacaacccaaatttcaacttcatggccgtcgtcaacccacctccaacgcacggttaag

SEQ ID NO: 15157 - DNA, 1083 bp, Muscodor strobelii
  misc_feature: SGI cDNA ID NO. 565014
  misc_feature: Elevated expression when VOC is produced
  misc_feature: Encodes the peptide sequence at SEQ ID NO 15158
atgacaaccaacgagagtagtggcgcaaattctacacgctacctcgacgatgagcgctttcaccaaagcgtcatccttcctccttgcgcaagtcgaccatcggagctaaaggtaacttacgctgacttcggccatcccaacaacgatcgagtagtcttgttctgcccaccattagttggaagtcgctttgtactctcaacaaaggataagcttgcacggaaacatggagtgcgaatcattagcccggatcgacccggcttcggagggactcctgatgcgcctccagtcgaccgtgtccgtgtatggcttgaaatagtcgcaggattattgcaccatctcgcaataccacatgtagcagtgatgggctacagcgcgggtgctatttatgccatgaacgtgcttcttcatctgcggcatctacttcatccagtccgtccatatgtcgcacttgttacgccatttgttcacacatcccattcggacgttacgagcctcaaactggcaggatccctacctgatgccgtcattggtagctatgaacagctcttcaaagcagtgggccgcatggggccagctctccagttctccagtggtctttccagtctttggccgaccctgggcgggaattcgaagccccttgcgcccgacgctgacccagatgaagttgcgatggaagaaaagataggtcctgatattctcagtcggatcacggctgagaatgcgcaaggagttagtcaagacatccttttgctcctgaagcgcgatgatcatcccgggtgttggggttcctggggtgattatgagcagcttgtaccaatgctagctgaggttgaacgaaacagagaacctgctagctcagacactggccaaaaaccacttcgagtccgagtgttcttcgctgaagccgatcacatgattgggacaactgttgctttaacgtggttcaaccattgttgggatccgatgcagcgtggcgatcgtatcgattacagcagtgaggttgttcccaaaactaatcacgacaacattcttgaattgagatatggagtgattgattcaatatttcgcgacattgctatttag

SEQ ID NO: 15158 - protein, 360 aa, Muscodor strobelii
  misc_feature: SGI Peptide ID NO. 565014
  misc_feature (77)..(196): Pfam Id: PF00561 Pfam Desc: alpha/beta hydrolase fold
  misc_feature (14)..(359): NCBI GI: 46110801 Blast Desc: FG02282.1 [Gibberella zeae PH-1]
  misc_feature (13)..(358): NCBI GI: 145251780 Blast Desc: An16g00900 [Aspergillus niger] gi|134082940|emb|CAK46776.1| protein product [Aspergillus niger]
  misc_feature (9)..(355): NCBI GI: 169772575 Blast Desc: [Aspergillus oryzae RIB40] gi|83768617|dbj|BAE58754.1| protein product [Aspergillus oryzae]
  misc_feature (11)..(358): NCBI GI: 255941038 Blast Desc: Pc16g09770 [Penicillium chrysogenum Wisconsin 54-1255] gi|211585911|emb|CAP93647.1| Pc16g09770 [Penicillium chrysogenum Wisconsin 54-1255]
  misc_feature (9)..(355): NCBI GI: 238490492 Blast Desc: conserved [Aspergillus flavus NRRL3357] gi|220696896|gb|EED53237.1| conserved [Aspergillus flavus NRRL3357]
  misc_feature (2)..(343): NCBI GI: 212529526 Blast Desc: conserved [Penicillium marneffei ATCC 18224] gi|210074318|gb|EEA28405.1| conserved [Penicillium marneffei ATCC 18224]
  misc_feature (19)..(345): NCBI GI: 154308804 Blast Desc: BC1G_07930 [Botryotinia fuckeliana B05.10] gi|150852556|gb|EDN27748.1| BC1G_07930 [Botryotinia fuckeliana B05.10]
  misc_feature (11)..(343): NCBI GI: 242762921 Blast Desc: conserved [Talaromyces stipitatus ATCC 10500] gi|218723671|gb|EED23088.1| conserved [Talaromyces stipitatus ATCC 10500]
  misc_feature (19)..(319): NCBI GI: 156062580 Blast Desc: SS1G_01406 [Sclerotinia sclerotiorum 1980] gi|154696742|gb|EDN96480.1| SS1G_01406 [Sclerotinia sclerotiorum 1980]
  misc_feature (15)..(358): NCBI GI: 121705446 Blast Desc: conserved [Aspergillus clavatus NRRL 1] gi|119399132|gb|EAW09560.1| conserved [Aspergillus clavatus NRRL 1]
  misc_feature: Useful for introducing or modulating the production of volatile compounds
MTTNESSGANSTRYLDDERFHQSVILPPCASRPSELKVTYADFGHPNNDRVVLFCPPLVGSRFVLSTKDKLARKHGVRIISPDRPGFGGTPDAPPVDRVRVWLEIVAGLLHHLAIPHVAVMGYSAGAIYAMNVLLHLRHLLHPVRPYVALVTPFVHTSHSDVTSLKLAGSLPDAVIGSYEQLFKAVGRMGPALQFSSGLSSLWPTLGGNSKPLAPDADPDEVAMEEKIGPDILSRITAENAQGVSQDILLLLKRDDHPGCWGSWGDYEQLVPMLAEVERNREPASSDTGQKPLRVRVFFAEADHMIGTTVALTWFNHCWDPMQRGDRIDYSSEVVPKTNHDNILELRYGVIDSIFRDIAI

SEQ ID NO: 15159 - DNA, 2446 bp, Muscodor strobelii
  misc_feature: SGI EST ID NO. CUFF.36133.1
  misc_feature: Variant of the nucleotide sequence at SEQ ID NO 15157
acaagtttgagctttgcaagacgaacagatctaactgaaccaacaggagcttcggaatttcacgcagtcgagttcaataaacacccggagttctgcacgtcgtgcatcgtgcgccttgccctatgctttatgtatgcaacaagatcaaacgcggcgtataagactgtagctaagggctaaactccgtcgcagcgcaattcccttgataaacccattgcgtagccttttcaaaacctggtcttgcccgcacattgacgcttgcgaacgaaaaaaagaaatagctgccaggtatcacatgcggggtgcgcctctgtggatataggtcatcatgcccgcccgcaagatcattcctgatgtttattctcgcgaaaggcatcagaaaccaaaatgacaaccaacgagagtagtggcgcaaattctacacgctacctcgacgatgagcgctttcaccaaagcgtcatccttcctccttgcgcaagtcgaccatcggagctaaaggtaacttacgctgacttcggccatcccaacaacgatcgagtagtcttgttctgcccaccattagttggaagtcgctttgtactctcaacaaaggataagcttgcacggaaacatggagtgcgaatcattagcccggatcgacccggcttcggagggactcctgatgcgcctccagtcgaccgtgtccgtgtatggcttgaaatagtcgcaggattattgcaccatctcgcaataccacatgtagcagtgatgggctacagcgcgggtgctatttatgccatgaacgtgcttcttcatctgcggcatctacttcatccagtccgtccatatgtcgcacttgttacgccatttgttcacacatcccattcggacgttacgagcctcaaactggcaggatccctacctgatgccgtcattggtagctatgaacagctcttcaaagcagtgggccgcatggggccagctctccagttctccagtggtctttccagtctttggccgaccctgggcgggaattcgaagccccttgcgcccgacgctgacccagatgaagttgcgatggaagaaaagataggtcctgatattctcagtcggatcacggctgagaatgcgcaaggagttagtcaagacatccttttgctcctgaagcgcgatgatcatcccgggtgttggggttcctggggtgattatgagcagcttgtaccaatgctagctgaggttgaacgaaacagagaacctgctagctcagacactggccaaaaaccacttcgagtccgagtgttcttcgctgaagccgatcacatgattgggacaactgttgctttaacgtggttcaaccattgttgggatccgatgcagcgtggcgatcgtatcgattacagcagtgaggttgttcccaaaactaatcacgacaacattcttgaattgagatatggagtgattgattcaatatttcgcgacattgctatttagacactatcattcccaaagagacttgcgtcacattcacagtggtcaagtttttgctcacgaagtctgatctgcatgttgtgcgactgggataggataatattgtgactggctggcatcctcgtggaagtcattatgaccgcccatcgattgctttgcgcgatgcttgtcactcaaaatgccttcgctcaagtgactgctcgaagaaataatgcccttttgtgtcaggtgacattactgtgccatcgaggacctaaatccctccccatctcgcttatgcaagcacacccaacaaaaaagcaattggaaaccttgacttgaaatagatggatattgttgttggaagcaatacgaacgactgtgagggatataatctcaagcgggatccaatcatagcttcttgtcgctttttcccaatttgaaagtgactaaagctaattttccgttagctctctaaggtatggattcatcagcgtcattggaggttattgttgtgattgaagactcttcgtcatgttgtagcacagaagggaatagagggtgacgcattggaattaagatcagtaaagtttcccaaagacatcgaagcgacaatcactcagggcgcaataataacaagtgacttcgactagaatctcgctagttgatgctgcgagcagtcgaaaatgtacttgtgccaagaaagcaggaaggcactcgaccacgtcgtcgccgcccagcacatagaatctactaccctctcagattggcgttgaaaatcgctttatgcgaaatgcagagacgtagaagttacaagccggataaggaacgccattggccggctgcggacgcccagacggctccaagagcagcaagaacaaggattgaagagcgcatgttatcagcggatagtacgaagctttgacgacgaaggatagttttttgccgaggtaatttggaaacgcgtcgcgcttaaagtgttggtggctaatcaactcta

SEQ ID NO: 15160 - DNA, 768 bp, Muscodor strobelii
  misc_feature: SGI cDNA ID NO. 565015
  misc_feature: Elevated expression when VOC is produced
  misc_feature: Encodes the peptide sequence at SEQ ID NO 15161
atggcacagctcaacaccacagcacaaaccctcaaatccctccataaaccaggagatcccttaatcctagcaaacatccacgacgtcctctcagcacaggcaatcatcgaacttccgtccgtcaaggccctagcaacaggcagctacggaatcgcacaagcagcaggtctaacagacgatgatctaaccctcgaggcgaacctcgcgggcgtccgcggaatagctgcagtggcggaggaatttggtaaaccgctcacggttgatattcaggacgcttatggatccaagttggagcaggctgtcaatgcattgctggatatgggtgttgcgggtgtgaatcttgaggatcaggataagaaggggagtttatacagtcctgacgaggcagcgtcgcgtgttcagcgagtactggagatcgcgaaagagagaggtgttccggattttgtcgttaatgctagatgcgatgttctggttaagggcggagagttagatgaggtgttagtgcgtgggaagaagtatcttgaagcaggtgctacgacggtttttgtctggggtgctgcgaggggtggcgggaagggtgtgagtagggaggaggttgtgaggatggtgcaagagtttggcggaaggttgaatgtcttgcaaaaggagggtgggttgagtgttaaggagcttaaggatattggagttgcgaggattagtgttgggccgagacttatgcttgctgctgttcaaactattaagagtgaggcggagaagttgttgggttag

SEQ ID NO: 15161 - protein, 255 aa, Muscodor strobelii
  misc_feature: SGI Peptide ID NO. 565015
  misc_feature (1)..(254): NCBI GI: 240110323 Blast Desc: carboxyphosphonoenolpyruvate mutase, [Coccidioides posadasii C735 delta SOWgp]
  misc_feature (1)..(254): NCBI GI: 119180391 Blast Desc: CIMG_08834 [Coccidioides immitis RS]
  misc_feature (8)..(254): NCBI GI: 225558826 Blast Desc: PEP phosphonomutase [Ajellomyces capsulatus G186AR]
  misc_feature (8)..(254): NCBI GI: 154275556 Blast Desc: [Ajellomyces capsulatus NAm1] gi|150415069|gb|EDN10431.1| [Ajellomyces capsulatus NAm1]
  misc_feature (8)..(255): NCBI GI: 226286057 Blast Desc: PEP phosphonomutase [Paracoccidioides brasiliensis Pb01]
  misc_feature (8)..(255): NCBI GI: 225679789 Blast Desc: PEP phosphonomutase [Paracoccidioides brasiliensis Pb03]
  misc_feature (5)..(254): NCBI GI: 115438002 Blast Desc: conserved [Aspergillus terreus NIH2624] gi|114188769|gb|EAU30469.1| conserved [Aspergillus terreus NIH2624]
  misc_feature (5)..(255): NCBI GI: 258578067 Blast Desc: [Uncinocarpus reesii 1704] gi|237903481|gb|EEP77882.1| [Uncinocarpus reesii 1704]
  misc_feature (8)..(255): NCBI GI: 261206056 Blast Desc: PEP phosphonomutase [Ajellomyces dermatitidis SLH14081] gi|239592824|gb|EEQ75405.1| PEP phosphonomutase [Ajellomyces dermatitidis SLH14081] gi|239611012|gb|EEQ87999.1|
  misc_feature (1)..(254): NCBI GI: 238843229 Blast Desc: PEP phosphonomutase [Microsporum canis CBS 113480]
  misc_feature (6)..(228): SWISSPROT Homolog: EC 2.7.8.23 Carboxyvinyl-carboxyphosphonate phosphorylmutase
  misc_feature: Useful for introducing or modulating the production of volatile compounds
MAQLNTTAQTLKSLHKPGDPLILANIHDVLSAQAIIELPSVKALATGSYGIAQAAGLTDDDLTLEANLAGVRGIAAVAEEFGKPLTVDIQDAYGSKLEQAVNALLDMGVAGVNLEDQDKKGSLYSPDEAASRVQRVLEIAKERGVPDFVVNARCDVLVKGGELDEVLVRGKKYLEAGATTVFVWGAARGGGKGVSREEVVRMVQEFGGRLNVLQKEGGLSVKELKDIGVARISVGPRLMLAAVQTIKSEAEKLLG

SEQ ID NO: 15162 - DNA, 1458 bp, Muscodor strobelii
  misc_feature: SGI EST ID NO. CUFF.36068.0
  misc_feature: Variant of the nucleotide sequence at SEQ ID NO 15160
atcaaacgtcccgatttggcaatctagtcgggcgggagtcatgatgacctaccttagcacatttggtaatcagcttccgtgcaacatgtaacatgaagggcgcggatgaaaataatttgacgatttggccgaggttgcgatatgaggcggggtgcatacaaatgttagttaaacttggagattgtgatataaatccgtggctataagtctgctggctacgaataatccgacaacccccacacactaaatcacatcctcatacccgtgagtttatagatttagaaaactcactcttcgtgttcaactacatttacattacctacttaccttaccttgcggagactcacaatcacatctacttatccaatataacaaacctcaaccacaccagaaaacacccaaattccacatccttaaaaaatggcacagctcaacaccacagcacaaaccctcaaatccctccataaaccaggagatcccttaatcctagcaaacatccacgacgtcctctcagcacaggcaatcatcgaacttccgtccgtcaaggccctagcaacaggcagctacggaatcgcacaagcagcaggtctaacagacgatgatctaaccctcgaggcgaacctcgcgggcgtccgcggaatagctgcagtggcggaggaatttggtaaaccgctcacggttgatattcaggacgcttatggatccaagttggagcaggctgtcaatgcattgctggatatgggtgttgcgggtgtgaatcttgaggatcaggataagaaggggagtttatacagtcctgacgaggcagcgtcgcgtgttcagcgagtactggagatcgcgaaagagagaggtgttccggattttgtcgttaatgctagatgcgatgttctggttaagggcggagagttagatgaggtgttagtgcgtgggaagaagtatcttgaagcaggtgctacgacggtttttgtctggggtgctgcgaggggtggcgggaagggtgtgagtagggaggaggttgtgaggatggtgcaagagtttggcggaaggttgaatgtcttgcaaaaggagggtgggttgagtgttaaggagcttaaggatattggagttgcgaggattagtgttgggccgagacttatgcttgctgctgttcaaactattaagagtgaggcggagaagttgttgggttagggttaggattgatttccctattttctgaatgtatggatggtacagttgtgagcaattgaggttattgtgttaaaagtttggaggattggtctaattaagcaattggttaggaagccgggcggggacaatacacgaccttcagtaggtaactataggtaggtactcgaggcacctaggaaaatcacgattatatgctcagtaactctgtccggtcgctccatcttaggttcgcaattgaaataaggagcgattgaagtaagtgcgagtatt

SEQ ID NO: 15163 - DNA, 3360 bp, Muscodor strobelii
  misc_feature: SGI cDNA ID NO. 565016
  misc_feature: Reduced expression when VOC is produced
  misc_feature: Encodes the peptide sequence at SEQ ID NO 15164
atgcttcaccttcgcttccatagacgggcgccgtctaatccgacctcgcccaaccccgatcacagttcgtgggatcctggtgccctttccccggcccagctcgtcccgcaagatggcgttccagctcccgacatacgaccacgacctgaatctgctgtacctccgcagcagcagcagctccaacgcgaagctcccgtcttgccgcccatcacgagcctgccgccgattacgagagttgtctcatccgattcggctcagtcactggagtttgccgttgcggacgagacccagccgctggatacagccttccacgacgacatcaagccgctgcctcgatcaccttataacgagcaatcgggcttcatcggcggtctggcactgcagaactatcgtcgcgagcagcaagccgctaggagccaagtctcatcgcaacgtggaaatgccaatgccaatgccagcgccaacaccaccgcgacatctactaccagtcccggccccagcgcgccgcctcctgctaccagtagccggccgccgccccctacgcgaccactcaaggccgcctcgtctttcgtcagtccaacagagcttcagaatgcgccaccaattggaaaacgcccgcctggcgcacgcatgacatccgagcccccctccatgtctaatgctacagctgcgcaggagcctcctaaaacaaaaaagggcctgccttttctcaaaaaccctatgactacattgttactgcgtagaaagacgagccagaatatccctgatctcactttgccactacgcaaagaacccgagggtcctacgtacgaccctaggatccgcggtacccgtgttcacgacttcagcgcccctagaaagcctgttgttccctctaccaaggcccccgccgagtccgtaggggatacggcataccaaggcgaggatgggcccagcgctggtgctccgtcgccggcagcaccacccgtgccacccaaagatgctacttccagagcgagccgcacgccgtcctcaaactcccagaccactttagtgaatgcggtctcaagtgaaggatactcggactcgccgggtgtccagttcgttggacttcctaaaaatcaggagaatacgccggatagacaaagctcaagtgccatttcgaaagatgtggtctcacgcactggatctagggtttctacgaaaagctccctctctgccattcccagacatatgaagagcacctcttcccgctttagctttgatatgatcggagcggcagagcaggaaaagctcttggaggaacgccatcggcaacgccagcaggacaaaacgccagatgagccaacaggcagaagagactctcgttttgatgagtttgatgacgacggatttgactacgacgcaatggactacgatgacgacttggaagaacggattccaggcgtcaacgctgacttagacgaggcagaagacttcgaaacggtagatgacccagataatgaccaagaaaattttgccggctttgttttccaaagatcgcatcctacgtcgtctctggccagccctcttagcgccggcctgttacctacgccaagagatgcgaatggcgaagttatcgggtacgccatgacgcaaaaaactcctgatttgggacaatattttgaaactggcgaagatgatcttggtgggcaaggaaatgaaatgactatcaacgaggattcacctacaggcctgggtattcaagggcttggagttgagcctaatgctcttgaaacagacatctcaccaggtgagaaacgtcacctcgataaggacgatgagctatacttcaatgatggattgatacatgactttgacggagaaggtgacggctcagcatttgacgaatccatctttgacttgaatgacacggatcagtacggccgtcccatccctggactgtttgctaacaacttggctcaaagaaacggggaagttgatatgaagaaacgagaatccgacatgacctctagactgtcagctcagtcaaaccaatcacactctactgcccatacctcacttagcgttgatgctcatcctcgattggccgaacaatacgatcgactcgagcccataccgcaaacccaggacccagacaaaacgaagacgggtatcgatgaggatacggtagtggcatatcaagccgcgttggctgccgctgctcataaagctgccgcctcgggtaaatttcaacgagatgcttcaccctcgtcgctgcatgaaccgacgtttcctgcaaagccaagaccagattcatctcattctcatatagatgcggctggcaatgaattggacgagtacgaaaatgatgacgacgattacgcggggctagatgattatgaaatggatgatgatgccatcattgctgaagctaacgctagtgctttggctaacgactccgacgggtggtatggacaagagtttggcttctattccgctcctgttcagcagaccggccatggcccgacttccttgaccgaagagaacgtgtttcagtattcacatggcgggtattttggccccggcggagtaaatcgctcgaaatctgatcgcattgtttgtcgtgagccaaatcttactccgatcaccgaacgatccgaatattcaaataggaactctcttatgagcctgggctggcctcaggcgcccaacggcggcaacactctacaaagtcctggactggcacagcttgccatgatggctgaggaccacgacatgtctttatcgagcttgctccgtcttcgaagcaaggcttggggtgggtcacaggcctcggcatcaagctctcgcgatggctctccatttgaacgcaatgatacttctagtccatggggccgagaaatcaataacttaggtggcggtcccccgaggcggagaaattctgccttttctacatatagccaagaggaatccatgggacctgaaagcgagtctggaagccctacgttgactgcaatgacaatgccaacggtgccgatctccatgtcgtcaagccccaatgtctatcccaatgcgcctccagctccaccgtctcttttctccccatcacagctacctacaacgttccccccagtgtcagaggacgaggagcctgcttcacccgaatccacgaaaaataaagcagaatcctttgggaagaacatgagaccaactgtgggcattccttcccaacaacggtcaggcatgggtcacaggaccagaggaagtgccgatagtatatcgtatataaaacaggaagaaagcggcgagacgcgatggattctcgagcgtcgccggactgcagagtcgggcgagatcgagatccttgaaagagagactgtcgacggcggtaggatatga

SEQ ID NO: 15164 - protein, 1119 aa, Muscodor strobelii
  misc_feature: SGI Peptide ID NO. 565016
  misc_feature (1)..(1119): NCBI GI: 256728969 Blast Desc: NECHADRAFT_93398 [Nectria haematococca mpVI 77-13-4]
  misc_feature (1)..(1119): NCBI GI: 46138471 Blast Desc: FG10750.1 [Gibberella zeae PH-1]
  misc_feature (168)..(1030): NCBI GI: 85110166 Blast Desc: NCU08452 [Neurospora crassa OR74A] gi|28924970|gb|EAA34059.1| [Neurospora crassa OR74A]
  misc_feature (1)..(994): NCBI GI: 171677101 Blast Desc: protein product [Podospora anserina] gi|170936618|emb|CAP61277.1| protein product [Podospora anserina]
  misc_feature (382)..(1024): NCBI GI: 39954596 Blast Desc: MGG_08935 [Magnaporthe grisea 70-15] gi|145021117|gb|EDK05246.1| MGG_08935 [Magnaporthe grisea 70-15]
  misc_feature (630)..(1119): NCBI GI: 261354371 Blast Desc: conserved [Verticillium albo-atrum VaMs.102]
  misc_feature (201)..(1119): NCBI GI: 156054450 Blast Desc: SS1G_06073 [Sclerotinia sclerotiorum 1980] gi|154703853|gb|EDO03592.1| SS1G_06073 [Sclerotinia sclerotiorum 1980]
  misc_feature (3)..(933): NCBI GI: 154321133 Blast Desc: BC1G_01441 [Botryotinia fuckeliana B05.10] gi|150851979|gb|EDN27171.1| BC1G_01441 [Botryotinia fuckeliana B05.10]
  misc_feature (1)..(531): NCBI GI: 116205411 Blast Desc: CHGG_10589 [Chaetomium globosum CBS 148.51] gi|88176717|gb|EAQ84185.1| CHGG_10589 [Chaetomium globosum CBS 148.51]
  misc_feature (399)..(1119): NCBI GI: 189192807 Blast Desc: conserved [Pyrenophora tritici-repentis Pt-1C-BFP] gi|187978306|gb|EDU44932.1| conserved [Pyrenophora tritici-repentis Pt-1C-BFP]
  misc_feature: Useful for introducing or modulating the production of volatile compounds
MLHLRFHRRAPSNPTSPNPDHSSWDPGALSPAQLVPQDGVPAPDIRPRPESAVPPQQQQLQREAPVLPPITSLPPITRVVSSDSAQSLEFAVADETQPLDTAFHDDIKPLPRSPYNEQSGFIGGLALQNYRREQQAARSQVSSQRGNANANASANTTATSTTSPGPSAPPPATSSRPPPPTRPLKAASSFVSPTELQNAPPIGKRPPGARMTSEPPSMSNATAAQEPPKTKKGLPFLKNPMTTLLLRRKTSQNIPDLTLPLRKEPEGPTYDPRIRGTRVHDFSAPRKPVVPSTKAPAESVGDTAYQGEDGPSAGAPSPAAPPVPPKDATSRASRTPSSNSQTTLVNAVSSEGYSDSPGVQFVGLPKNQENTPDRQSSSAISKDVVSRTGSRVSTKSSLSAIPRHMKSTSSRFSFDMIGAAEQEKLLEERHRQRQQDKTPDEPTGRRDSRFDEFDDDGFDYDAMDYDDDLEERIPGVNADLDEAEDFETVDDPDNDQENFAGFVFQRSHPTSSLASPLSAGLLPTPRDANGEVIGYAMTQKTPDLGQYFETGEDDLGGQGNEMTINEDSPTGLGIQGLGVEPNALETDISPGEKRHLDKDDELYFNDGLIHDFDGEGDGSAFDESIFDLNDTDQYGRPIPGLFANNLAQRNGEVDMKKRESDMTSRLSAQSNQSHSTAHTSLSVDAHPRLAEQYDRLEPIPQTQDPDKTKTGIDEDTVVAYQAALAAAAHKAAASGKFQRDASPSSLHEPTFPAKPRPDSSHSHIDAAGNELDEYENDDDDYAGLDDYEMDDDAIIAEANASALANDSDGWYGQEFGFYSAPVQQTGHGPTSLTEENVFQYSHGGYFGPGGVNRSKSDRIVCREPNLTPITERSEYSNRNSLMSLGWPQAPNGGNTLQSPGLAQLAMMAEDHDMSLSSLLRLRSKAWGGSQASASSSRDGSPFERNDTSSPWGREINNLGGGPPRRRNSAFSTYSQEESMGPESESGSPTLTAMTMPTVPISMSSSPNVYPNAPPAPPSLFSPSQLPTTFPPVSEDEEPASPESTKNKAESFGKNMRPTVGIPSQQRSGMGHRTRGSADSISYIKQEESGETRWILERRRTAESGEIEILERETVDGGRI

SEQ ID NO: 15165 - DNA, 4218 bp, Muscodor strobelii
  misc_feature: SGI EST ID NO. CUFF.36090.0
  misc_feature: Variant of the nucleotide sequence at SEQ ID NO 15163
aggccacgagccagtcagtggctgcatcgaagtatgaaaaagatgagacaacgtgcatcttttgtagatgtatcttgcagatcaagcaccgacccctcctatcgcatcgcctgagtctgccttgaagtcctcagtcgccgccggaaaaacatcgcagacatatttatcaccttcaattgtctagattgctttacttagctggttgtttcttgcactggcacaactgctaagctgctctggaaatctcacgttatttgtgttgatttttgtgattgggatatggtcgatgtgacctcgtacatccatgacgccagaatcgtaaccccgttcctcgtatctcgcccatgcgcgccgcgtactcgaatgtgaacaaagagcctcgtcaatttgacgccaacagtaccaacgacacaaaccgacgcgaccaggcgcacgcgtattaatttcagtccatcactgtgtctatttgcaactgaatcatcccgtggttgtacgatagaaacgacactaccattcgcttcgatgctctcgctttccgtggcctctcacagccaagtgctatatttctaaaccatgctatagactgtctaatctactcacataaacaccttgggtatgcttcaccttcgcttccatagacgggcgccgtctaatccgacctcgcccaaccccgatcacagttcgtgggatcctggtgccctttccccggcccagctcgtcccgcaagatggcgttccagctcccgacatacgaccacgacctgaatctgctgtacctccgcagcagcagcagctccaacgcgaagctcccgtcttgccgcccatcacgagcctgccgccgattacgagagttgtctcatccgattcggctcagtcactggagtttgccgttgcggacgagacccagccgctggatacagccttccacgacgacatcaagccgctgcctcgatcaccttataacgagcaatcgggcttcatcggcggtctggcactgcagaactatcgtcgcgagcagcaagccgctaggagccaagtctcatcgcaacgtggaaatgccaatgccaatgccagcgccaacaccaccgcgacatctactaccagtcccggccccagcgcgccgcctcctgctaccagtagccggccgccgccccctacgcgaccactcaaggccgcctcgtctttcgtcagtccaacagagcttcagaatgcgccaccaattggaaaacgcccgcctggcgcacgcatgacatccgagcccccctccatgtctaatgctacagctgcgcaggagcctcctaaaacaaaaaagggcctgccttttctcaaaaaccctatgactacattgttactgcgtagaaagacgagccagaatatccctgatctcactttgccactacgcaaagaacccgagggtcctacgtacgaccctaggatccgcggtacccgtgttcacgacttcagcgcccctagaaagcctgttgttccctctaccaaggcccccgccgagtccgtaggggatacggcataccaaggcgaggatgggcccagcgctggtgctccgtcgccggcagcaccacccgtgccacccaaagatgctacttccagagcgagccgcacgccgtcctcaaactcccagaccactttagtgaatgcggtctcaagtgaaggatactcggactcgccgggtgtccagttcgttggacttcctaaaaatcaggagaatacgccggatagacaaagctcaagtgccatttcgaaagatgtggtctcacgcactggatctagggtttctacgaaaagctccctctctgccattcccagacatatgaagagcacctcttcccgctttagctttgatatgatcggagcggcagagcaggaaaagctcttggaggaacgccatcggcaacgccagcaggacaaaacgccagatgagccaacaggcagaagagactctcgttttgatgagtttgatgacgacggatttgactacgacgcaatggactacgatgacgacttggaagaacggattccaggcgtcaacgctgacttagacgaggcagaagacttcgaaacggtagatgacccagataatgaccaagaaaattttgccggctttgttttccaaagatcgcatcctacgtcgtctctggccagccctcttagcgccggcctgttacctacgccaagagatgcgaatggcgaagttatcgggtacgccatgacgcaaaaaactcctgatttgggacaatattttgaaactggcgaagatgatcttggtgggcaaggaaatgaaatgactatcaacgaggattcacctacaggcctgggtattcaagggcttggagttgagcctaatgctcttgaaacagacatctcaccaggtgagaaacgtcacctcgataaggacgatgagctatacttcaatgatggattgatacatgactttgacggagaaggtgacggctcagcatttgacgaatccatctttgacttgaatgacacggatcagtacggccgtcccatccctggactgtttgctaacaacttggctcaaagaaacggggaagttgatatgaagaaacgagaatccgacatgacctctagactgtcagctcagtcaaaccaatcacactctactgcccatacctcacttagcgttgatgctcatcctcgattggccgaacaatacgatcgactcgagcccataccgcaaacccaggacccagacaaaacgaagacgggtatcgatgaggatacggtagtggcatatcaagccgcgttggctgccgctgctcataaagctgccgcctcgggtaaatttcaacgagatgcttcaccctcgtcgctgcatgaaccgacgtttcctgcaaagccaagaccagattcatctcattctcatatagatgcggctggcaatgaattggacgagtacgaaaatgatgacgacgattacgcggggctagatgattatgaaatggatgatgatgccatcattgctgaagctaacgctagtgctttggctaacgactccgacgggtggtatggacaagagtttggcttctattccgctcctgttcagcagaccggccatggcccgacttccttgaccgaagagaacgtgtttcagtattcacatggcgggtattttggccccggcggagtaaatcgctcgaaatctgatcgcattgtttgtcgtgagccaaatcttactccgatcaccgaacgatccgaatattcaaataggaactctcttatgagcctgggctggcctcaggcgcccaacggcggcaacactctacaaagtcctggactggcacagcttgccatgatggctgaggaccacgacatgtctttatcgagcttgctccgtcttcgaagcaaggcttggggtgggtcacaggcctcggcatcaagctctcgcgatggctctccatttgaacgcaatgatacttctagtccatggggccgagaaatcaataacttaggtggcggtcccccgaggcggagaaattctgccttttctacatatagccaagaggaatccatgggacctgaaagcgagtctggaagccctacgttgactgcaatgacaatgccaacggtgccgatctccatgtcgtcaagccccaatgtctatcccaatgcgcctccagctccaccgtctcttttctccccatcacagctacctacaacgttccccccagtgtcagaggacgaggagcctgcttcacccgaatccacgaaaaataaagcagaatcctttgggaagaacatgagaccaactgtgggcattccttcccaacaacggtcaggcatgggtcacaggaccagaggaagtgccgatagtatatcgtatataaaacaggaagaaagcggcgagacgcgatggattctcgagcgtcgccggactgcagagtcgggcgagatcgagatccttgaaagagagactgtcgacggcggtaggatatgatccgtatttcgtaggatatcgactcatcggggaaagaaaaggctcactatttacggatttggtcttgaaattgcgcattgggtagcgaggtctgcattgagaagcgggttctatataatcacacaggaaggaacagtgatagggtactggggaattggatactgagactttggatcggtgggagccctggctactatctacaagccgtgcatattgactcgctttgactacataatattaata

SEQ ID NO: 15166 - DNA, 1305 bp, Muscodor strobelii
  misc_feature: SGI cDNA ID NO. 565017
  misc_feature: Elevated expression when VOC is produced
  misc_feature: Encodes the peptide sequence at SEQ ID NO 15167
atgaggttcagaattattgtgtcgcttgtgttggggaaagcatttgccgccactagtggatccttcaacgttctgagtatgaatgtggcaggattgcccgcctttctgcaagacaatgatgttcctggagacaaaacaacgaattcagggacaatagggtccaaattcgccgaatacgactatgacataatccatgttcaggaggacttcaactaccatgcctacatctacgcaacggacacccatccctaccgtacggctacatcaggcggagtgccgttcggctctggcttgaatacgctggccaactatgactgggtagacttcacgcgtgttggatgggatacttgttctgatgcttccggttccgactgtttgacaccgaaagggttcacatccatgcgcgtggctttatcagacggcgtgtacatcgatgtctacaacttacataccgatgctggaaccgaagctgctgacgagattgcacgcgatgcgaacatccagcaggttgctgactacatagataaccgcagcattggcaatgcagtgctcgtatttggcgacaccaacagtcgatacacgagagctgatgacaatattcgtgtgtttgcaactcagaatgatctcgtcgacacatgggtggagctagttcatgatggtgtaataccctctatagagaatgtgtgcgacaatccagcaaatacgacggcgtgcgagactgttgataagatattttatcgcagtagcgcattgcttgatctcacggcaactttctggaagtatgaaacgccgaaatttctccaaactgatggaagtatattgtctgatcataacccaatcaccacaaactttacatgggcaaccagtgcgtctttgcagcagtctgatttccacggcggatcgcacggcgcatggttctctgatgtaccgattcttgcggccaagacgggaccaaaggcaagcgtgttatccttcaaaggcggctcgcgacttgatagcatcagtcttacattagctgatggcacggttctctcccatggtggcaccggcggcacggaaggtaccctgacactcgcaagtggcgagttctggaattccgcaaagctctgtcaggggcaatacaatggagatacacgaaacttctacattcttgctacaacgaatagtggtaggaccttagcagctgggacagcaacaaccgactgcagaacatttactgcgcctagtgggtggggcattgtcgggtttttaggtcaagatggtgatgaaatcgaccagctagcatttgtatacgcgcctaaataa
